United States Patent Application Publication US 2007/0009916 A1 - sequence listing, part 2

SEQ ID NO: 1247 - DNA, 11223 bp, Homo sapiens
  source
  (1)..(11223)
  CDS (201)..(476)
  CDS (1279)..(1361)
  CDS (4006)..(4116)
  CDS (4459)..(4550)
  CDS (6347)..(6769)
  CDS (7294)..(7470)
  CDS (9257)..(9340)
  CDS (9521)..(9616)
  CDS (9825)..(9959)
  CDS (10809)..(11023)
accaggcgcgggacctggggcgggggacgggacttaaataaaggcagacgctgtttttctacccatgtggcccacacgcgtctccgtttcagtggcggggctggcaaacgtcattccctagccccgcggccctttaaagcccggacaggtgcagctcggtgccgcctctggttggctggcgtggggtgacgtaatggcacatggcccgtcgccattggctgggcggcaagctccgccccctggactgcggcgcgggtgggggttgtgcgttttacgcaggctgtggcagcgacgcggtgaggagacggcccacggcgcccgcgggctggggcggtcgcttcttccttctccgtggcctacgagggtctggatccttctctgccggctcgtgggccgtgcctttgcccttctgcgaggccctgaatctgatcccttcccttcatatccggatccgggctcctccctccaagcccggggttccggacacctcccccaagacaacccctctggcctcctctccttcagtacttggaatctgatctcttctccctaattctgcggatccggcccctaatattctttatcagaccctcagacaagaggctgacttctgcccccttgtcaaggagcgaggccactttcctctccaccccatgctagcgaggataacttatttctcttctggaattgcatcttatgcgcctttccccacccatccccacagcccctgcaatacccagtttggcctcttttgcttgtaataacgcagatcccagcgccacggcaccttagaacagacctttttctttctcgcgtggggcctgactccttcagtgaagcctctccacgccctctatctgcaggtccccagcctgggtaaagatggccccatggcccccgaagggcctagtcccagctatgctctggggcctcagcctcttcctcaacctcccaggacctatctggctccagccctctccacctccccagtcttctcccccgcctcagccccatccgtgtcatacctgccggggactggttgacagctttaacaaggtgggtgcaccggcagcctcgttagaggggaacacagcgatttagagtggggaactctgggatgcaaatctgcgtggatttaagtttcatcttggtctcttactagttgtatggccctaggcaggttgcctttctgtgcctcagtttcctagtcagtagaacagtgaagtgctagcatgtgccaggcactgtacttagctattactaattttctgtttccagggcctggagagaaccatccgggacaactttggaggtggaaacactgcctgggaggaagagaatttgtccaaatacaaagacaggtaaggggctgctgggggaaggggtgtatattcccctccccgccaaatctctgctctgctggtgtagggctaggaactcttggggagcacttattcattcaacaaatagcactgaacatctatagtatagcagtaaacaaggcaagcaaaatgcccccttcctggagctcacattctagtagagaagacaagcagtgaatgagtaagtgaataatattatgtcagatgaagaacaaacagtgaagcacggtagactgcaggacggtgggaggcaaggtgttcaaggtttggcatttgaacagagagacaggaagtgaagaagcgagctatgtgacagggagggaattgggcagaggatgggactgagcttggtgtatttgagaagtggctggagtggagtgagccaaggggagagtgctagaaggtgaaggcaaaggcttaagcctcgagggctacagaaaagagtttagattttttttggagtgtaatgggaagctcttggaaggctatgagcagaaaaagtgatactgtcttctctacacctttaaagattactcacactgctatgtagcaaacggattgtaaggggcaagggcggaggaagcagggagaccagtttgggaggcaagtgcatcatctaggtacaaaggcaacacaagctagtgtggtatctagtggaggacatgatgaagaggtcacagtctgggtatattttgcagagagaacaataggacctggtgatagattcattatgggtatagagaaacagtagaataaaagatgcttactagattttgggcctgagcaactgggtgagtagtgcagctgttttctaagatggtgagatgcgaaaccgagaaggtttaggggaggggtgggatgtggtgttctttgaacgtattgggctgaaatgtccattagacatccaggtagactccatacaaatctggaattcagaaaagagtaggaattggaaacaggaatttgagagttgtcattatatagtcagtatgtaaagaaagccatgggaaggatacagaaagccattatatagtcaatatatgtaatacagaaagccatttatatagtcagtatgtaaagaaaggcatgggaaggatacagaaaggcgagccctgagccctccagcttttcaaagtcagatggaagaggagtcagcaaaggctcagagttagacctggttgtcggttcttaacctctcagagccacagtttcttcacctgtaaaatggggatattaatacctggtttgcctatttcatagaagtgtggaaaaggcttaactgggatgcccactagaaataaaggttttgttattatgtaacattggtcattttctcttttccttcgccgggcctgagtttcctcattcaggaatgaggggattggctaagacaaccccagaggcacttccagctttgtaatggctcctgcgttgcttgcttttttaaatcacctcctatatgccaggcactgtgccagaccctttaaatacaggatataagacatcaaatatttatatatgtgtgtatatatatgtgtgtgtgtatatatatatgtgtgtgtatatatatgtgcatatatgtctgcgtatatatatgtgcgtatatatatgcgtatatatatatatatatgtatatatttgtggtaaaatacacataaaaaatttcccattaaagacatttaataatatttacaatgttgtgtaaccatcaccactatgtagttccagaacattttcattacccccccaaaaaatcctatacctattacacagccactccctattctccccttccctcggctcttggcaatcactaatttgtgttagtcaagcagaaattatggatttgctgatttcattggaatcataaaatatgtggccttttgtgtctggctagtttcacttagcataatgttttcaaggttcacccataccgtagcatatatcaatacttattcctttttatggctgaataatattctcatttggctgtaccacattttgtttaaccatgcatcagttgatggacatctgcattgtttctaccttttggctgttgtgaatagtgctgctatgaacattgtctacaagttttcgtttgaacacctgttttccattcttttgggtctatatccagtagtggaattggcaggtcctatggcaattccatgttttacttattgaggaactgcttttccacagtggtgatgccattttgtattcccacctgcagtgtgggaggattctaatttctccacatccctgccaacacttgttataggatgtatttttagccatatctacccagcaagggtattatattccattgctcagatgcaggaactgatgtatgttacaacaaacctgcagggaaggtattgtcatccccattttacagatgacaaaacaaagaggttcagagaggttaagtgacttgcccactagatctaccactagatttgaacccaggtctctctgcttcccagaaccatgaccccttccattatacctcatggcctctcctttgatattttcaccgcacgaggaagggtggagagagacttgaggagggtggtgggtggggtggggcatgtttcccaccagccctgccctgtccgatcagtgagacccgcctggtagaggtgctggagggtgtgtgcagcaagtcagacttcgagtgccaccgcctgctggagctgagtgaggagctggtggagagctggtggtttcacaagtgagtggcaaagggccttccctggaagtgggtcacaggtgaggcctggtgataaggcctgatttggccgagaagcaggggggtgcatgctggggcccatgtcctggttgtgctccttccaaacccaggtctgctaagaacttgccgggggacttgcgctccactttgagcctcagtttacccttctgccaaatggggaaagggcattggtcagatggccttttgggtcttatgtccaagctgggttgaatcacagattcaggcatgggggaatgggaacagcacttatgacactatctcagcacctcctccccacctccctccaccctgcccctgcctcaggcagcaggaggccccggacctcttccagtggctgtgctcagattccctgaagctctgctgccccgcaggcaccttcgggccctcctgccttcgtgagtttttaagttgctcttggggatgggaggggaccaccgagtccagggatccagtcctggctctgtccctagttcgctgtgtgaactcaggctactcagataaacttctctggacctcagttcttgcctgcctgacagggctggggagatgggcaaatcagtggggaaaggcttggagaaagcacaggggctagactgagtcatatgcagtatagttatcatcatgtactaaagaaatgatagacttcccagccccttcatttcccatgccagatcggactatggtaccttcctggggaggggcgggtgctgacctggagcctccatgatcgccatccatcctcacacacagtcctggcacaagagctgaacttactaccagcctcttttagagcagtctttcctgaagctacagataaagagctagctacaaagatggcaaattcagtctttgtaaaagaaaatattggctgggcgcggtggctcacacctgtaatcccaacactttgggaggctgcggtgggtggatcatgaggtcaggagatcgagaccatcgtggctatcatggtgaaacaccgtctctactaaaaaatacaaaaaattagccgggcatggtggcgggcgcctctagtcccagctactctggaggctgaggcagaagaatggcatgaacccggcaggcggagcttgcagtgagccgagatcatgccactgcactccagcctgggcgacagagcgagactctgtctcaaaaaaaaaaaagaaaatatttggtccagtggctcgtacctgtaaacccagcactttgggaggctgaggcaggaggatcacttgaggccaggagtttgagagaccagcctgggtagtagagcaagaccctgtctcttaaaaaaaaaatagtggggcatggtagtgcagcctgttgttcccctaggctgaggtgggaggattgcttgagcccaggagttcgaagctgcagtgagctatgatcatgtcattgcctgggaaacagagcgagaccctgtcactaaaaataaataaataaataaataaataaataaataaataaataaataaaaggtctgtaaaatctaattgttccacaagaggaaattggttaagtaaatgtcagttttatgacaaaatattatgtcattaaaattaattttcttctccaaaaatgtttactgatatgcagagcagaaaatattatcttgttttttttgtttttttgtcttttttattgatcattcttgggtgtttctcccagagggggatttggcagggtcataggacaatagtggagggaaggtcagcagataaacaagtgaacaaaggtctctggttttcctaggcagaggaccctgcggccttccgcagtgtttgtgtccctgggtacttgagatcaaggagtggtgatgactctcaaccagcatgctgccttcaagcatctgtttaacaaagcacatcttgcaccgcccttaatccatttaaccctgagtggacacagcacatgtttcagagagcacagggttggggataaggtcatagatcaacaggatcccaaggcagaagaatttttcttagtacagaacaaaatgaaaagtctcccgtgtctacttctttctacacagacacagcaaccatccgatttctcagtgttttccccacctttcccccttttctattccacaaaaccgccattgtcatcctggcccgttctcaatgagctgttgggtacacctcccagacggggtggtggccgggcagaggggctcctcacttcccagtaggggcagccgggcagaggcgcccctcacctcccggacggggcggctggccgggcggggggctgaccccctcacctccctcccggacgggctggctgcccggcggagacacttctcacttcccagacggggcggctgccgggcggaggggctcctcacttctcagacagggcggccgggcagagacgctcctcacctcccagacggggtcgcggccgggcagagacgctcctcacttcctagatgggatggcggccgggcagagacgctcctcactttccagactgggcagcctggcagagaggctcctcatatcccagacgatgggccgccaggcagagacgctcctcacttcccagacggggtggtggccgggcagaggctgcaatctcggcactttgggaggccaaggcaggcggctgggaggtggaggttgtagcgagccgagatcacgccactgcactccagcctgggcaccattgagcactgagtgaacgagactccgtctgcaatcccggcacctcgggaggccgaggctggcggatcactcgcgtttaggagctggagaccggcccggccaacacagcgaaaccccgtctccaccaaaaaaatacgaaaaccagtcaggcgtggtggcgcgcgcctgcaatcgcaggcactcggcaggttgaggcaggagaatcaggcagggaggttgcagtgagccgagatggcagcagtacagtccagcttcagcttggcatcagagggagaccgtgtaaagagagggagagggagaccatggggagagggagagggaggccatggggagagggagagggaaagggggagggggaggggagggggggagggagggaaggcaagggagagggagagggagagggagaaaatattatcttgtatatcaaggttgtatagatgacctcacctggtttggtgtcttcccacagcctgtcctgggggaacagagaggccctgcggtggctacgggcagtgtgaaggagaagggacacgagggggcagcgggcactgtgactgccaagccggctacgggggtgaggcctgtggccagtgtggccttggctactttgaggcagaacgcaacgccagccatctggtatgttcgggtaggtagccaaaaggtgtggcactgggcaggggcagatggggcacctgcctgcccatcctcatgctgcccccattccacccagcttgttttggcccctgtgcccgatgctcaggacctgaggaatcaaactgtttgcaatgcaagaagggctgggccctgcatcacctcaagtgtgtaggtaagtggggccctagctaggtctgggaagatggtcaggggcctgggcttggtcctttattctctcaacacaagcctgggctagactagcctagtctccaccttcatggagatctcaacctggctgggaaggcagaaaagtaaccagatacttacagtccagtacacaggtactgtgtagtatagtccctgtgtacagtgagagatgcctctgatctagttcagtggaagtggtgatggggaatcaggaaaggcttcttggaggaggcgttactttggccaagtcctaaaaattgaggaaggggctgggcgcggtggctcacgcctgtaatcccagcactttgggaggccaaggcgggcagatcatgagatcaggagatcgagaccatcctggctaacatggtgaaaccctgtctcaactaaaaatacaaaaaattagctgggcgtggtggcgggtgcctgtagtcccagctactcaggaggctgaggcaggagaagggcatgaacctgggaggcggagcttgcagtgagccgagatcgcaccactgcactccagtctgggcaacagagggagactccatctcaaaaaaaaaaaaaaaaaaaaaaaaaaatgaggaagggttggctaggagaatgaggacactgaacttggggtcaggaaacctgggttcaagacttggtttggtcccagcctagccacttatatagactaaagtaaaggctaagctgctgtaacaaaaatccccaaaagactgtggcttaaagagtatagaggttggctgggtgtggtagctcactcacgcctctaatcccagcactttgagaggctgaagtggggtggatcacctgaggtcaggagttcgagaccagcctggccaacatggcaaaaccctgtctgtactaaaaatacaaaaatttagccaggcatggtggcaggtgcctgtaatcccagctactcgggaggcagaggcaggagagtcgcttgaatccaggaggcagaggttgcagtgagccaagatcacaccattgcactctagcctgggtgacaagagcgaaactccatctcaaaaaaaaaaaaaagaatctagagggtagaggtttatttttttttatcatattacagtcccaaagtgagtagtccaggctggcaggggagctctgctagtcataatcattccagtacccagattattcctgtaacttactgcacaatcatccccttgggcgttgtctgcatggttgaagctgagtcctgggcatctctgtgtcccacatgccagcactcaggaagggagaagggaaagaaagtgcattgaggagtccaagcattgttttaagaccaagctaacggtggagctcatcactcctgtttacatcctgttggccagaactcaatcacagggacacacttagcttcaagacaggttggcaaatgtggtctctggctgggcagcctgaagtccagctagtctgcttctgtgttggtagacagcttgcagtctctgccataccatttaatcccaggcaagaccattccccaacggctctggcttcagcttccctactaaatagggattgaaattctcaccctgctcacctctctgcagacattgatgagtgtggcacagagggagccaactgtggagctgaccaattctgcgtgaacactgagggctcctatgagtgccgaggtcagtgtctacttctgcagaggaggggacgtgaggagtggaggaagagctgctccacacctgtccctccaaaccttccccttctcaggcttcagagcacccccaggcctccgcttctggagcgtggctcccctgggcctaggtgcacatctcaccctcatctttctctcctctctccagactgtgccaaggcctgcctaggctgcatgggggcagggccaggtcgctgtaagaagtgtagccctggctatcagcaggtgggctccaagtgtctcggtgagtctcctgctgatgggacacaggcacctgggagtgcctcacccagcatgaatggtgaagaggctggaatatgggcaggtgggggaaggaagggtggaatgttgcctgggcaagggcagaggggagtgttgagagatggacaagatggagtcagggtgctgggtggggggccctagcaggactctgacccctccctcccctcaagatgtggatgagtgtgagacagaggtgtgtccgggagagaacaagcagtgtgaaaacaccgagggcggttatcgctgcatctgtgccgagggctacaagcagatggaaggcatctgtgtgaaggagcagatcccaggtgagccctggggcgggagaggggaggtcctcattcaaagagaaggcaggcaagccccttccccaggtagcagtggcagctccaggccctgccccatccctactgccacccagccccctggaggctgcactgagaccgggctctacatctgatctccaggttggctctcagcagccttataccttccagggtacaaagggaatcagacctggcatcaaatcagtctgcctccttaacctgtttcctcatctatccaatgggaccagtgtttgccctggcctgctgagagctgtcctaggccgggggtgtggtgagatgcagggtaatcacaacgatgatggcagggaccatttccccagcaattactgtgtcagatgctgttctaggtgcattccccatcttaactgatttaacccctgaaacaacccgacgctggaagttgggttctcatccccactctacatatgtaaaaatgaagatgcagagagatgaagctactttcccagggctatatggcaagcaagtcgcaaagctgggatcccaatccagacagtctgaccgtggaacgagactcatacacgtaataaatgctctgcccccaacttgtccaccacatggccttggcaagtccaacccctttacctctctgagcctcactttcccatttagtgagacagggatggtaactgccccttgcagggtggttttgagcagtaaatgtagtgtgcctggcttgctgggcaggcctggtggccatgatgatcaggtgtgtgggagttctggggagactccaagaactaccaggaacagggatacgagtgccaggctgcatctcttgctcctctgcagagtcagcaggcttcttctcagagatgacagaagacgagttggtggtgctgcagcagatgttctttggcatcatcatctgtgcactggccacgctggctgctaagggcgacttggtgttcaccgccatcttcattggggctgtggcggccatgactggctactggttgtcagagcgcagtgaccgtgtgctggagggcttcatcaagggcagataatcgcggccaccacctgtaggacctcctcccacccacgctgcccccagagcttgggctgccctcctgctggacactcaggacagcttggtttatttttgagagtggggtaagcacccctacctgccttacagagcagcccaggtacccaggcccgggcagacaaggcccctggggtaaaaagtagccctgaaggtggatac

SEQ ID NO: 1248 - protein, 563 aa, Homo sapiens
MARRHWLGGKLRPLDCGAGGGCAFYAGCGSDAVRRRPTAPAGWGGRFFLLRGLRGSGSFSAGSWAVPLPFCEALNLIPSLHIRIRAPPSKPGGLERTIRDNFGGGNTAWEEENLSKYKDSETRLVEVLEGVCSKSDFECHRLLELSEELVESWWFHKQQEAPDLFQWLCSDSLKLCCPAGTFGPSCLRAAGQRRPSPPGRGGWPGGGLTPSPPSRTGWLPGGDTSHFPDGAAAGRRGSSLLRQGGRAETLLTSQTGSRPGRDAPHFLDGMAAGQRRSSLSRLGSLAERLLISQTMGRQAETLLTSQTGWWPGRGCNLGTLGGQGRRLGACPGGTERPCGGYGQCEGEGTRGGSGHCDCQAGYGGEACGQCGLGYFEAERNASHLVCSDIDECGTEGANCGADQFCVNTEGSYECRDCAKACLGCMGAGPGRCKKCSPGYQQVGSKCLDVDECETEVCPGENKQCENTEGGYRCICAEGYKQMEGICVKEQIPESAGFFSEMTEDELVVLQQMFFGIIICALATLAAKGDLVFTAIFIGAVAAMTGYWLSERSDRVLEGFIKGR

SEQ ID NO: 1249 - DNA, 1888 bp, Homo sapiens
  source
  (1)..(1888)
  CDS (201)..(1403)
  CDS (1524)..(1688)
tttctgcagtaaatgaaaaataagttatatgcagtgaaatcttttgctataatgttggtggtggttgttttttttaaatagcccatatgttctgctgaaaaatatcctatcttcttgttttccttaaattatattctgcaggcttacatttcaagtggccattaggggcccctatgctggcagcaatatatgcaatgagtatggttttaaaaatgctgcctgccctgggtatggcgtgtccacccaaatgccgctgcgagaagctgctcttctactgcgactctcagggcttccactcagtgccaaacgccacagacaagggctctctgggcctgtccctgaggcacaatcacatcacagagctcgaaagagatcaatttgccagcttcagtcaacttacttggctccacttagatcacaatcaaatttcaacagtaaaagaagatgcttttcaaggactatataaacttaaggaattaatcttaagttccaacaaaatattttacttgccaaacacaacttttacccaactgattaacctgcaaaatttggacctgtcttttaatcagctgtcatctctgcacccagagctcttctatggccttcggaagctgcagaccttgcatttacgttccaactccctgcggactatcccagtacgcctgttctgggactgtcgtagtctggagtttctggatttgagcacaaatcgtttgcgaagtttggctcgcaatggatttgcaggattaattaaactgagagagcttcacctagagcacaaccagctgacgaagattaattttgctcatttcctacggctaagcagtctgcacacgctcttcttacaatggaacaaaatcagcaacttgacatgtgggatggagtggacctggggcactttagaaaagctagacctgactggaaatgaaatcaaagccatcgacttgacagtgtttgaaacgatgcccaatcttaaaatactcctcatggataacaacaagttaaacagccttgattccaagatcttaaactccctgagatccctcacaaccgttggtctctctggcaatctgtgggaatgcagcgcccgaatatgtgctctggcctcctggctgggcagtttccaaggtcggtgggaacactccatcctatgccacagtcctgaccacacccaaggagaggatattctagatgcagtccatggatttcagctctgctggaatttgtcaaccactgtcactgtcatggctacaacttatagagatccaaccactgaatatacaaaaagaataagctcatcaagttaccatgtgggagacaaagaaatcccaactactgcaggcatagcagttactaccgaggaacactttcctgaaccagacaatgccatcttcactcagcgggtaattacgggaacaatggctttattgttttctttcttttttattatttttatagtgttcatctccaggaagtgctgccctcccactttaagaagaattaggcagtgctcaatggttcagaaccacaggcagctccgatcccaaacacgactccatatgtcaaacatgtcagaccaaggaccgtataatgaatatgaacccacccatgaaggacccttcatcatcattaatggttatggacagtgcaagtgtcagcagctgccatacaaagaatgtgaagtataatatctacccatcatcaaaaatcacatcagataagtaacctattttacatagtagaggctaaatacatatctaatttttaccaatggtgacattaagcctaattttccaaactaagtggagacttagtttttgaagtgttgaagtatttttaattttttaaatgaaaccatattttaagtgttaaatgaatcaatgctcac

SEQ ID NO: 1250 - protein, 455 aa, Homo sapiens
MVLKMLPALGMACPPKCRCEKLLFYCDSQGFHSVPNATDKGSLGLSLRHNHITELERDQFASFSQLTWLHLDHNQISTVKEDAFQGLYKLKELILSSNKIFYLPNTTFTQLINLQNLDLSFNQLSSLHPELFYGLRKLQTLHLRSNSLRTIPVRLFWDCRSLEFLDLSTNRLRSLARNGFAGLIKLRELHLEHNQLTKINFAHFLRLSSLHTLFLQWNKISNLTCGMEWTWGTLEKLDLTGNEIKAIDLTVFETMPNLKILLMDNNKLNSLDSKILNSLRSLTTVGLSGNLWECSARICALASWLGSFQGRWEHSILCHSPDHTQGEDILDAVHGFQLCWNLSTTVTVMATTYRDPTTEYTKRISSSSYHVGDKEIPTTAGIAVTTEEHFPEPDNAIFTQRNHRQLRSQTRLHMSNMSDQGPYNEYEPTHEGPFIIINGYGQCKCQQLPYKECEV

SEQ ID NO: 1251 - DNA, 1423 bp, Homo sapiens
  source
  (1)..(1423)
  CDS (201)..(407)
  CDS (951)..(1223)
aagaaaacaagaagaggaggaagaggagcaagagcacatgggggaggaggaggaatatcaccaacagagaatggcacatcctaaagcagggacatgaaagctgtctgcagtcatcataagaaaggaagtggtgataatttaagcagtttatgtagtttgaaagtttgagcctaaatataccttggctatttttaggtagcatggagaatgtgtctgcattgtcactgttgactgtggagagtcccacgtccatgtttgactattgtgatgactctttggagagggtcaagtctgctcttgacatcttttccatgatcatctacacagtgactttcttcctaggcttggctggcaatggccttgtcatttgggtagttggattccacatgtcctgcacagtcaacacggtgtgggtggtacctcaacctgcccgtggctgacttcatcatcatcttcccactgcttctccagctggttatggtagctctgtaaccctttggccagctgctctgtaaactcaatagcaccatgtctatttttaactttctggccagtgtcttccttctgaccctcatctccatggaccactgacttgtgatcctgtggccaatctagtcctggaacaattgcacaccagcaaaggcaactctggggcccttgaggacctggcttttggcaatttgtttctctgttccctacttgatcttcaaggaaactcgtggtggaaagtgtcaccctctttgtacaaccagtatgatctgcagaatgaaactcaaggaagtcaccaactttggaaagagattatcattccatggcaccaaacgctggtcacaacagcccactttttctttggcttctttctccctctggctatcatcactggctactacatccttgtagccttgaagttaagagaaaggcagctggttaagtttagctgacccttccaggtccttgcgactgtggtaaccaccttcttcctctgctggttgcccttgcaagtgtccctgtggctggacttcacatcatttcgggaagacagagagggcctgaaccaggtggccttactcctaagacccctggccttgtctatggcctttatcaacagctgtctcaatccagttctctatgtcttcattgggcatgatttctgggagcacttgctccactccctgctagctgccttagaacgggcacttagtgaggagccagatagtgcctgaatcccagctcccaggcagatgagtcctttataacatgacccaatttcctactccattttcccaccactcaatcctcttcccaaacagctctaccataatccaacatccaacagaatttaagagaataaaccacaacttttaagtgagctctatgtgctaggtcatgttttagaatacaaccttaagtgcctggaagatgg

SEQ ID NO: 1252 - protein, 159 aa, Homo sapiens
MENVSALSLLTVESPTSMFDYCDDSLERVKSALDIFSMIIYTVTFFLGLAGNGLVIWVVGFHMSCTVNTVLATVVTTFFLCWLPLQVSLWLDFTSFREDREGLNQVALLLRPLALSMAFINSCLNPVLYVFIGHDFWEHLLHSLLAALERALSEEPDSA

SEQ ID NO: 1253 - DNA, 53809 bp, Homo sapiens
  source
  (1)..(53809)
  CDS (201)..(288)
  CDS (1271)..(1350)
  CDS (1650)..(1677)
  CDS (3021)..(3078)
  CDS (8331)..(8353)
  CDS (10809)..(10841)
  CDS (12020)..(12064)
  CDS (12426)..(12862)
  CDS (13717)..(13755)
  CDS (19514)..(19586)
  CDS (25189)..(25368)
  CDS (27408)..(27479)
  CDS (27653)..(27826)
  CDS (28136)..(28300)
  CDS (30726)..(30896)
  CDS (34508)..(34678)
  CDS (36623)..(36645)
  CDS (37476)..(37617)
  CDS (38132)..(38331)
  CDS (39960)..(40065)
  CDS (40143)..(40261)
  CDS (43119)..(43365)
  CDS (43640)..(43792)
  CDS (45218)..(45540)
  CDS (45967)..(46091)
  CDS (48355)..(48520)
  CDS (48693)..(48820)
  CDS (49156)..(49202)
  CDS (51179)..(51256)
  CDS (51673)..(52253)
  CDS (53190)..(53609)
cgctgcacctacctgctggcgggtgctgcggactccacctgggctgtccacctaacacccggggaccgctgcccccagcctggacactgtcagcgggtgagggagggagatggggcagccacagggaggaggctggacaggggaggaagagagccccagcccccttttccactctgcatctcctcaaggtccaggtgactatgggacccgaggaggtgctgatccaggctggaaatgtgtctgtgaaggggcagctggtacctgaagggcagtcttggctgctccacggtgagagcactgggagagcaagaggctgcccaggcccccacgtgctcctctgacagtctctccaccctccaggcagggtcagaaaaggagcagggggctgtttgggaatgatcccgcagtgggcccccagtcattgctgttgggaggcactgaagcgcagatccagtgaggggccgggaggaaccaggcctagtcccgaccctctgcaactacccccaccaaactctcacagcaccagctcagacaagtccctctacctaactgcccgagcctcagtttccccgccagcctcagaggagtgctgtgaggtagcactttggtgctaagcaatgggaagctctcctaacagaacctttgtcttggctgggctgcagggtgaggtgggggtgagcttcctgcgtgtatgcctgtgtgtgcatgggtgcagtgtgtgcatgtatgtgtgcatgcatgtgtgtgcacgtgcacgtgtgtttcatagttcacttgaagtttactctctccagagagcgtctgcagctttcatgagctcctcaaagggagctgtgatggaaatcaatcactctgctgtaaagcatatacttttggtataaagtgcagagctctctagaatgtgagaattgtgtgagttatttcccttctcctttccatccctgggtagctgagcccagctgtggtagtgggaagggtgagaattgtggctgcagggggcaagtgacctctttctgtgcccagggctgagcctgcaatggctgggggactggctggtgctgtcaggaggcctgggggtcgtggtgcggctggacaggactggctccatctccatctctgtggaccacgagctctggggacagacacaaggcctctgtgggctctacaatggctggccagagggtaagtggggtgtggtttgttgctggtgtagcagggaagggaagaccggagaccctagacccagcacccctgcctcaccccttctcagatgacttcatggagccaggcggagggctggccatgttagcagccacctttggaaattcctggaggctccctggctcggaggtgaggctgccactggggcccctccctcccagctgcctgcccattcccagcttttcaggctggcttctgactcctgcacctccaagcccttgtcccagtttcattgctggcctgttccctaggacagggactggccctctcccagatcctcagggcagagggcaggccttggggtcccacagaaagcccggctgcctgctgtgaactagccatctgaggccagcattggtgaaccagttagtcatttatccccaccactgcagcccagcgtggggctgccacctcgcctctctccccagccccaggatgtgggcggtgggcctgaaggtggggccctggtgctgtgtgagagcaggaggcatttttctggggtcctggttaacgtccctcatcactgccacctgacctgatggcctttgtctgcagtctgggtgtctggatgcagtggaggtggcccagggctgtgacagcccctggggctcatagacgcagatgtagaacctggccacctgcgggctgaagcccaggacgtgtgccatcagctgctggaaggtccattcgggcagtgccatgcccaggtatgggtggggtaggggtggtgtctggcacccaagggaaggtgatagagaagtgtcagcaagctggtctggccctgcctgtgggttactttgggccatctgtcaaacccccacctctccatccttggctttatctctgggaaatggcccgctcatatatgtgatctctgaggttccttttggggctgatccatttggttataagttatggagtgatggaagcaggaggtagggggtgctggctgtttgctgaggggccgtcctttcctgcaggtttcccctgctgagtaccacgaggcctgtctctttgcctactgcgcaggggccatggcaggcagtgggcaagaggggcggcagcaggctgtttgtgccacctttgccagctatgtccaggcctgtgccaggcggcacatccacattcgctggaggaagcctggcttctgcggtactgctcgggcctccccccgctgcaggattgactgaggggctccccaccctgtgggattgactggggtctggcgggggactacagctcactcctgtgcccacagagcgcctgtgccccgggggccagctctactccgactgcgtctccctctgcccacccagctgcgaggcggtgggtcagggagaggaggagtcctgcagggaagagtgtgtgagtggctgtgagtgcccgcgaggcctcttctggaatggcaccctctgtgtgcctgctgcccactgcccctgctactactgccgccagcgctatgtacccggtgacaccgtgcgccagctgtgtaacccctggtgggtccttgagccatgctgggggttggtggccaggtggtgcccttggatccctcccttctcttcaacctgcttcccctaagcctccagcccattctgggtcttcctctcagagactgggactgctgctggcatggctgatggccttgctggctgacctctaccccttcagcaggaggggcttccacgggaggggaggaacaggggtttttggggggtcacctccagctcaggggtcatctccaccccctcagggtggagctgatgccagagctcactgtctcacccatgtgcccacagcgtgtgcagggatggccgctggcactgtgcccaggcactgtgccccgccgagtgtgcagtgggtggggacgggcactacctcaccttcgatgggcggagctactccttctggggtggtcaaggttgccgctacagcctggtgcaggtgggcagaggacggtctgctggggtggcactctgccacagtaggggccctcctagagggcacagtggggctgactgtaaggaaacccctaaataaataagcgaaacccagagtcttcccaggaaaggccaagggagaaccaacactgggggcatggctgttacaggcctcgaggcctcccgctgggttctcacctcctccccagcttccctgtgaaagtccctctgtcatcaccactcagcccagggccactaaccaaaacccatcttcagtcctgtctctcacagatgggatgggctgagtttgttatagactacttcatgcaaaacaacctcaggggaaataagaggccctgctcccgccctaaacctcccccaatgaagtgagctcacttctcaagttcaggtgcaggccacgattttcgcaatcatctggggtcccctgagtgatctctccattgaactattggaccattcccactcctctcataagtagtgatggggtgaggaggtcctgggagcacagtcctcacagaggctgtgcctgtccatggggagggaagaggacagccatctcccccagcaaacacagtcaaagatgcatgtgtgtacacacactcacacacacacaggctgcacaccaaaacacagcaatctgcatgtgagcgcgcacatgtgcatgcaaacacacacacacacacacacacacacaggctacaaaccaacacagagatctgcatgtgtacacacagacacatacaggctatacaccaacacacagagacttgtatgcatccacacacatatacatgcacccatgtacacacttacagacagacacagacatacacatgacacacactcatgtatgtgcatgtagatttagcatgtgtgtatacatgcacacaaacatgggagaacatacatatccataaggaggaaagagaggagtcatctcaccccaacatgcagacacgcacttacctacacacactcgtgaacatacaaacatgcacacacacctccacatgacacctatgtgcacctccatggccctgcacacacatacacacagacatccacgcatgcggcccatggtgaggacgaagccccttacctggcagagagtctgcctggccggaaggtgggcagctgcctccaggtgcgtgctgaaggtgttctgtagggaaggtctccagaagcctctccggagagggttggcccgccgggccccactgaattccccctgcccgccccaggactatgtgaagggacagctactgatcctactggagcatggggcctgcgacgctgggagctgcctgcacgccatctccgtctccctggaggacacccacatccagctcagggactcaggtagcctctgctctgcactcttgaggcagtctcaggcctcctgtcactgctcctcctccacactaccctatggctttggagtccaaacactcttccccagcctcctacacctaagcacactgcctcaacttccccggccctctcatctctgaagcagacatacagagtcctgaggagatgttccgaggcatcttctgccccgtcctggggtcagatacaagtcatgcagctatgagagcttgaaaggccttaaggcatgaccagaccgggcaggccactcagcagggtccctccaaccctccccaaccagctcctggcttgccatctagctcctcccacacactgatcatgagggtgagggactggaaaatctgtgtgccaagggtagtccttgggccgcaggggtagggagctcaggtggacactctagttgtccccagcagcccatcctgacatgggactttctacttcccatccaagctccttcccttatcgcagccctatccttccacgtgccccacccccaccatcagaccccctgttccaggagctgtgctggtcaatgggcaggatgtgggcttgccctggattggcgctgagggcctcagtgtgcgccgagcttcctctgcctttctgctgctgcgctggcctggggcccaggtgctctggggactgtctgaccctgtagcctacatcaccctggacccccgccatgcccaccaggtgtgccagtgaggcggctgtgtgggggagcaagggtgcggtgggactgcattcagctgtcttacatgcgtgcttgtggcccaggtgcagggtctgtgtggcaccttcacccagaaccagcaggacgacttcctgacaccagccggagatgtggaaactagcattgctgcctttgctagcaagttccaggtggccggcaagggaagatgcccctctgaggacagtgccctgctgtctccctgcaccacccactcccagcgccacgccttcgcagaggcggcctgtgccatcctgcacagctctgtcttccaggtagctgggttgggctcctcccacatctgtaagatgggccgacacctgccctgccctccacctgggctcttgggaggatcaagggagaccagacaagcccagaggtggtattggggaccaaggggacgtagactccgtggaggagaagttgacccatttccccatctcctcccaaggaatgccacaggctggtggacaaagagccattctatctgcgctgcctggcagccgtgtgtggctgtgatcccggcagtgactgcctgtgcccggtgctgtctgcctatgcgcgtcgctgtgcccaggaaggtgcctcacctccctggaggaaccagaccctctgccgtaagtttgctcagcccagccaaccccacccaggctcctcccctcctccctagcccatcccccttccaggaatggctaggggcccagggtgcatctctacccttggcagactgccgggcttttcttcctgcaaaggcacagggggtgtgggctgtggggttccgagggggtggagagagccagtggtggctatgcccctgacctgtgtgtgtccctgtgcccagctgttatgtgtcctggtggccaggagtaccgagagtgtgccccagcatgcggtcaacactgcgggaaaccagaggactgtggagagctgggcagctgtgtggctggttgtaactgtcctctggggctgctgtgggaccctgagggccagtgtgtgccccccagcttgtgcccctgccagctcggagcccgtcgctatgcccctggcagtgccaccatgaaggagtgcaaccgctggtgagggcagcgacctttggggcaagaggaagaatgtgggggtgaagaggtagcttgggagataacgggtggggtgcagccttgttggttgcagcgtgcatgctgggggtgacagagtgctgatcacttcccctcggtcgtggggcactttagggtccataaagcactttcgtgtgcatcattttatctagttttactttcctatcataacctcataaagtaagaagtggaaaaattgttcccattttgcagatgaggaaactgaggctcagataggctaaacagcttgcagggtcacacagcttgttcacgagaagtgaagtgaaggcagattatggatctgcaggcttcaatgcaatccctctcctacctgggctgggagtagggtggttcaatatctctgtcctgctccagagcctggaggatggacctattggagccgggacagaaagggtgacaatgtctatcccaggcatgtcagggtgctggaaacagcccaactccctgtgctgatgactgagtgttgggagctgagatgctcaggtctccagcatcagggctgggttttcactcaacgtgatgggatctggacacctgggtacccagtgtctgggttcctgagattctcaccaggtcagaccaggttcctggaagctcggacttgcctcttactccttctcaacctcctgcagcatctgccaggaaaggggcctctggaattgcacggctcgccactgcccttcacaggggcattctgccccagggagcttgtctatgcccctggtgcctgtctcctcacctgtgacagccccagcgccaatcactcctgccctgcaggcagtactgatggctgtgtctgtccaccaggcacggtgctgctggtgagtccaagaaggagctgcgtgggggaacaggatggccttccttaagccagggcactgccctgctcccctcgcacccctacatggtgccctttgtccctgccctctgcccaggacgagcgctgtgtgcctcctgacctctgtccctgccgtcacagtgggcagtggtacctgcccaacgccaccatccaggaagactgcaacgtttggtatgcccagctgccgtgacctctaaccctttgaccttgtggcccatggctccccacacatcatccttccctccaccagaaggggtcggggtggtgggggctggggtatccagactggcctgggccaagggaaccctgcaggaccccaccacgctgagggctgctgagattgcctggaacctggaccagctgccttccctggatccagcccccagggccctatcctcggtgactctgtttcccccaccttgcccatagcgtgtgccggggccggcagtggcactgcacaggccagcggcgcagtgggcggtgccaggcatcaggcgccccccactatgtgacatttgacggactggccttcacctatcctggggcctgcgagtatctgctggtgcgagaggccagtggcctattcacagtctctgcccagaacctgccctgtggggccagcggtctcacctgcaccaaagcgctggccgtgcgtctggagggcactgttgtgcacatgctcagaggtggctgcaacattgaagggtgacattgccagggaggggcacacctgtatggcttcccagctgtgcaaggtgggagggggcggggttccctgtgtctgctcactgctggccagctccttactgggcttggctgccctccatgccatggggttggtgcctctcctcttggttgggactcaataccagaagcctcccagaaattaagtcccagagaagtctaatgatgtgcccaaggtcacacaggtagagaagcaaaagaagggctggacaggggagctagagagcctcatgaggatctggaggaccctttcctccaggctgggcctgaatgcctttcttcctctacaggccgggcagtgacggtgaatggggtgagcgtgacgccccccaaggtctacacaggccctgggctgagcctgcgtcgtgctggcctcttcctgctgctctcgacccacctgggcctcaccctgctctgggatggagatcaggcccctgccctccctcaaccattggacctgtgccccgccttagcaccatagggttgaactcaccccaacttctttctcccaacgcctgaccctccctcctcctggtctccctccactgagcccctgacacctccacagggcagatttccaggctgagagctaagctgacagccaggctaggaccctgagctctcaccttacttccctgcctggctggcacttgccctgccccatgcccaacccagtgccacccctacctcccagtccatgcaagaggtccgagtttccaaattaggtttttggccaggtgcagtggctcacaactgtaatcccagcactttgggaggctgaggcgagcagatcccttgagcccagggctttgagactagcctgggttgaacatggcaagactccctgtctacaaaaaatacaaaaattagctgggcacggtggtgcgcatctgaaatctcagctacctgggagctaagatgggaagattgcttgagcctgggacgtcaaggctgcagtgagctgtgatcaccccactgcactctgcctgggcaatagagcgagaaaaaaattttttttaaattaggttttcataattatctttttcatcattatgaaagcaatccttccacaccaagggaaacattgagaaaataccaagttttagaaaggcgaaatgaaaataaatctcctaacttcccatcacccatataagcagttggcttatatgttatatctaactgcttctgtggaactgagggaaacccagataacccccatatggacttggctctgagccgctgggccaccctcccagcctgccgccaccgaggctggtgctgctgggcctcacagtccatcctggagtctggtttcccagaatctgacctgatggagaatttctctccccctcagcccttggcttggtgttagttaggaaaataggctcctaattcctaccttgagccccctaaatataggtctcttcatttatcatcaccaatcatccccccacaaaagaggtaaccataccccctggtgggggtggcacctggtggtggtaaaacagaccctgggtcttctggcccagataagggctggtgaggtcacttttaaccatgctgccaccagggactcgggtcctggtgcaactgtcccctcagttccgtggtcgcgtggctgggctgtgtggtgactttgatggagatgccagtaatgatctgcggagccgccagggcgtcctggagcccacagctgaactggctgcccactcctggcgcctcagccccctctgccctgagccaggagacctgccacacccctgcacggtgagtgcaggcgggaaagcaggaagggaggttcccagaggcagggctggggagggtgtccgctggtccactgtgctggagacgccaccctgtgcctgcagatgaacacacaccgggctggttgggctcgggcccgctgtggggcgctgctgcagccgctcttcacattatgccacgcggaggtccccccgcagcagcactatgagtggtgcctgtatgacgcctgcgggtaaggagaggccaacctggagtggggtagaggtgggggtgccgggactgaatgcttcctcccacagctgcgactcggggggtgactgtgagtgcctctgctcggccattgccacctatgcagatgagtgtgcccggcatgggcaccacgtgcgctggcgtagccaggagctctgctgtgagtgtgccccgccctcagtccccaatgctaaatcctgccactgccacaggctcagcttcttgaaagagcttctcctgtcccacaagacggccgttcattcattcaagggcaagctgtgcatcgagtgcttactctgtgccagacacttttctagataagccatatatgcaagaacggctgccgagtagagctgacatggtacacgtcggcccggggggtcttgcccaaggtctacaccagacaccctgtgccctccatggtggtcaccttggccagccagcctggtgtggttgcatccttttgcccttgtgcctcagtgatccaaggctctctcctctccacccagccctgcagtgtgaagggggacaggtatatgaggcctgtggccccacgtgtccccccacctgccatgagcagcatcctgagcccgggtggcactgccaggtggtggcctgtgtggagggctgcttctgccccgaggggactctgctgcacggtgtgtagagtgacaaagggcagaggggaggggcactgagactgggaaggggccactgtgcccttttgctctgagccctgcactctgtgacctcaggaggagcctgcttggagccagcttcctgcccctgtgagtggggccgcaactccttcccgccggggtctgtgctgcaaaaggactgcgggaactggtgagtggggaggtcatcttgggggggacctattgaaggagcactgggccaagcccagcctgtggctgatcccaggacgctgtgtgctcagcacgtgccaggaaggtcaatggcattgtgggggtgacggtggccactgtgaggagcttgtgcctgcctgtgcagagggagaggccctgtgccaagagaatgggcactgtgtgccccatgggtggctttgtgacaaccaggacgactgtggcgatggctctgatgaggagggtgagtgtctttgcccatgcgtggaagcgacagggttggtcagtccttgcacatgtaactgaatttcctggggccaaggcagctgtcctggagtggcttctttagctgctgctcccattgccaggggctgcctgtggcctggagggatgaggggaagggagggtgttctggtccctctggggttcagggcttctctgggcccctacagcagcgtcctgagcctgcctgtttgccccatgctaggttgtgccgccccaggctgtggggaggggcagatgacttgcagctccggccactgcctgcccctggccctgctctgtgaccgccaggatgactgtggagatggcacggatgagccgagctatccgtgcccccagggcttgctggcctgtgccgatggacgctgcctgccgccggccctgctctgcgatgggcatcctgactgtctggatgccgccgacgaggagtcctgtctgggtgagttgtccctgccctggacgccagcccacccagcactccctcccgcaaggcccatctcctcaagagccccgacttcacctccccgctcctttgccaggttcctgctatgaagttggtcctgagggtgtgggagttggggcaccccaaacagtaagagtacagggcagtgccccagagccagttcttcttttctgtgcagggcaggtgacctgcgtccccggggaggtgtcctgtgttgatggcacctgcctgggggccatccagctgtgtgacggagtctgggactgcccagatggagccgatgaggggccgggacactgccccctaccttctctgcccacacctcctgccagcaccttgcctggcccctccccaggctccctggacactgcgtcaagtcccctggccagcgccagccctggtgagtctcctggagggaagaggtgggaaagctggtggccagaagcctgggggagaggggcatggaagcctcagagagaggcatttgtggcgctgctctgggatgggaaggagcagggcgcagtgggagacacccgaagacgctggaatgaatgaagtggagggcgtttgaaagagtctacactctttcctggcgttcaaggcctccctcccagctgcagggagtctcatggaaattcttggcccaggggagagctttgggaaaaccaaccgggcagcaaaatgcagagggattgttctcgggaaggggctgcaggtgggttagggccaggcccaggaaatggccaagggacttggaccagggaggggagcagcggcggaggtggaaggactgacccgggcgcggttgcgggtgggagggcgctcgccggcagaggatccagcgcggacgctccctgcagcgccaccctgcggccccttcgagtttcggtgcggcagcggcgagtgcaccccgcggggctggcgctgcgaccaggaggaagactgcgccgacggcagcgacgagcgcggctgcggagggccctgcgcgccgcaccacgcgccctgcgcccgcggccctcactgcgtgtcccccgagcagctgtgcgacggcgtgcggcagtgtcccgacggctcggacgagggccccgacgcctgcgttgaggctcccgcgcccccggccatgcgcggcccccctggccaagccggcgggcccacctcttcccgagcgccatccccaccttcgcctcctgaggcacaggtgggcgcggcagctagagtgatttaggtttgggggcatccgaggctgggccacgtttgcgttcctttgatctttttcgtgaaactttatttgaaaagtttttaccctcccacctaggcccaggagagcgaagaaaggggctttgtctttccccacacttggccaagaagggataagagggtgggcagaggctctgcggggatgaggagtgtgtctgtttggagggatcccgccctcagcatttccccaccagacctgagcagaccctctgtgtcactgcaagccagcccttcaggtcctgtctacctccccctatagcgagctgtccacaggccccccagctcctcccaggctggcctgtctggccgcctcccacccgcctttctgcccctctgcagggagagggcaggaagggacaggagcggagcaggacacatctcacagtgcccgcaggctccacccagctgcctctgtgccctggcctctttccctgtggtgtggctccggggctgtgcctgacccctgagcagctctgtgatgggatcccagactgtccccagggcgaggacgagctggactgcggtgaggatgctttgttccctgagggaggccccgctggctgggcccgggacacagctcacaccccccgctcactgtgttttttctcctcttctttcccaggggggctgccagccctgggaggccccaacaggacagggcttccctgcccagaatacacctgccccaatggcacctgcataggcttccagctggtgagggtgggagtgggtggaggaggcggcagtgccatgttgcctcccagcacaagagccctgaccccactccctccccaggtgtgtgatgggcagcctgactgtggaaggccagggcaggtgggcccctccccagaagagcagggttgtggggcctggggcccctggagcccatgggggccctgcagccggacgtgtgggccctggggccagggccggagccgccgctgctccccactcggcctcctggtgctacagaactgcccagggcctgagcaccagtctcaggcctgcttcacggcagcctgcccaggtgaggggctggggtggtggggcctggatagaggaagggagaagaaggccactaggccttcagccctcccccatggtcctcactgcctgccctgtccccctgcctcacagtggacggtgaatggagcacctggtccccctggtctgtgtgctctgagccgtgcaggggcaccatgacgcggcaacggcagtgccactcaccccagaatgggggccgcacctgtgctgcactgcccggaggcctgcacagcacccgccagaccagtgagttgaagagaggatggtgctgctggtgggaggccatcctctctgcagagctcccttccctgacctctgacctctgcttccggcttctctcagagccttgccctcaggacggctgccccaatgccacttgctctggggagctgatgttccagccctgtgccccctgcccactgacctgtgatgacatctctggccaggtcacgtgcccacctgattggccctgcggcagcccgggtaagggggctctgggcccaggtgctggctccagggtgtgggtctgtggcaacagccctctgcatggaagcctcaccctgggccccctctaggctgctggtgcccagaagggcaggtgctgggcagcgaggggtggtgtgtgtggccccggcagtgcccctgcctggtggacggtgcccgctactggcctgggcaacgcatcaaggccgactgccagctctgcatctgccaagacggacggccccgacgctgccgactcaacccggactgcgctggtgaggcccttccctcggggtccctagtcctctccctggaccgcccagctgcacatccaccacctccttcaggctctgactgttggccctccctcagtggactgtggctggtcctcctggtcaccctgggccaagtgcctgggcccctgtggaagccagagcatccagtggtccttccggagctccaacaacccccgcccctccggccgaggtcgccagtgccgtggcatccaccgcaaggcacgcaggtgctctgttccccacccaccgggggacctgcagggaccttggcccgcaccccacctcccacttaggaagcttcctgtgtgccccttccacatccaccacacatccccaattcggaacccctgccctgtgcccctacccgtctaaatcccgggagtcccggaacctctttggggacccctggcctttcccttctctagttttatgccctctaggtcttgaaggtgggtagacggagcccgcagatgcagcttcacaaactcagcttgaattcctgggctgaggcttgcggggggctcttgccatagctgcctccccagccccctctgggacccacggcgctggctgcagtgctggtacaaattgcttccctggccttcttctgggccagttgcaatgtctcaggtgtaggggcagagtgggctgatagggtgaccaaatgtctcagtttgcccaggacttcctcagttttatcacagaaagtcccaagtcctgggaaagtcctcagtccaggcgaaccaggagagttgtttaccccaagcaagccccgtcaccaggccagggacatccctcccttctcaggtgccagacggagccctgtgaggggtgtgagcatcagggccaggtccaccgtgtcggggaacgctggcatgggggcccctgcagggtgtgccagtgtctgcacaacctcaccgcacactgctcaccctactgcccgctcggcagctgcccccaggtgagggcactggagtgtgtggtgggcagagctggaggggatggggaggctggtggaatgggttggagataggcaggcggcctgacctctgtgcctctgcagggctgggtcttggtggaggggacgggagaatcatgctgccactgtgccctacctggtgagtgtgcctggggcatgacagggaagtcccagggggaggacaatcggcagggtctctgagagggaaccaggggcactgagcgggggtggctggataccccagcctcagggtggcaggaagcctgagttctgcatgccaagggaaggaggggacctcggggtgcgaaggcttctctctgccctccctctccgtccgccctgccttcctgtgctttgggggctttctgcctcccccatggtgccacctttgaggtgctctctttcctctgtttctgctcagatctggttgctctggttgcttttctttccctcttagaatagccaagacaaagttaagttggacttttcaaaagtatctttgcctggaaaggagttataagtgaaacgggaaaatacaaaggcttgaaatggatgcatttatgggtccaggttttccgtcttgtcttgtcttgtcctgtcctgtcctgtcctgtcctgtcctgtcctgtcctgtcctgtctcctcttcttttctttctgacagggtctcactctgacccccaggctggagtgtagtggtgtgatctcggctcactgcaacctctgcttcctggcttcaagcgattcttatgcttcatcctcccgagtagctggggttagacatgcaccaccatgcccagctaatttttgtatttttagcagagacagagttttgccatgttgatcaggctgccccattcttatcctaaaagtgcatccacaggttgctgaggttaaaacagaaccagcatactcagctgcacaggttgttcactgtacaagttagctggtgattgggacccagactccagcccacagagctgctttcatccagaggcagcccctttctaatgcccatgaaggtgcctttttggtgtcagcacccctggattaggaactgcagttgctgggtcctgggctgaaagtagtttcaggctggcagttttactctatgttctctaaatattcagtagatgtgaaagcccccaattcacaccaagggaaggaggagggacctttcccagctaggaggttgttcctgggaagtcagcagggagaaaatgctctaagaagtggggagaggcctgagtgctgggctggggactgtgagcctctcggtctctgtctcctgaccctgaagtctcctcccacaggagagaaccagacggtccagcccatggccactcctgccgcagctccggctcccagtccccagatcagattccctttggccacttacattctgcctccgtcaggaggtaagggccatgtgctatggagtgcagtgctgagaggggccatgctgcccaggggttgtccaacctgggaggggaaacaggccctcggggacatcctccttgccctgcacactgtggatggttgtcctaaggatctgggagtcatcctatcttaagttgcctctcttgactcttccctccctgggctaaagtcacccatgtggacgtttcacatcccctagctccccatgcgacttcctaaccgtgtccctgcaggctcctgccgccctctgtcctcccctactccagcctgtctctctcttctgcacccagacccctgctattctcccctggggctggccggactggctgaggggagtctgcatgcatcgtcccagcagctggaacaccccacccaggctgccctcctgggggctcccacccaggggcccagccctcagggatggcacgctggaggggatgcttatgccaagtggcacactcggccccattacctgcagctggacctgcttcagcctcggaacctcactggtcagtgaggagggcagtgcttgagggggaggcagtgatgatgggcggggggccggtgtagctccttcagctctgacctctgctcttgccctggcccctccctccccaggcatcctagtgccggagactggctcctccaacgcatatgccagcagcttctcactccagttcagcagcaatggtctacactggcatgactatcgtgacctcctgcctggcatcttgcccctgcccaaggtatcacccgcccaaggccgatggggccagcagcccaccatgcccttttgtgggttccatagtctttgtccccaagggccttccagtgtccccgaggggcatggcctgcattcgatgcttgttgaatacctggtgagtagcagggactgtgctctgtggagccgaggcttgggtgccactgtcacatggatgctggaaaccatccaagtggctcagactcagggcaggtatgtgaagcctgcaagggagagaggatggggagacaccaagttcactgagggcctccgggagcccagacccacgcacgtcttcgtggagagcagcctgggcacagccctgccctcagggggtttgcatccttcccggagacaaaccgcacgaagcggtaggaatcagtccgtgctgtgttaagtcttaactgtttcaggagcacctgctctgtgccaggtgccgagccaggccctggggacacagcagtgaacaggacctggcctttgccctaggggcacctccagcttagcgagaggagctcagtccaggaccagccccctccagccttgagaggcccaaatgcctactgccagggtggggggcatggctctgggaggggccgtgaaaactggggaaaaagtggggtcactcaaagtcatgaggtcagcctgaaaaagaggtgaagctcagtcatccgcatcctctgctggcagcttttccccagaaactgggatgacctggaccctgccgtatggactttcggccgcatggtgcaggcgaggtttgtcagggtgtggccccacgatgtccaccacagcgatgtccccctgcaggtggagctgctgggctgcgagccaggtacaggttgcgcaggggtgggcagggcaggagagagaggggccatgggaggagccctcagccatacgtcctccacacagggtccccaccggcacctctgtgcccaggggttggactccgctgtgccagtggtgagtgtgtcctgagagggggcccttgtgacggtgttctggactgcgaggatggctcggatgaggagggctgtgtgttgctgcctgagggcactggcaggtatactgtggccggccgtgcagctcacgcccttggcctggcctttgaggggacagccatgtgggaggggcccggcactgccttcacccccaaggtgcccagaccctgcatgctgaggagctgcagccgggtgccttcaaggccctttcccacctggattctaggattccctgcctttctcatagttgagtcaggggttctccaggtgtgggccctggaccagcagcatcggcagcacctggagcttgttagaagggcaggttctcgggcccgcccagacctgcaggggtggggtgcagcaatgtgtgtcttacaagcccctcaggtgattctaacccatggtcaagttgggagctactgttgggaacatcgcctttgtccagcctcagtgggcagagtccttcctgaatgctcactcccgcaaagaccccaggcccagcaaaagcacactgacgcccctgcctggaaggggggcactggtgctgggagggcccctggagtccttttggctatttttctccccagattccattccacagccaagaccctggccctctcctctgcccagccggggcagctgctgcactggcccagggaggtgagtgtagagccttgggcccagagggtggagtggggggacggggacctcgcctcacagcctcaccagccctgctcctgcaccagctggcggcgtctcccctctccgcagcatttcctcctgtgtgttccctggtactgctctcaggagccttgccggtgcctggctgcagagacgtgcaggcagagcgagggcccagaggggtttggggacaagagaagcctgcacccctgatagggagcttatgcccacggggcaggcaccagggcatctggtgctcagagccgaaaagagccctgtgcccgggtccccaggggcttcccggacaagacttgagggctggagaggggtgtctatagtgtggagaaggcgcggagcaccttcccacctggaatggcctggtcagcaacccagagtgtgtgggtggggtagggggtagggggtggacatgtgcattgggtgggggaaggggagtttgaggggcaagagctgaaatggatcaccctggtgggctgctgagaataaggtccctgagctccttgagggcagtgggctggtgcctggaagcgcagttgcgtgctcagctctgccctgggctgcgggggaggaagatggacaggaagcagtgctgggactgtgagcgcccaggctgtatcctcaggggatgggagctgccctcagggccgggggctgtgcagggtgctgagccctctccctctgcagggcctggcagagactgagcactggccccctgggcaggaatcccccacgtccccgacaggtgtgtgcacagactccaggcctcctccccaaactcttgtcccacctgttcttccagagccaggggccgttacatctcaggggttcaaatcccatgacccctgacttccccacaaccaagagagtcacggggttggctcagggaggagacactggtcactttggacatggccaggtcctgcccctgcccaccccctgggattccaaggtatgtggctgtaggttggcggggcaggtagctccaggccagctcccaggactgagcctgtgccctgtaatgtggctgcctctccagatgcctggtcaggacaggtctcccccatgggggtgggaggccacttggctccagcctgcactctctctgctcaccatccatggagccaggcccccctttctgaagcgtttgctggcatcaaatgtctcttaagtgggcacgggggttggatgtggtcaccaagttggcatgctcctatataaggaaggaagaggctctgcctggttgtgaaccggcctccctggagctacctgattattcacctgtgtgctagccagcagagagctgcctcctggagggcctgctgtcctgcggggatgagggggtggtaagagggcttttggtgtgggtgaattcttgccctcatttctagcccctatgggagggatctgggtgaggcttggggcagcaggggctggagaggaaggagggtgagggcaccaggtctgctctttcattctggctcatcctcccctgggcctcagcttttccccatctgtgacactaggaggccttatagacaactgtggcccctccctgtgagttctgatggaagttattcagaacctggccggactgtttctgtgtcttttgtgaaaagcagacaaagcaattgatgccacccctcagatccataacatgcagacccatgggatacattataatttcattctcagtctggttaaaaaaaaaaaaaaaaggctgtctttgaatgcatctcttgccagaaaatgagacttttaacccttttcactgtagctgccaggaagcccaaaatcagtttgttgttgttgttgttgttgttgttgtttgtttacaacagaaacaatgaactcaccctgggtctctggtagtgtttactccctctgctgctgtgttaaaatgacctcagttctttgtctccctaaatatcgtattttatggtgagtttgaacttgaaagttgccatgtgtttcttcttgggaatagaataaaaatctcagatcaaaacaagtcttctactttcagccaaagcccttcctgtgctccttggatttttttgatgcaaggcctctcagaaggcatcaattgctttgtctgcttttcacaaaagacacagaaacagtccggccaggttctgaataacctccatcagaactcacagggaggggccacagttgtctataaggcctcctagtgtcacagatggggaaaagctgaggcccaggcaggtggcacggtgaggcccaggggaggatgagccagaatgaaagagcagccctggcaccctcaccctcctttctctccagcccctgctgccccaagcctggtccgcagcacctgtgatttactctgcaccacccagaagcctgggataccctctcgagggcccccaccttcctttcctgggaaggggagctgggcaagcctcacctccctctacctacacccacagagacaaggcccgtgagtcctggcccagcctccggggtgcctcaccatggggaatctgtgcagatggtgaccaccacccccataccccagatggaggccaggaccctgccaccaggtatggcagctgtgacggtggtgcccccacaccctgtgactccagcgacccctgctggtaagatgccaagcccttctacctgtgtgcaaggcctctgtaagcccaccttccttgtgagggggacagaggccctttgttcaaggtcacacagctcaaggtcattttggggaggactgagtttcctagcccagtttaccctttttctattatcccaagataggcagagtgaggcatagcagatgccaagaggagggagcttgggggcttcagggaggtgacgaaggagaaaggacagggcaggccaagtgactggtcagccggctgtggtggtgcccacaggccagagcgtcgccccaggacccttcccacctgtgcagtgtggccccggccagacgccctgtgaggtgctgggctgcgtggaacaggcgcaggtgtgtgatggcagggaggattgcctcgacggctccgacgagaggcactgcggtgagctgctggagggcctgctgtcctgtgggtagggggtggcacttatccttcagtgtaggaaagtgtctgccctcatttgtagctcatattggaaaggatctgggggaggcttgggcagcagggaatggagaaaatgggtaaaaacaggagtgtgtgtgtctttgggggtggtcaagaccgggaataggataggccttgggtctcagcctattttataaaacctgtttgacctttgaagagactcatctactcactcacccatccaacattctacctatccctctatctatccatccatcaaccacccatccatccgtctacccatcctcccatccactaatccacccactcacccacccatccatccatccacccacccacccacactcccaccccccaccccccaccccccacccctctatccatgtattcatcagccacctatcaaccatctgtctactcacaaatctatccatcaatccatccacccatccagccagccaccatgcatctatctacccatccatccatctattcacccgtccatccatcaatccatccatccatctcaatccacctacctacccctctatccatgtactcatcagccacccatccatccatccatccacccacccatccatccacccatccatccattcatctatccaccgacccctctatccattcatctatcagccacccatccatccacccatccattcatccatccatccgacacccacccatgcatctatcagccacccatccatccacccatggattcatctacccacccctctattcatccattcatcagctacccatgcatccacctactcactcatctacccatccatccatccacccatccatccattcactcacctacccatacacccatccatgcatgcattcatccacctatctatccacccatctatccatctacccacccatatatccatccattcatttattcatccatccatccatgcaaagtagatcactatgatcaaagcttagtcttccaatcatgaccaaagaaatccaatgttaatcagtcacaagaagagccaccccagggagtatgcattcaggaataaggtacctaagcatctagaatctctgtgtgagagcttgtgtagacccaagactccatgatctcaccaacacatagtggaaggaagcctgctctgggcatgggatgcaggaggcatcaggaggaaggggaggccaggggctccagtcagcaagctcactttggctcttggcttgagaaggggctgagtgtatcattcagccaggaatctacttatgtggctcccttctctccctgccttgtgggcagcgagcactgtgcccttcatgatgcctaccatggccctgcctgggcttccagcctcaagggccctctgttccccgagccagctgagctgtggcagcggggagtgtctgtctgctgagcggcgctgtgacctgcggcctgactgccaggatggctcggacgaggatggctgtggtatgtgccagccagggcaggggtagccctgagggccccctcctgcatgagcccctctgagccccggcccccatgcccctgcagtggactgcgtgctggccccctggtctgtctggagcagctgcagccgcagctgtggcctgggcctcaccttccagcgccaggagctgctgcggcctcctctgccagggggcagctgcccgcgtgaccggttccgaagccagtcctgctttgtgcaggcctgcccaggtaatcctgcactccagccttccctcgggaaagcccctgctcccagagggaggtggggaaccccccacccagtctcctcaggaaccttcaggtgtgaaacctggggtgggtttccatctgagagcctcccggctggccctgccctcctttcctacctgagccaagactcaggttcttgtgtatagcctggaaataatggtcattcctgcctcagaaggcactggaaggattaagggagatggtgtgtgggggtgtttggagccaggcctcatgtgtcagccagctgtgccacttgtccctgggtgccatgcggaaggccttgtcactcttttattccatcgatccaagggagtggccctcacctacttctgtgcatggcagagaggggcttcccacacaggggcctctttcagtcccaccctggctcctccctggctgtggtggccctacagctgccatcagggctgctctccccaggatccctgcagtcccggccccttcccagggagcagagcttttgtcctgggaggcacctagagccctttctccaggcacctgccacctaggggaggtttcctgggacagaagaggagctgtggaacacccagggcagggcccttggctgcctcactggctgctgcccaggccgggggaggaggggagcgctggctctggccactctctcatagcctgtgtctcctggacccctcctggtggacccacatgctaccttccccaacagtggctggggcatgggccatgtgggaggcctggggaccctgcagcgtctcctgcgggggtggccatcagagtcgccagagaagctgtgtggaccccccacccaagaatggcggtgccccctgccccggggcctcccaagagagggcaccctgcggcttgcagccctgctcaggtggcacaggtaagggggtgctgggctggggacacggagggagcactgtgggcacggggcgattgggcctcccagcacctaggctcacctggtgcccatcccccaccagactgcgagctgggccgtgtgtatgtgagtgccgatctgtgccagaaggggctggtgcccccatgcccaccctcctgcctggatcccaaggccaacagaagctgcagtgggcattgtgtggaaggtgaggcagacctggcctgcagggggactgtgggatgcccacacaggcccaccagcccccagtctccagcctcccctccctgctgtgccccttggggctgagtgccctcttccacatactcccaggatgccgctgtcccccggggctccttctgcatgacactcgctgcctgcccctctctgagtgcccctgcctggtgggcgaagagctgaagtggccaggggtgtccttcctcctgggcaactgcagccaatggtgagggcggctgcaccagggagggcactgtaccggggtctccccagccctgaccggttcctcagcctctccctcccctgcagcgtgtgtgagaagggggagttgctgtgccaaccagggggctgccccctgccctgcggctggtcagcctggtcctcctgggctccctgcgaccgctcctgtggctctggagtgagggccaggttcaggtgtgcgacaggggtggacggcagtgtgagaaggagtggtggggcccagggaggcgaggagccaggccagccctgagggggcgatagtggaaagatggtggacaggggatgaaggatgaagaaggcgggagtgagggcagggagagagcagagcgggtgctcagggctgcctctctccccaggtctccctccaaccctccggcagcctgggggggtgccccgtgtgaaggtgaccggcaggaactgcagggctgccacacagtgtgtgggacaggtatagccgggagcctgggtgcaggagtccccccttcctcctcccaattctgtaccctgagaacacatgggatgggacccactgaccactctacgtgggggattggtaacacctccgcagtctgagaggcagcccttgaactggcctcggtggaggggctttgatggggagaggcagagactcccgcccagactgcctgggcgccaggagcaggctggcctgggtggagcaggcaactgcagagccgggcgagagaggtgaggctggtgggttgagggaggccagcagcaacatttagaggccagatgaaggtgccagatggtttccctctttccacctaccgggtgcttctcagacagtgcctgtgccagtggaggtctctgcagagcaggcgcagcctcactgttgtgcagggcaatgggacgaggtgggcaatgggacgaggtgggcaatgggacgaggtgggcaatgggatgaggtgggcaagggagaggtgggcaatggggaagaaagaggagtgggggaggggagggggagagaggcagggtgcatccagggggtctgggccaggctcttgcagtaggagggaaagaggggccagtggagagtggccggtgggacactgacagtttccacagggactcttaatcagtttctggcatagaaggatcaggaagcgttgatctgggggaaacatgaggattggtggtggtcctgctgaggtgctgtccgagtccaggagagagatgtgggaatgtagttgagcccaggttcacaggaggctctgtgcctggctcctgagggtgagaagtggggctggaggccaggtgcagtggcccacgccgataattccagcaccttgggaggccaaggtgggaggattgcttgaggccaggagttcaagaccagcctgggcaacatagagagaccccatctcttaaaaaaaaaaattaaaaatgtagctgggcatggtggcgcatgcctgtggtcccagctcctcgggaggctgcgataggagatcacgtaagcttaggaggtagaggctgcagcaagctataagcatgccactgcactccagctgacagatcctgtcctcagccccccagaaaagcagaaaaaagatggggctggagagtgggggtcccagcaagtgagctgagaaggggcagaggctgcaccctgagcccagagcagcctccctcctccttgtgagccctcttctgcccacctagtttctcagacctaacccaggctcctcgaccctccccagccctgccagtaaaggcctttgcacaaatggcctgtcctgttccccctccacagaggtgttcggctggacgccctggacttcctggtcctcctgctcccaaagctgccttgccccgggagggggccctggctggcgcagtcgttcccgactctgccccagccctggggattcatcctgcccaggagatgccacccaggaggagccctgcagcccccctgtatgcccaggtattctcccttgggcccaggggtggctcggatgctggggtgggatgaggagcaaagaagaatgcccccttgagccggttctagacatctgggaggggccaagggttggagcaaacctggctgttgtccttaagcctctcccaccccagccatcgcgcaggaagccagcctgagtggtagacgtaggtgggggctggaggctgcagttaagaccctgcaagctacacagctccagccacacgatgccctatcctggactgtttctgccatgccggtgtctgtgactctggattgggctcttcctggcagtgccaagcatctggggtctgtgggctccctggtccacttgctcagccccctgtgatggaggcatccagacacgtgggcgcagctgctccagcttggctccaggggacaccacgtgcccaggaccccacagtcagaccagggactgcaacacgcagccctgcacaggtaccagactccctgcctattttccagcaggcctccctggcccagctcctggggattttgaccttttccccaccctcaccttcgcccatcactgccctctgactccaggccaggtaatgcctggagctaagggagcctgggatttcctgtgtctcctctagctccctgcctctcccacctgccactggggaccaggtcccagcagctgtggcccctcagccctttgctcttctttggtggaggcaggcctccttccccagagaacaggctccccgagggaggcagactggccttcctcagggcagaacacactcagggccagaatcgtgggggagcagagctcgcactttgaagcccctggccccttccttactctcccttgtcctctgagggctcctcctatcccagatgactggagtcctcatggtctgttctcaagaatatttgtattaaagtagagcaaagccatggctgtgtcctggtgccatcccagacactggagcaaagctgtgagggtaggggcaggaggggtggcttctctggcacagtcctgcccagtagcctgccgccccatgccctgcttgcaggttcccttctgcccctctgcctcccttcccttcccatcccttcccgtccttcctgcccttgctgagacctgctttgtcttcctatccagcccagtgcccagagaacatgttgttccgctcagcagagcagtgtcaccaggaggggggtccttgccctcggctatgcctgacgcagggccccgggatagatagagtgtacgggcttctgcgcccccggctgcacctgcccccctggtcttttcctgcacaatgctagctgcctgccccgcagccagtgcccctgccagctgcacgggcagctctatgcatcaggagcaatggctcgcctggactcctgcaacaactggtgggtcacagcgtgggggcagtgtgggagaggggccggggatctagaggtgggcaggcgtgggctccctttcacaagcacaccccgtggtggggtgctccgttccccaaacacaacacagcagccacgggtgccgggcagggtcctgagaatattagagcgagtggtcatccccatttgacttatgggaatattgggtctcagatcgatggagcgatttatgatagaactagagatggcagagggtctaacctctcatcacagctttctctggttctctttcctgaatgtaatttcatacctgggatccacttgatttctgttcagaaacattcaagtgcccagtacccaaagctgacatcaggatctgccagcagagggtgctccaagcgatttccctcttttttctttttcttcacttcatttccttcattctttttttgtttgtttgtttggtttttttgagatggagtctcactctgtcgcccaggctggagtgcagtggtgcaatctcagctcactgcaacctccgcctctcagctcactgcaacctccacttcccgggttcaagcaattctcctgcctcagcctccctagtagctgggatgacaggaacctaccaccatgccaggctaatttttgtatttttagtagagacggggtttcaccatttggccaggctggtctccaactcctgacttcaagtgatccacctgcctcagcctcccaaattgctgggattacaggcgtgagccaccgcgcccgggccattcttcatttccctcttactttttactttatataccctgcccctccttcgatttcctccttctttattcttcctcccgcctgtgctttctttctcacttttcgtctctccgatctttttctgggacctccagtatttaataaataggctttaaaacatgtattggagagaacagcaagtgtgcagaagtacccagttctccctcctaggagaactccagctgtctctaaatccctcctacctggccctggccctcgaggtcatttcccaataaatacaaatggatgagaccttgggacaaaggacagcgcagcgcctgggcgctgtggggctcactgagggtgcatcgtgaacttcgcaggggacctgggcagcaagcttcacaccccagaccctcgggtttgtcttctgcagtggtctcagctgcttccctgggggtaagggctgactgtggccgtgatggccaggtaaagcctcactaccccctttctctgcagcacctgtgtctctggtaagatggcatgcacctcggagcgctgcccaggtacccccatgcttggggcacgggaattgggcagtggtgggtcctcagggaccataggggacttaggaccctcctgagttaaactcctgggagctcggtggtgcccagggaagttagggtatgagaagactgacctggtttcacacacactgccctccgcccccaacacgccctggcagtggcctgtggctggagtccctggaccctgtggagtctctgtagctgcagctgcaacgtgggcattcggcgccgcttccgggcaggcactgcacccccagctgcctttgggggtgctgagtgccaaggccccaccatggaggctgaattctgcagcctgcggccatgtccaggtgagagctgggactgaggtcctgagacctccttaaccttccagagagaagccaagaagactcccatcaccccccaccctgaacctctagaaaagtgcaagagacttcattaagagatgctgctaagaggttgtccccagagactccttgagggtccattccctaacagggcccctcctcagaatagccccagcttctccctagagaccagcccagttctaggctgaatcctggagccccccacaagcaggtgtgaggcaccttaagtgggatatgacgctgcaggtgaagcggtggaggggtccccaggggtgtctgggtgggaggaggagaaggtggggtgggcatgggaggcagggcctgcagtgacctgggcaccacccccaggtcctggtggggagtggggcccttggtctccgtgctccgtgccctgtggtggtggctacaggaaccgcacccgaggcagcagctgcgcagcctcatggagttttccacctgtggcctgcagccctgcgcaggtgaggcctgccctggggaccctccagttctcattcttaccaacccagggcactgtcaaccccctgtctgccaccccagcacagccctgtccctcggcccttgtgcagtccccatgaccaccccacccatacccagagctggtgcctctcccaggttgggagctcaggggagagctgagtgctctggggctgggctgtcaatttctatgtccccagggccagtgcctggcatgtgtcccagggacaagcagtggctggactgtgcccagggccctgcctcttgtgcagagctcagcgccccaagagggactaaccagacctgccaccctggctgccactgcccctctgggatgcttctgctggtgagtgtccccctgcctggccccagagaggcctctgtacagcctggggaccatggggtggcagggaagggacaggcaggatctggacagcgaagaacatagggtatggggctagagacagggagaccctgcaaggttgaggaaagggtactaaactcatgggttacaactcagctccggcaggaaccagcaggggatcctgggcaggtctcatccctctccccctaatctctgtttcctcactggtaaaaatggtgataggtctagaagatctttgtgaattgtccctgctcaactgctctgtccactatgttatcaccagttatttatcgagcacctacagtatgttagtctctggctgagctattctgtagggaaggagtagtctctgccctcaagaagcatccagtctggggaaaccagacccagagtccctaaaatgaagctagaaccatcagacgggcaggaagtgagctttgcacattgtggagtggagtggagtgggctgggtcagccatggagggctccctgtaggaggtgatcctgacttgaatatcagagattggagggtgtggagagtagggaggcatggagggcttcctgaaggagggggtcctgcacttgaagatccaagattggagagcagagaggtggccactctagtcagagggtggtaggaattggggctaggaaatgccggctgtgtggtgggattgaacaaagccgtggggtgtggttaagggacacgttgtaatcatatctgagtccaaatcaggctcttttactggtagccctgcgagcttggggatagtattcccgtgcctcagttccttcctttgtaaaattggggtaaaattacagccagtcacaggagtcagtgagacggtgcagggaaagggtttcccaggccctggcccgtaaacttcagtgcgttcgactttgaatcatgcgccacaagacagttgtttcttttaaatctgaaggacttctgtccagattccctgtgcacaatgtttttctgtttttattttgttgatgaaaatgtgtcttttcctaccattgctgtacaaattgcatatttcatgttttcatggctgacttcatggggattcgacagttcagtctcatgtcctgcaatttttaagatggtctttttctcctagaaattggagggtccacgtccccacgtccccacggcccccaagccgatggtccgcatttgcctggcaggagggcagaggggagagctgcatgtctgtggaaggagagtggctgggttttaagggggagcttgaggattgcatgctggctctgaccagggtggggagcccaggcccagcccatctggagccagaagatgatagagggtttcgattccagaacaacgtgtgtgtgcccacccaggactgcccctgtgcccacgaggggcacctctaccccccgggcagcactgtggttcgtccatgtgaaaactggtgagacaccgcccccatcccattatggccctgtgacctctgacgacctgctgtccctcctcagaggcagggattttggctccagtcggggacagagacacatgtgccccccacccccagcccctcggcacagccgtccagccctctgaggctgcaccctcctgcgcccctccctccccctgtcccccacctgttttccctctccccacctgtgttagcctcctggggctgctgccaccgagtgccatgcactggggagctagagcagcggcccctgatggtctcacagatcctggaagcccaggatcaaggtgttggtgggtgggctccttctgagggctgcaagggagactgttcaaggccttactcctcttctgggagtttgctggaaatcgttggcactccttggcctgtaggtggccttctccctatctcttcatgtcatcttccctcattttctcttttataaaggacataagatgcattaaaactagggccacctcagtgacctccttttaacctgatcacctctgtacagacctcatctccaaataagctcccattcccagggactgggggccaggacttgaacttgagggtttggggggccacaatgcagcccatagaccaaccaaccctctgctgctccccacagctcctgtgtctccgggctcatcgccaactgcagctcctggccttgtgcggagggtaaggaagcgtccccacttctgacttgcacctcggctcccccatccctcagctgcaggagtgggccagggctgagactgggggaggaaagccatcaggagagatggggggcagaggcaccatgctccatcttcagcctgtccagcctgtgcctgtccccctcctgcctgcccgcctcctggatatcccctaggtgagcccacgtggtcaccctggaccccttggagccagtgttcagcctcctgtggccctgcccggtgccatcggcaccggttctgtgccaggtcccccagtgcagtgccatccaccgtggctccgctgcccctgccagccacccccacacctctctgctcaggccccgaggctgaagaggagccatgtctcctgcaggggtgtgatcttgagtgcctgcctgccctgcccgcctggaccctcctggggagcccagggtggtgcccactgtacgctgtggatgctgctgccttgtaccagctgtgccctggccccagccaagcccctcctcactccttcctctgctgtgtccccaggagctgggggatggggtccatgggggccctggtcccactgtagccggagctgtgggggaggcctgcggagccggacccgggcctgtgaccagcccccaccccagggcctgggggattactgcgaggggccacgggcacagggggaggtctgccaggctctgccctgcccaggtacctgccagggatgggggtgggggtcagggacagaggaaggggagttagaggaagcattccagggagagaggccagggtggatggccccacacagttctcagcccatcctgtttgccctcagtgaccaactgcactgccattgaaggggccgagtatagcccctgtggccctccgtgccctcgctcctgtgatgacctagtggtgagtcccagctcccttggcactgccacctgacccaaggcccactttgcgggagggcagggtgtggatttgggctcacggcctctttggctggggcctggacagcccagcacaggaaggcacgggtgggggccctggtttcagttcacagagcatgccaggccaccccagagagacaccagcctctctccgcacagagccagcctcacctgacagcctttgtctgtagatcagacatttctcacattaaagtgttatgacaaaaatggcataaacacaaaggaagggggaaatcatctcctgaaccccatgagcacgttggtgtctagacctgcatctgtgtgtgggtgggggagtggcggggggtgggagaagcaaacacagggtcaccacggagcccacattctgggctgagcaagacagacacacgtgaaagagtggtcacagtaggggccatgaagaatgaggtggggcttcgaggccttgggtgtggaggtgctgagggaggtggggagagggaggagaaagaggaggatctcgaagagaagagaaggtcgttgcgggcagtgcctgctcccagccgccccaggacctcccagctccttcccaaactgcccccttgcccagccagctccccacgttctagaggtctggggcatgccccagcttccaggccatgagtccaggtcacccgctggaattggggttttacatctgggaacacctagctccaaatccctgccccagggggccaaagggaacctcctcagctgctcctccctcccctccaccctcagggaggggccaacctcagtgcaaactgcagggctagctgggtccccttcctgcctttctcatctgcactaccaggcgtactctgttgaaaacgtgaggcctctgtcacaccttcctccccagccccttgttccgtcgtcttccctgcacagctttcctttttctgctgatggcccccacttactgtcccccagcactgcgtgtggcgctgccagcctggctgctactgcccaccaggccaggtactgagttccaacggggccatctgcgtgcagccgggtcactgcagctgcctggacctgctgaccgggcagcggcaccatccgggtgctcggctggcaaggcctgacggctgcaaccactggtaaggggccctcgccgtggtgggaggcagggatgccagcaggagttgccccacttcatcccattctctcgagctctctggagtctccgcggatggtcacatttgccccccacaatccctgagcagatgtggggcaggcaccaagacccgcgtctgataggcgaggacgctgaagctgaccctgtgtgtctgcgggggctgggcacgtgctcagcggcaggaggggtctgggcaggaggagtgacagatatggcattcacaacccatctgaccacagagttggctccagggtacctgcagtccttccccaagagtaggcatcatctggtgaccccgagagggccagctaagtgggacaggaaacaggatagggaggcactggagagctgggagatggggcactatctggcagaaaactgaggatcaatcataaggatgaggggaggggagaggcagctgggggggtgcagagttagggtttggggtaggactaagctgctgcctcttccttctgtgtctgcaccccctgcccagcacctgcctggaggggaggctgaactgcacagacctgccctgcccaggtatgtgcctagcttggagggaggtgaggaggggggcctgggaccgggcaagggacgggctgcaccccagtgcccaccattctccttgtagtgcccggaggctggtgcccgtggtcggagtggacaatgtgctcccagccctgcaggggccagaccaggagccgctccagggcctgtgcctgccccactcctcagcacggtggtgccccgtgcactggagaggctggggaggcaggggcccagcatcagagggaggcctgccccagctacgccacgtgcccaggtgtaatgccccacgaggcccatgcccctcccccaaaaggccctaaagccctgctccagccccgctaacctggggcctcctaatgcggatgatctgtcttcctgccacagtggacggagcctggggcccatgggggccatggtctccctgcgacatgtgcttggggcagtcccaccggagccgggcgtgcagccggccccccacccctgagggagggaggccctgccctgggaaccacacgcagagtcgcccttgccaggaaaattccacccagtgcacaggtcaggcttcagtgaggtctgagagggcccctctaagtccagggagatgccgactctggcctctgacctccacacacatcatgtcactatctcaagggacagttcccaggccatcagtcatggacctggtcaaggtggcgggtccgaatgggcgccaggcatggcaggagggttgaaaatgcctcaggatgcccttcggtgaccaccctctctgctttcttcctgcgtagactgcgggggtggccagagtctgcatccctgtgggcagccctgcccccgctcctgccaggacctgtcccctgggagtgtgtgccagccaggctctgtgggctgccagcccacttgtgggtgccccctgggccagctctcccaggacgggctgtgcgtgcccccagcccactgccgctgccagtaccagcctggagccatgggtgagtgcctcccctctcccccagcccccagcactgcagtgccacctgtctggcccctgtgccgctgccccggggacccagcctggggctgcagaacaaaaatgagcgattaccagctctccaggccttcgtgtccctcgactcccctcccagggctggtctggttggagtgtccacctcccttgttcaggacacagggtgccatgcggtggaggcaagagggtggggagtagaaggccatggggtgggaggagggatggatggggggagctgagctgtctggagcccccaccctccctcctgtgcccctcagggatccctgagaaccagagccgctcagcagggtctaggtttagctcctgggagagcctggaacccggagaggtggtcactgggccatgtgacaactggtaagccaagagaagtgggggcggggaggcgcatagaacccaggaggggagccctcaggggatggggctggtcctgtctctgaagccccctcctttgtccccagcacctgtgtggcaggcattctgcaatgccaggaggtgcctgactgcccggaccctggggtgtggagctcttggggcccttgggaagactgcagtgtttcgtgtgggggcggggagcagctgcgctcccggcgctgtgctcgtcctccctgcccagggcctgcccgccagagccgcacatgcagcacacaggtctgcagaggtgagcgccagcccggggctaaccccactctgacctttgagtcccatcctggcctttgaccctgactcatgggtgccttttggcctctccctccccacccccacctgtcctccagtgccctcccaccagcgatggacaagtgaaggaggactcagccaggctgtgggagcctgtgggagggggcgctgcccagggcggggggatgggcaggtgaaaggcactccctgaggtggtcagtgagggccggggccggagcaggtgctgatgtggctgctgcctcagaggcaggctgcccggctggccgcctgtaccgtgaatgccagcccggcgagggatgccccttctcctgcgcccacgtcacgcagcaggtgggctgcttctctgagggctgcgaggagggctgccactgccccgagggcaccttccagcaccgcctggcctgtgtgcaggtcagaacctgtccaccccacagccctccctgccctcccttcgcctgtcccctctgtcatgtctgtcacttttgcagaccctgtcatccctgggcaggcccctaagcagcacacaggctggtgaggccagccgaggcctctgctgacagcgtcaggggcaggcagagttagacgcagcctcccggggtccctggttccccgggatggggaacacctgccacctctggacttgcctgtcctctgttcctgactggtacatgtcccagccctgctggagctcacacccacccctgtattccccgcccacccctcaccctggcagggaggggcagtttcctgccaggttcccatgttccccaacctcactggcccagcctcacctccctgtcctccactgtgggtcatgggtcttcactgcccctctcttgcctgtcacatgcttgtggggacagtgcccctcaccttcactccccttggccccacctggtccctgctgggcatcccagcggcagccggggcccagctctgctctggggagcctgacaggcacacagggatccctttcctaatcctaaagccggctgcccagtggccactcctgagccagagttccaggatgccatgttcaggagggaccagagcagccacctggtctcacctcctagacctagagatggtgacagtgagccccagagaggggaggggacacaccgaggtcacacacagcagcagagccagacccaaacctaacgtcccgattcctggctgaagctctttctgccccccgcatcatgtgtgagcctgtgagggtctgtgttggtgcctccttgtgtcctgctgggcgctctgtgtggggaagccagctcaggccaagccccggccatgcccctctcatggtgtgctcatgcccctgatgggggtgaacagccccctgctcctggaaatgctttcctggagcctggagcccttttccgggtcctcacactgtccctccccaagtctctccaggggatgcgcacagccccgggtgggtggctggcctgtgctgtgatgctgcctcctctgccccactctcccaggagtgcccttgtgtgctgacagcctggctgctgcaggagctgggagccaccataggtgaccctggtcagcccctcgggcctggagatgagctggactcaggccagacacttcgtacaagctgtggcaactggtgagggggatggtgagggtggggactgggctggggagggtcagggagattttcagtggagggaggggttagagggtaagaggacagggaccgggaaccccagtctaccctctggccccacctgggctgggctaacctggctcttcccccagctcgtgtgcacacgggaagctgtcttgctccctggacgactgcttcgaggccgatggtggtttcggtccctggagcccgtggggcccgtgctcccgctcctgtggagggctgggcacccgtacccgcagccgccagtgtgtgctcaccatgcccaccctcagtggtcagggctgccgtgggccccgccaggacctcgagtaactgccccagcccagactgccctggtaaggacaggcagaaggtggtgggcagggctggggtcaggatggcactggacagacgtctaggaggccttattggaggaggcagtatctgaggggttttgagggagggagggaactttgaccagcattggaaggaaaggaacagcttgagcaaaggccttgagcctgcaaggaagtgctgtgcttggggcctgggtgtccgcaggagctcaagctgaggaaggctggactagatagccatgagcccgcagtgccagctgccagccttaggcgtggtcccggtgcgctgtgggtaccaaaacatttctgagtggggtttcctttggcacaggggctgaagggtccacggtggagccagtaacaggccttccaggtagctccagactccctgtacctctgcctcatggcctccctgtgggaagagcaagcccagggacccctccccgcttccccctcccctgcttcctggagaggctgaaactcagggccgactcagcacaaggcaccctccccaatccctcccccaggtggctggggcccatggtcctcctggtccccctgctccagaagctgcacggaccccgctcgccctgcatggcgcagccgcacccgcctctgcctggctaactgcaccatgggggacccattacaggagcgcccctgcaacctgccctcatgcacaggtgtgccttccagcctcaacttctgatcccagccaccaccctcagacaactcattgtaacccccaattcccaatatctaatacccctcaggtaatcattggtttctagtgttgacatctcatttcaaatcagtgtctgactccgggctctggatcctctttgccaaccccagcagatgctggggagcccaacttccagcacattccttgttctctggtgtgtgtgctgaactctccacccgccccaaggtcccgcccaaatccctccatagccctgtagtctgggattactgtccctgatgagaaaaggggatagtgaggcccagttgtcaaagccacacagcagtcagtgtcagatccagaatgagagcccagagctctggacgaggccactgctggcctgggtggtggaggtccaccgttgagctgggagcagagaggaaaggctgggcaggtgtcatgcagccgggactggctccagctccgctttgtgtcacagagctgcccgtgtgccctggccctggctgtggggctgggaactgttcctggacctcctgggccccgtgggaaccttgctcccgcagctgcggagtgggccagcagcgccgcctgcgggcataccgtccccctgggcccggcgggcactggtgccccaacatccttactgcctaccaagagcgccgcttctgcaacctgcgagcctgcccaggtgaggcggctgggggagaccagggcatgccccaggctctgcccctggaaggcccctggcatcagtgccccctcccaggcacccagcctacctgagtgtggcactttcatctctcacaccagaccctgacctgggctcgtgggataggtgggggccccctgcctgagccgacccctcaggtggccgttctctttcccacagtgcccgggggctggtcacgctggagtccctggtcctggtgtgaccgcagctgtgggggaggccaatccctgagaagccgcagctgctcaagccccccatccaagaacgggggagccccctgtgctggggagcggcaccaggcccgcctctgcaatcccatgccttgtggtatggcaatggtgacagtcctgtcctacccttattgggctccactctgcatggggcctggctgctacctcatgggccagtttggaaactgagccctctggggtggagggctgggcctggcgttgggcaaggataccctgagcatgtctgttgtctgtgccaaggcccaaggatccaccctggccaccccaacccacaggagagctcctcctttcagctttcccacccccgaggtgggaaagagccaccagccctgtcacaatttttggaggctttgacagtggcacttttaggagcggctgtggcactcgtgggtggtggatggagccagcggctgtagctgagcctgtgcctcctcccgtcacccccaagcttcagctccttctttaattggccctcaacagccccatggcatgggttcccccggggctcccctcctctatccccacccatcctctgggtggacacaaaagaggctccaggtgacattattggcttttgagacccacaaatttagtccagctccacaaacatttactgggtaccgggtaggtgctgagaactcacaggaggtgagaggaactcactgtctacctagaatgtcccaattccagagtcttcccgagtctcccgtgtttcagtgagcaccagtgtgggggatgggatgggtcctgtagctttatggaggtagggagtccccagtagggcagagggagggtttctgagccctgggccctcctgactctgggccctccatctgctcagaggccggctgcccagcaggcatggaggtggtcacctgtgccaaccgctgcccccgccgctgctcagacctccaggagggaattgtgtgtcaggacgaccaggtctgccagaagggctgccgctgcccaaagggtaggtgctgccctatccttcaggagtgtcagggtggctgagtgggaaggtgtgggtggggccaggggtgcaagctccagcccttgccccacagggtccctggagcaggatggtggctgcgtgccaattgggcactgtgactgcaccgatgcccagggccacagctgggccccggggagccagcaccaggatgcctgcaacaactgctcatgccaagctgggcagctctcctgcacggctcagccctgcccgcctcccacccactgtgcctggagccactggtcggcctggagtccctgcagccactcatgcgggcccagagggcagcagagccgcttccggtacggggctggcagggctagatgtcccttctgccacccagggcctcactctgcaaggcgcagtctcccttctgacagagttcctgggtcctgctctcaccagcgacagcaccaccccaggccctgggccagctctgtccctggttaccctggcttttcctcagctacccccatgcccaccctgaggtgtcccgtcagggtgtctcatcaggagacagagaagggatgacgggcctgagctatctctcacctcctctgccctggccccacccaggtcctccacgtcgggctcgtgggccccagagtgtcgggaggagcagtcccagagccagccctgccctcagccctcgtgcccacccctgtgcctgcagggcactcgctcccgcaccctgggggacagctggctgcagggggagtgccagcggtggtgagtgcagggcagggaggggggctggaaccgccctgctggagagcagagtcctgagtcccggctctttcccagctcctgcaccccggagggtgtgatctgcgaagatacggagtgtgcaggtctgggctgcctccggatccccgcctcagccacccttctagcctcatgccttgcctgccatgtgctctgtgtctcattttctcccaccttacttaactgccactcccttggccaccatgcaggtccccacccagtcctttggcctttgctccctccgcctcctctgacctcacctgtgccctcccacagtgcctgaggcttggacgctgtggtcctcctggtccgactgccctgtctcctgtggaggtggaaaccaggtccgaacccgggcctgcagggccgcagcccctcaccacaggagcccaccctgcctgggccctgacacccagaccaggcagcagccttgcccagggctgctggaggcctgctcctggggcccgtgggggccctgttcccgcagctgcggcccgggcctggcctctcgctctgggtcctgcccctgcctgatggccaaggccgaccccacctgcaacagcaccttcctccacctggacacccagggctgctactcagggccctgcccaggtgagtgttcaggggaagtgaaatcacctctctacttttcctaccttgggagattcagaaaataaatgttcctagttcccggatcatcccttaaaataagcctgccctgtctgtgcccccatgttttgctcagttcctttcctcttcccaccatctcttccctcggggccctccttgtagggtgagagggcgtccagccagctgggcctttcaggcccctcttgcctgtttcctgtgcagggtctcggcagggctggggtgagagggagggcaggcaggggagaggtgggctgacacacccctccggtccctagaggagtgtgtgtggagcagctggagcagctggacgcgctgctcttgccgggtgctggtgcagcagcgctaccgacaccagggcccggcgtcccgaggggccagggcaggcgccccctgcacgcggctggatggccacttccggccttgccttatcagcaactgctctggtgaggctccagcagcaagttaaccagggagctgcgcagggcagcagccaccaagggtccctgctggaactccctgctcccctcccctcacagccaatgtagtgccccaagacctcagagcagctgcctgcgcccgtgcctgccctcaaacccagctgctcccctgctccccccagatactccctcatcacagctgcgaccccaatccctcaccacaatttgtccaccctgcagctgccggcccgcctgtggctttggcccatgtagctgccctctaggagggtgtcttacccagctcctgctgcggctgccctccatctctgcccctctgtctcccatctctgcccctctgtctcccatctgccaatttctggagcacctgccaaggcccctcactcctgcagccccctcctcagctgcctcctccaggcatcttcctggctctccaaggcccaacccatcctgatccttccctggaggtgcccacaggtgctgagtggatgccagatgggggatactggtctgttccaacttgcggagggtgggcatcttgtactctcaccaggtgaccccaagggcctcagtagagccacgcggcatgtgctctgggctttgggagtgatgtctctgggctgttcccccacaagcctgcctctcccccatctcccccagaggacagctgcacgcctccctttgagttccatgcctgcggctccccctgtgctgggctctgtgccacacacctgagccatcagctctgccaggacctgccaccctgccagccgggctgctactgccccaaggtgagagctgggagctggagcaacttccaaggagaagggggtcttctgcccacactcctgctcctccttctttctgtgatgtccatggcggccccacctccttcaaaccccttggaactcggtgcctcctcccagcttgccattcactcggcatcatgcatatgcacctgctgcaggcggggcacagtgctgggtgctgggatgacacgatgatcactgccccatctctccttccacccaggggctgctggagcaggctgggggctgcattcccccagaggagtgtaactgctggcatacctcagcagcaggagccgggatgaccctggcccctggggaccgcctgcagctgggctgtaaggagtggtgagtgatggtggaagggagacagagggctggggccagggaatagggcagggaggcctggggggcccagtccagcctcaggacagaggaccctgagatgctagagtttgcagctccctcatcttgccccaaatgtgcctaggggtcaggttacccttgcatgaccacccccaccccccggaggtcctggactgggtcctgcctcccttagtctaccctgactaccccctcccacagtgaatgccggcgtggggagctgcactgcaccagccagggctgtcaaggtaaccctgacctatggagacaacagtccccattgcttgggactgggggagtttctgggatgcagaactttcagtgctaagacggggacagtcccaggcaaactgggatggtgggtcaccttaccctgcccccacaccaccctcagcctttctgtttccagcacttcctggtcatgaccctgagcccctcctgcctgtccaccagggtctctgggcccaggggtggtcactgggaagggcacccacaccctgtccttccaggtcttctgcctctgagtgagtggtccgagtggtcgccctgtgggccctgcctgccgcccagcgccctggcccctgcctccaggactgccctagaggagcactggctccgagacccaactggcctctcccccaccttggccccgctgctggcttcagagcagcaccgccaccggctctgtctggatcctgcgacagggaggccctggactggagcccctcacctctgcaccgcacccctcagccagcagcgcctctgccctgaccctggagcctgccctggtaatggggagaggcagaggccaggggacaggacgggcctggagtgcaggttggggggacctggccgggaggggctaggctatagagcacattgacctgctacccctcctgcttgtctctaaggcctgcaggatttgaagctgggggtggggtccaggcagcagctagaaagagaagcgggagagcctagagggctttaaggcctgccggagcgtttgcgacgacagagctcaaggcttgagggggaggcaagaggtgggcctgggtactgactccatcataccttccccagactcatgccagtggagtctgtgggggccatggagcccctgccaggtgccctgcagtggggggttcaggctacgctggagagaggcagaggccctctgtggaggaggctgccgggagccatgggctcaagacagaaagctgcaacggagggccctgcccaggtaactcccatccccgatccagaggagagcctgggacaggaacatctgagaccaaacctgaggggagagttggctctgccccagagccgtgcagtggaagcgggggcccaagagcgtccccaacacagactcctatcatctggtcgtcaggttagagctgcgaggcccaagacactgtattcaccctggactgtgccaaccagtgcccacacagctgtgccgacctctgggaccgcgttcagtgtctgcagggaccctgccgcccaggtagccagcaggccccaccacctagctgggagttccaggaaagcctgggcctcccccagctgcctcctgctcccagagagtgtgtgatctcgggcaggggtgggggaggttcagactgctgggtcatgagtgacagggcaggaaagtggtcactttcagcagccagctctgagtcctgcaaggagtgagggtcactcagggccactgttccatgtggatgctcaggtggctgtcagggttactcgggtggtgcccacacaggctagagcagcccgttcctgtgcatgggcagtgggagatactgtggaaactaggctttggactcgatctgattgctgggggaggatccattgtgtgagccctgcccgagcacccaatcttgttccgcctctttacccacacccctaggctgccgctgtccccctggccagctggtccaggatgggcgctgtgtgccgatctcctcttgccgctgtggcctccccagtgccaatgcctcttgggagctggccccggcccaggcggtgcagctggactgccaaaactggtatggctgcagccacgccagggctaagggagctttgggtggaggcatggggcaggtcagccttcgtcagcattgttggggagtgagggttctgttcaccctgactggagccctttgtgcttacccctgtccacagcacctgtgtcaacgagtccctggtgtgcccacaccaggagtgtccagtccttgggccttggtcagcctggagcagttgctcggccccctgtggtgggggcactatggagcgacatcggacttgtgaggggggtcctggggtggcaccatgccaggcccaggacacagagcaacggcaggagtgtaacctgcagccctgccctggtaagtgccctgggcggcaggtgactgactccctccattgctgctgagcccaggccctgccccagctgtggggggtaggtgtggggagaggaggtcggacccagggcagctccctccctgggactggagatgctgggtccctcccatctccctacctgtgtgctccccacagagtgcccccctggccaggtgcttagtgcctgtgccacctcatgcccgtgcctctgctggcatctgcagcctggtgccatctgtgtgcaggagccctgccagcctggctgtggctgccctggagggcaggtgggtacggggtgctgtgtcctgactccctgtgggggaagccggcaggtggggagggaagaggcggtggtctgagtgtcactgagcctgccctgctgcagctgctgcacaatggcacgtgtgtgcctcccactgcctgcccctgcacccagcattctctgccctggggcctcaccctgaccctggaagagcaggcccaggagctgcccccagggactgtgctcacccggaactgcacccgctggtgagggcctggccctggggtggggagcagggatgaggaagggtagggaggaggacatgggaggcatctgagtgtgcttctgtcttctcagtgtctgccacggtggagccttcagctgctccctcgttgactgtcagggtgagatgtggctgtccatgccctgctgcacctccaaagtcaaggcccgggactggcactgaggaggagagacgggccctgctcacagactagacagagcttcagaaagccctcccctgtctgtccacactgacctctctctaactggagacccagcaccccctgccgagggctccctgggcactcagtgtggtctgccccacttgtgggggcattccctagcacacagtatacacagagccagggctgtgatgccaggaagtggaaggttctttccctgccagtgaggaaactgaggtctggaggggtgagcggaaatgaggggcctggcctggcagcccccgggctgatagcatttgccctgtggggtgcagtgttacccccatctgatcaagaccaagggcccacccaccgtgttcccagctctgccacgctgggctctgtgaatgcagacatgcagcatggccagcctccgggcagaccacccacccccagaacaggcagagacagggcacagtctctaggtctctgacaggcaggtagaaccccagagggtgagacatcagtgctgagaatagaggccgagtggacaggattggtcagggagccttttctggaggaggtgagacctggcctgggtccagctagtgtttgggtgggtggataagaaagatcaggaggtgtggttggaggctgctgtggctgagaaggcaagatggggacgtgtgggtgctcagcttgggaggggaggaatcgaggctggatccagggctgacctgaaagctgggttggatggtcttccctggcagagtgccccctggggaaacgtggcagcaggtggccccgggggagctggggctctgcgagcagacgtgcctggagatgaacgccacaaagacccagagtaactgcagttcagctcgagcctcgggctgcgtgtgccagcccgggcacttccgcagccaggcaggcccctgcgtccccgaagaccactgcgagtgctggcaccttgggcgtccccacctggtgagacaccgaaccccctctgctaccactcacccattcctgaccccaagcctccccatctgtctgtaactccactggctcctccccctactccaggccctgcagcagccggcagggctccgctctccccctgggacagtctctggccccaacagttcatctccttcctgggtctcttgttgcctgactccatccaagcccattgccccggctaggcactcacaggctgggcttggggatcagggatactattatagaaaagtctgcaagttggagccgggcacggtggctcatgcctgtaatcccagcactttgggaggctgaggtaggcggatcatgaggtcgagagatcaagaccatcctggccaacatggtgaaaccccatctctactaaaaatacaaacattagctgagagtgctggtgcgtgcctgtagtcccagctactcgggaggctgaggcgggagaatcacttgaactggggaggtggaggttgcagtgagccgagattgtgccactgcactccagcctggcgacagagtgagactccgtctcaaaaaacaaaacaaaacaatacaaaacaaaacaaaacaaaacaaaacaaatctgcaagttgggagagaccaagaggaggctctcccctactctccccagcctggatctgaatggcaggaggcctgtgagagctgcctctgcctcagtgggaggcctgtctgcacccagcactgctccccactcacctgtgctcaggtacgccctgcatccctgctactctccggggtggttccccccttacctgggctccggtaccccctgcagccctaccaccctccctggttcctcgggctccttcctgggaccctcctccgaggttggtcttagggtctctgagtggggagggcgggccgggctccaggtgtcaagaccaccttgggactctctccctctgcagggcgaggagatggtgctggagccagggagctgctgtccctcttgccgcagggaggctccgggtatggagggaacctgggtgcattgtggggtgcctctccctggtctagacccttctcccctgccaccccacacctggcctttgcagcctggcagctgcctgactcccccaggccaacccaccatggggatttgaggagtgaagaccccagcacatatcatagcgcctggtcacctcgccccacacgcttccctcagacccaggccctgcccctcttcccacagtcccctcagtcccctcctcctcctgtgctctgtccccccccccacagtctcctcagtcatcccctcctcctgtgtcccctccacagtcccctcagtcatcccctcctcctcctgtgctctgtcccccccacagtcccctctgccatctcctcctcctgtgtcctctacagtccccttagtcccctcctcctcctgtgtccccctccacagtccctcagtcacctcctcctgtgccttcccgcacagtcccctcagtcacctcctcctctgtcccccccacagtcccctcagtcccctcctcctcctgtgctgtcccccacagtcccctccatcatcccctccacctgtgtcccctccacagtcccctcagtcccctccacctcctgtgtcctcccacagtcccctcagtcccctcctcctgtgtcctcccacagtctcctcagtcatcccctcctcctgtgtcccctcagtcatcccctcctcctgtgtcccctccacagtccccgcagtcatcccctcctcctgtgtcctcctccacagtctcctcagtcccctcctcctgtgtcccccccacagtcccctcagtcacctcctcctcctgtgccctcccccacagtcccctccatcatcccctcctcctgtgtcccccccacagtcccctcagtcacctcctcctctgtccccccgcacagtcccctcagtcacctcctcctcctgtgccttcccgcacagtcccctcagtcacctcctcctctgtccccccacagtcccctcagtcccctcctcctcctgtgctgtcccccacagtcccctccatcatcccctccacctgtgtcccctccacagtcccctcagtcccctccacctcctatgtcctcccacagtcccctcagtcccctcctcctgtgtcctcccacagtctcctcagtcatcccctcctcctgtgtcccctccacagtcccctcagtcatcccctcctcctgtgtcccctccacagtcccctcagtcccctcctcctcctgtgtcctcccacagtcccctcagtcccctcctcctgtgtcctcccacagtctcctcagtcatcccctcctcctgtgtcccctccacagtccccttagtcacctcctcctcctgtgccttcccgcacagtcccctcagtcacctcctcctctgtccccccccacagtcccctcagtcacctcctcctcctgtgccctccacaacagtcccctcagtcatcccctcctcctgtgtcctcctccacagtcctctcagtcatctcctcctcctgtgtcctcccacaacagtcccctcagtcatcccctcctcctgtgtcccctccacagtcccctcctcctctgtcccccccacagtccccagtcccctcctcctcctgtgcctcccctccacagtcccctcagtcacctcctcctcctgtgtcctcccacaacagtcccctcagtcatcccctcctcctgtgtcctcccacagtcccctcagtcacctcctcctcctgtgccgtcccccacagtcccctcagtcacctccttctcctgtgcctcccctccacagtcccctcagtcacctcctcctgtgtccttccacagtctcctctgtcacctcctcctcctgtgcctcccctccacagtcccctcagtcatcccctcctcctgtgtcctcccacagtcccctcagtcacctcctcctcctatgcctcccctccacagtcccctctgtcacctccttctcctgtgccctccccacagtctcctctgtcacctcctcctcctgtttccccctgcattccccctgtcacctcgttctcctgtgcctccccacccccacagtcccctcagtcacctctgcctcctgtgccccacccccacctcctgccactcaatgcccctccccacagaggagcagtcgccctcctgccagctcctcacggagcttcgaaacttcaccaaagggacctgttacctggaccaggtagaagtgagctactgcagtgggtactgcccatccagcacccatgtcatgccagaggtgagccagggacctgctgtccaggccaggggaatcacgttggccagtggccaccgagggctgccctgagcctgggacctgggcagaaccagagtccatgaggcacaaggtgcttctgatggagataacagtggagttggggaggcagatggtcagagctttccccaaggcagtggtgtgcacctgcaggttggcccagaggtttcactgggtgcctgaccccctcccacagaggtcttctgtggccccacaccattcccagagtgtgcccgctgtgcccttcaaggcaatgagccaggag

SEQ ID NO: 1254 - protein, 1564 aa, Homo sapiens
MGPEEVLIQAGNVSVKGQLVPEGQSWLLHDDFMEPGGGLAMLAATFGNSWRLPGSEPQDVGGGPEACAGMAAGTVPRHCAPPSVQPGSDGEWGGACLEPASCPCSLDTASSPLASASPGRGAAAEVEGLTRARLRVGGRSPAEDPARTLPAAPPCGPFEFRCGSGECTPRGWRCDQEEDCADGSDERGCGGPCAPHHAPCARGPHCVSPEQLCDGVRQCPDGSDEGPDACVEAPAPPAMRGPPGQAGGPTSSRAPSPPSPPEAQVCDGQPDCGRPGQIPFHSQDPGPLLCPAGAAAALAQGVAGAWAMWEAWGPCSVSCGGGHQSRQRSCVDPPPKNGGAPCPGASQERAPCGLQPCSGGTADRSCPQPPRKAEKRWGWRVGVPAKVFGWTPWTSWSSCSQSCLAPGGGPGWRSRSRLCPSPGDSSCPGDATQEEPCSPPVCPVPSIWGLWAPWSTCSAPCDGGIQTRGRSCSSLAPGDTTCPGPHSQTRDCNTQPCTVACGWSPWTLWSLCSCSCNVGIRRRFRAGTAPPAAFGGAECQGPTMEAEFCSLRPCPGAGGWGPWGPWSHCSRSCGGGLRSRTRACDQPPPQGLGDYCEGPRAQGEVCQALPCPGMCLAWREDLSPGSVCQPGSVGCQPTCGCPLGQLSQDGLCVPPAHCRCQYQPGAMAPVWQAFCNARRCLTARTLGCGALGALGKTAVFRVGAGSSCAPGAVLVLPAQGLPARAAHAAHRSAEARHFVQAVATGEGDGEGGDWAGEGQGDFQWREGLEARVHTGSCLAPWTTASRPMVVSVPGARGARAPAPVEGWAPGPWSRMVAACQLGTVTAPMPRATAGPRGASTRMPATTAHAKLGSSPARLSPARLPPTVPGATGRPGVPAATHAGPEGSRAASGPPRRARGPQSVGRSSPRASPALSPRAHPCACRALAPAPWGTAGCRGSASGAPAAAALHLCPSVSHLCPSVSHLPISGAPAKAPHSCSPLLSCLLQASSWLSKAQPILILPWRCPQVLSGCQMGDTGLFQLAEGGHLVLSPGDPKGLSRATRHVLWALGGLLEQAGGCIPPEECNCWHTSAAGAGMTLAPGDRLQLGCKEWSVQSLGLGQPGAVARPPVVGALWSDIGLVRGVLGWHHARPRTQSNGRSVTCSPALSAPLARCLVPVPPHARASAGICSLVPSVCRSPASLAVAALEGSVCHGGAFSCSLVDCQGRGDGAGARELLSLLPQGGSGYGGNLVPQSPPPVPSRTVPSVTSSSVPPTVPSVPSSSCAVPHSPLHHPLHLCPLHSPLSPLHLLCPPTVPSVPSSCVLPQSPQSSPPPVSPQSSPPPVSPPQSPQSSPPPVSSSTVSSVPSSCVPPTVPSVTSSSCALPHSPLHHPLLLCPPHSPLSHLLLCPPAQSPQSPPPPVPSRTVPSVTSSSVPPQSPQSPPPPSPLSPPSPVPSPQSPLSPPPPVSPCIPPVTSFSCASPPPQSPQSPLPPVPHPHLLPLNAPPHRGAVALLPAPHGASKLHQRDLLPGPGRSELLQWVLPIQHPCHARGEPGTCCPGQGNHVGQWPPRAALSLGPGQNQSP

SEQ ID NO: 1255 - DNA, 15254 bp, Homo sapiens
  source
  (1)..(15254)
  CDS (201)..(388)
  CDS (870)..(941)
  CDS (1497)..(1568)
  CDS (1687)..(1956)
  CDS (4564)..(4707)
  CDS (11794)..(11853)
  CDS (11910)..(12405)
  CDS (12986)..(13055)
  CDS (13194)..(13338)
  CDS (14231)..(14374)
  CDS (14979)..(15054)
accagtgcagttcagttcagattcaagttcagcaaacatctgacaagaacctgctgtgtgccaggcacccacagagttatatcaaagtccagaatcttatttcattagtgatcccctctggttcatccttatcgagagaaactgccagtgtacaccctatcccatccatcagtcggtatctgggctcaagggaggtgctgatgcatgacagcctgaggccacacccccctgtttctgcaggccagggagaagcggggcgcgtgcccacctgcaccctgtcctccggctcctgcccggccatgtgcacctgcagcaatggcatcgtggactgtcgtggaaaaggcctcactgccatcccggccaacctgcccgagaccatgacggagatgtgagtacggggcagggcagatgctggggcacagccctttggcaggcctggctctggagggccagtgaagagctggagtaggcgctgcctcagggcttgccccaacccctcagtggccgtagagaagacacagtttgcctctgctgggctgagctttgtgtccagggctgggaaactctggagggctggggagggagtgtccctctggggtcccacccagctgcgtgagtctgctagaatcaggttctcagcatcatttgtgggcccctttcagctacaaatgcctgtgataatggagcgcaagtcagcattttctctgtctgtcccggcgtccttaccccagacttcaacttctggaagtgggaagggagcaggggcaagaggggccaaaggattattcagggcaggtgagcccagcagataacacccagggctgggctgacctgggcccttgggcttcccctctcttttctccccgcagacgcctggagctgaacggcatcaagtccatccctcctggagccttctcaccctacagaaagctacggaggatgtgagtgcctcccactgcttcctggggagctggtacagggctgacggagatcctgggtggtcccacagccctggggcaggccctaactcagccccccacagctgagtggccttggccagccacctgaccttcctgcccttcaggctgcttggctgtgatgcggggacctccttgcagggctatcgtgaggcctgaagggagtgctgagcctgagcctggcctgtgatgggagctgcttgtcatcctcccgtttcagcttgggtaccaataggagcaattaaggatgggagggggctaggagactgccaggatgcatgggaaagctttgtccataacttcccaagctggagtgccccctcctgcccagccctcagactgcacagggaaatagcggccatgggcttttcaaatggaggagagatctggcctctcactattctcatttcaaagcactccaccctgctcctgtgacatctaggaggtggaggggactgggcagggcttagtggctgttgagggattcagatgccccctctccttctgctcaccttgcagagacctgagcaacaatcagatcgctgagattgcacccgacgccttccagggcctccgctccctgaactcgctgtgagtagcagtgccaaggcttcctcagtggcccagggcatcccctgaggaggctggcagggcccagggtcctggtggatgcaggaggaggagcagggctatgcccccctccacacagcccctgcccaccccagcctcagtgggtcatcctttggctgcaaagggtttgctgttccagctccctcttcctcactggtggaccctccgacgctgggagcgggagaagtgtggagaagctaggcagagctgttgcccctggcaactgggatgcactccctgccacagtgaggattttcccagcattctttgcacaaccatcttggccccgtcccccgcccgaagcccagcatgctgtgctcctgaggcctctgcagtcaccgcagggccagtgagcaccagctccagttgtgacatctgccacaacttgctatcttttatcccaaatgtaatgaatcccaagatgtggtgggtgctgctaggacagtgtttgcccgctcctccttcagtatttcccttccttcaggatctactggggaagtctgtcaataaaacatacaaaaggtagtgaagcacctccctctcccactcaccaagggcctcactacccgaggtcctacagcactttgtctgtacagagagcacactcagggtgccctggagttgggcgagctccctgtaggaggggccatttgttactctaggggatgagtgttttcacctgctccttggcagcacaggactcatgcttggcatagactagaggcctggcaagtacaacggaatagaactcccccggggagtgcaggagcctgccagctcagtgccttctgtgtatgccatcttttcttggagcagagtccaagtagagggtggggccaattatgaatggcacccctgaagttgtgcagtgtacaccctacacagctgtacatgatagcctggtgagggatcgttgtcattggctgaggagatcagattctgaaggtggcctgccaaaatgcagggcccttcctctgagaagtgaataaagctctcctaagttggaacatggcagtctaaaaaggtaaaagtgaataacccaaccaagtggatttctgttgttcatgggtacctggtcacagccacctccctgcatataggaacgtggatgattccagtacaccccatcaacagtgtctacctcggccagccctgaccttgcctccctgcttcagttcctgccccctctgctccatttcccacccagcagcttgaggggtgtttctgaaatgggaatctgatgctgtctcagtggcttcctgatgctggctgggtaaagaccaagttactgtcccatttgttccctccattccagccacactggccccgtcacctgtccacacacgacaggcacacacagctcccactgcagggcctttgctgttgctgtgcctcactccaggaatgaccttgaagccatgtttgaagaggaagtacccaggattttttactcagcttgaacgtttacgagggtagcttgtggggtccgattatgatattgggaatggcatacaacccccctccccaaacctcctggatgttttcactgtcctcctgaacccacccatgtctacatgtgtttttttgaacttttgtttttttaaaaaacctatacatggaattcatgctcaatgcagaaaactttgaaaatgctaaagtataaaaaaaaaatgcttgaagtcccaccatccggatctcacactgcatatgccgtctggcattctattttttcctgtaactctctgaaaatatgttaattattcctgcccatgggattttctcttctctcaacaatctccttttggattctggaccagatgaatttcccaggaagtgcccctttgcagccttctgtggggtccacgtgtgagggcggtgaagcaggagctgctttgttagtgattggagtcaggggcatctctagcccatagggcactttacgccaagaagcaggcaacgctttcttaagacactttactgtcatctgtggacaagttgctataacaaatatacaccattaggatgtgctccatgtaaatggcttaggggcagcgctgttgagctggggccgtctgcagagttgtgctattgccctggtgggctgtcctctaaccctcctctctgctgccttttctccagggtcctctatggaaacaagatcacagacctcccccgtggtgtgtttggaggcctatacaccctacagctcctgtaagaacgaatcctgggtgtcttgggtgggacccagggaagggccagctttcctctggcctgctagactgtccctttaggcctctcttgggtatgggactcaattgagacaatgagcttggaagacaggcagacccactagggctgagaaagtctccagggctctgcagaggctagagaaggaggtagaggcagcttcagagctgctcacaggatgccaaagcagagaggctcctgagactcggcccgtgctcctgaggagcttggtgtggctggggacagagctttctcctgcaggggggacacccaggccagctcggcctccttgaaccatgaactttcaggcagggattgtctcccagggctcaagaggcatagaacacaaatgctccaactcagctgcctggggaacccaatggacctctgggaaggaggaggagccccccccaaaaatgccttcacaaggtggctctctgctttcccggaatcccacagggcatctctagcagttcttggaaagagagacgagtgggttgaccaagatgtccctatgcatggaggaggcagtcggagttccgggcccctctccgtggggcagacatccagagggcagattccctgggcctgctccgatgggctcctccctgtaataacgcaggccgggactgaagaaggtgcccaggacctgagatgggtctcaggtcgagcctctctcctcaccacttggtcctggctctgcccacaggctcctgaatgccaacaagatcaactgcatccggcccgatgccttccaggacctgcagaacctctcactgctctccctgtatgacaacaagatccagagcctcgccaagggcactttcacctccctgcgggccatccagactctgtgagtgccctgatgccttcttcttctcccctcccagcaggtgggcctgggggaggttgcagcctccagggacaggcagctctccggctctgggctgctgtgctcactgggggtggcctcttacagaggaaggacacagacctgggttagaccgtcctaggttcaaagtccacctaggcctcttattggctgtgtgattctgggcagcttctctgggcctcatttttatttatccgtaagatggggatgccttcccatagggttgttatgagattaaggaggatgtttgtatgaagcttagctcatcacaagtgcttgataaatgctgcctttagctaacaataatattgatggtgatgatgatgataatatatcgcgctgattctaagacacatgttgtttccacgttaacagctctgaaactgggatgcatgttataatcagtggtacatcacttagttggcagcattttgttctttattgatagtacaaaaaatagtagtgcctcttacaattcataatgtcaaatcagatgaaatacggtaatgacaatggtgactgtgaataaaaaaattagagagcaataaatctggtaatttgttgtaatattttattgtggaaaattataagcagattaagagtagtactgtgggccgggcatggtggctcatgcctctaatcccaacactctgggaggctgaggcaggaggattgcttgagcccaggagttcaataccagcctaggtaacagggctgggcaccccatctccacaagaaatttttttttaaaaagtagccaggtatgatggcacatacctgtagtcccagctacctgggaggctaaagtaggatgattgcttgagcccaggaggttcaggctacagtgacatgtggccacaccccctgcactcccacctgggcaacggagagaccctgtttcaaaaaaaaacagagtgctatgtatggtgaacccccaagttttcatcacccagcttccaatcctgtataattaattccttaatatcattgagtatctagttagtgttgaaatttccaagtgtctcttacatgttatgcaatttttttgattgttttttgttttttgagctggagtgtcgctctgtcacctaggctggagtgcaatggcacagtctcagctcactgcaacctccacctcccaggttcaagtgattctcctgcctcagcctctgaagtagctgggattacaggcgcccgtcaccacgcctggctaattttttgtatctttaatggagatggggtttcaccatgttggccagactggtctcaaactcctgacctcgtgatccacctgcctcggcctcccaaagtgctgggattacagatgttagccaccacgcccggaatgttatgcaattttttaatagtttgaatcaggatttaaataaagcctgtgcaatataactggctgatgttggtttatgttggttgatgtacctcttaagttgctgtttatctatgtgtcctctccatttctcttttccttgtaactgatttgttgaagacactgcatcattggttctgtagggtctagactttgttgattgcttccctgtggtgtagtttcacatgttcctctgtcttctctgtatcctgcagattgaaaattggatctaggagctcggtcaggttcagttttgattgatttatttggcaagatgattttatagatgggattgtggacttcccgtcagaaggcagacagatgtctggctgtctcccttttgtaataaaaacagccattgatctcagtgcttgaacccattaattcattagcaatcctgaaatggtgattttgaatttgtatcagtctgtttttgtgttactatcaaggaataccagagactaggtaatctataaagaaaagaggtttacttggctgacagttccatggggtgtacacatacggcaccaacatctgcttggcttctggtgaggcctcaggaagcttacaatcatggcagaaggcgaagcaagggtaggcacgtcacgtgacaagaggaggagcaagagagggagggggagtgccatgctcttttaaataatcagatcttgcatgagctcagagtaagaactcactcattatcacaagggcagcaccaagccattcatgagggatccactcttatgcctagtcttgcttcgccttctgccacgattgtaagcttcctgaggctcaccagaagccgagcggttgttggtgccatactcgtccagcccacagaactctcagcccagtaaacctcttttctttataaattacctagtctcaggtattcctttatagaaacacaaaagcagactgatacaaattcgaccaaacaccgaacaccgatccgaacacctcccatcaggccccgcctccaacactggggattacatttcaacatgaggtttggtggggacgaacatccaaaccatatcagaattctaacattcttttttcatttctaatgcagttgtgactatgctttaaaacagaatccttatatttaactggaatgtttccacgtaaggaaaattctcatctgttgtgtggttaaacttaggcaattaaatggtccccttcatctacatctttaattctgagcctgcagttaggcaggatgtgctgacttgtgggttctgtggtgtgcatttaatgagcattaattattaatattattgtgtccattgttgtcgctgtaatccctgcccctgtctatgccaggcagtgctcttcatcagataacatctacatggggtattgggataggttccaaacaggctgagtaaaaggtacagctcgtgacccctggggactctgcacatcaccagagatgtcagccacaaagacaaactcattaaagcccacaaatttgcctgcagcccaactcctcccaattaatttacttatagccagggagacaaagaggaagccccatggggaaaccttgccaagtatgtgaaattagagggtacagggagacactggcaaggtggactattttaagcagctggcagaatgtctgagagaaacatgctaaggagatttactggccggggactcacacacaggaaaaccttggggatggggaatgggaatgagagactcatgtgagccactgttctttgcatgtattatcttaatacttacagtgatgctatgaaggtaggtgctttatcatcctgattttacctaaaacaaagactgagagaggttatgtgacacacccaatgttgcagaacatccggtaaaacaggaatttgatctcaggcatctcttcgccatcaccaagaaattacttagctgcccctttaattgtgctttttctgtaagaacagagctcattattgaaggctgtaaagcaacactgaactttcatgcacatctattagatgttaacaactgaactacaacttggaataagaataaaagaaatagaaatccaaggtactatcaggtactattattacaacctcaagtggttcagtttcttgactgagtcttattttattaaacctgagcagatttaaatttaccaaatcatgtttgatttgtccgtagctccaagatctgtggcgaagtccctgtgtaacagcattgattttgctgcagttttacttgccccaagagatttaacatttaaaaaaaagaaacagctctattgaggtataacttacatgccataaagttcacctgttctaagtatacaattcagtgatttttagtaaatttccagaattcaactatcactacgattcaactttagaacgtttccatcaccttcccttccaaatcccttgtccccatttccagactcagctgctggccatcactgatctatttcctttctctgtagattgccttttctgaacatttcataaaaatggaatcatacaggccaggtgcagtggctcacacctgtaatcccagtgctttgggaggctgaggtgggcagatcacctgaggccaggagtttgagactagcctgggcaacatagtgagatccccacctctacacaaaattcttaaaaattagccaggtgtggtggtgcatgcctgtggtcccaagtactcaagaggctgaggtgggaggattccctgagcccaggagttcaaggatgcaatgagctgattgcaccactgcacacaggctgggtgacagcctgagaccgactccaaaaaaaaaaaaaacaaacaaaaaaaaaccgaatcatacaatatgccatcttttgtgactgacttatttctttagcataacgtttttgaggctcattcatattgtagcatgtatcagtactttgttccttttgatcgccaaataatttttccattgtgtaaatagaccacaatttgcttgtccattccaggtgatggacatttggggtggtttccactttggggacattatgaacaatgttgctatgaatattcactcacaaatctttgtgtggaccaacattttcctttcttttttttttttttttgagatggagtttcactctgtcgcccaggctggagtgcagtggcacgatctcggctcactgcatcctccacctccgaggtttaagcaattctctgcctcagcctcccaagtagctgggattacaggtgcccaccaccatgcccggctaattctttttgtatttttagtagagacggggtttcaccatcttgatcaggctgatcttgaactcctgacctcgtgatccacccacctcggcctcacaaagtgctgggattacaggcgtgagccaccgcgcccgacattttcatttcttttggaatttctggttcatatggtagattcctgtttaacttttttaaagaaactgccagtgttttccaaagtggcggtactattttacattcccaccagtggtgtattatgaaggctccaaatttctctcattctaatcctcaccaacacttggctgtactattttacattcccaccagtggtgtattatgagggctccaaatttctctcattctcagcctcaccaacacttggtattgtttgtcttttttttttttgcattttgattctagccatcctagtgggtgtgaagtggtatctcattgtggttttaatttgcatttccctaatgactaatgcttttgagcctctgcctccaaagatttttagctgtgactccttaatgcatacatctacaaagacactgagaatcagtcctctcttcctttccttccactgccagaactgttcagggaggcagctgcgtggccacatatgcagcacgtttttgggtgttcctttaacacgattattttttcccaaatgaattttttttcttcctcttgagtgttctctctttccagcttcctgctctttgaaactgttaaaaattctaatttgtataaaatactaaagtttgtacagaagccacctgtctctgtgggtggttcaagttttataggttgtttctggcacagcctgtttttagaaaggagatattctacaccacacaccttgagtattttaatacatgcctaaacaacacaattggattgactacacagttttctgccaagatggtaataaagggaagcaattggttcaggcaggggctgaggcactgaggcacagccagatgtggatgggcagctggggaggagtcataagcagtccttaaatcctggtatgttttaaattagctacaaactctgcccccaggatatcagcaaacacatcctctctgtgcaaactgaaagtttaaaaggggaaatgaatgttgagcttgatgcagaagaggtgggagggacctggtccacctggtggagctgagaggagcaagaactcaggtgggaaatagggaaagacactgcaaaggagaggtggcagggacccagctcccaaccggggggccagagggcagagcccaggaggtgatggacggcagagagcaccgccaaggtctgaggtgagctgggcacagaccctgggcaagggtttactcatctgcttggagagtcctgcagccccttgcaggggcctgggctgagaccagtaagtcagatggcctgaactgatggcacttagatggaggaaaagtggccatggcagggcaagtctctttgagttggcctgttgctctgtctccccgtacttctttttttttccttttcgagacagagtttcgctcttgttgaccaggctggagtgcagtggcacaatctcagctcaccgcaacctctgctccctgggttcaagcgattctccagagccaggacaggtgtaggaatgctcttcccaggctgcctcggtttgtacagccatgagcagggcatgcccagtgctgtggtggctcagaggtagctggtctgaacctgctgtttgtcagagcccacccgtgggcatgccagcatggggtcgcacacagcaacccatcacggccatctgctccccgccaccatccccgtatttatcctgctgacaacacaggcagcctgggagagaatctgagtgaatccccagcaaggggctgctcagtcatgatttctgagttttctttgtgttgacagacagctgtaaaatggtcaaggagaggtcactcctgtggcctggggtggggatggtgactccctgtgaagcccagggactccagcaggcctggccaccctggcctcatccctctctataggagacaggctgctacctgagtctgaaggaaagggcacaaaccagggcccatggccactggggagggtcagaggctgtggcctgggcgcctgcagtcctgggttttgttaccctctctgggctttggcttccttgcctgtgaaaggccaggggtgctctggccagcctctgggtccttcctgtctccgctcgtgctcgtgaaatgtcccagggcagagagagggaaaggtgagtggaaagagagggggcagaatgaggcttgatggggagtaggacagcaggaagctctgggtggcagagacccttcacctgtagtgcgctggcaggacctctccagaggtggtgggctgcaccctgggggttcaccccactctctctttccccccgtggctgaccctaggctccaggccacaggcagcctccttggccccagccacaacgaggccctgtcccggtggaggtcagcgcgggtttgcagcccttgtttctcatagctgatctgcctgctttggacaggcacctggcgcagaaccctttcatttgcgactgtaacctcaagtggctggcagacttcctgcgcaccaatcccatcgagacgagtggtgcccgctgtgccagtccccggcgcctcgccaacaagcgcatcgggcagatcaagagcaagaagttccggtgctcaggtacctgcccgcctgcccacctgcccacctgtccacctacctgcctgcccacctgcccaccggcctacttgtccacctgcatacctgcccacctgcccacctacccgcctgctcacttgcctgcctgcctacctgtccacctgcatacctgcccgcctacccacctgttcacctacctgcctgcccacctgttcacctacctgcctccctgccggcctgcctgcctacctgtctgcttgtctgtctgtattcagcctgctcagggaccccctgatgtttcctggatggctcccacaaaggtgtctttcattactgtgaacccagactggagggtgtgggcccaaaattctagacttgatctgaatggtagttcagtcccacctcattttattgaggcctagggaagaagcaaggcttgctgaaggtcccagagggaggactcaggtccctccacttttagccagttctcttttatgcctttgttgtcaagccttttaagacactcaggaggcctgggaaccctccttagtgagataggagcctcctccaggctttgggatgcagaaacagccttagcaattgtagtccacgtggcatctggctggggacagtgtggggcagcttctgagcctacatcctggtcaaggtcctgacgccacctgtaccccgtccccacctgtaaaattagcacagtccccacctcgtgccattgcgagtgagagctcgatggttttggcactccttgcgagaggtttaactggatgcgacacccccagtgtcagcctgggcaaggaacatgcgtgctctgtagctcgcccttctgcacacagggactgggcagatgggctcctcagccctgtctggggtgccttcagctgagcagtggggctggggcctgggctgttactgcaggtcctggctgattcctgcattatggtatttctgcttctcttcccagccaaagagcagtacttcattccaggtaggagagtggggggatccaaggccagcctggcgggaatggtggtagtgggtgggcaggctgggggccttggttgacccaaactgctgggagccggccccgggctcctcagcctctgcccccaccctctcatggcaggcacggaggattaccagctgaacagcgagtgcaacagcgacgtggtctgtccccacaagtgccgctgtgaggccaacgtggtggagtgctccagcctgaagctcaccaagatccctgagcgcatcccccagtccacggcagaactgtgagggtccctggcccccccagccctcccctgtccctaactgccactaaccctccttggcctactccaggattttcttggtccagccctgtctggggctgaaccactggagcctctggctcaggacataccaactgctggcttgggcaggaagaaaccccacccctgctgccctctgcttcattcacagcccccctcacccatcaaaagcagatgccagtctctggcactcagggcaggtcaccagcctgaatcagggatggcttttctcaacgatgcgtttgtcttattctgtgggacatgattccaaaactctttgttatttttattcctctatctaaaaatatgaatttgtgtacacatatgtctatgtgcatagatgcctgcaagcatctgtcatttacgtctgtaaatttttcatggcatttttaatgttaaaaatatccccattcatatcctctcccagtactaggcccagccttcctttgaaataggatcaatttgctttgccagataaattcttctgggagtcttctctgtttgagtcccaaatattctcagtttggaagggatttgaaatgtccatcatttgtgaatgtgcaagttcattcttgtctcttacaggcgattgaataacaatgagatttccatcctggaggccactgggatgtttaaaaaacttacacatctgaagaaaatgtgagttacccattggcgagaaggtgtctgttgggatgctggccagggatggacaagggaaatgccagggtgggggcagctcccacggcggggggccaggactctgtgtgtgggggtgttgcctgcaggaagggaggggcctgagctcctggctgctggccatatgtaatcctccccccgcctcttctcccagcaatctgagcaacaacaaggtgtcagaaattgaagatggggccttcgagggcgcagcctctgtgagcgagctgcacctaactgccaaccagctggagtccatccggagcggcatgttccggggtctggatggcttgaggaccctgtgagtgtgcagggctggggagcagggtgggccagctgcaggaggcaggcaaagccaagggaaaggaagagagaggctggaggagcccctcccctgggcccagcttgcaggagggtggggagaactgaggatcctgactgtgttgggacaggtaatcaagttggcaactctatggtgagacctgttctcttgtaccctggggcatggggccaatgcccagttggcctcaagggatggagacatgtggacccttctaggggtcccttcccattgccctctggtcaggctgcaagagcacagcatgagttcaggagtggctggcactgctgcaggcaggaggggctggatgaccttgccaaggtgattcagtgggtgtagataggggagcagggatgctgcactgtccctgagatgctaggatcccataacccacagcccagcctgagctgaccagaatctggagctcagtgggatcctggggtcatctgctcctccatgatgcaggacaccccctccatctgccccaggagggctggctcttcagatgatcctgagggtgtgtatcgtgtcccatagacagggcagtctgtcggatctcccacagagatggaaatgtttcaagtctacgctgtccagaccagtcacttcatgtggctgtggagcagttgaaatgtggctagtgctactcagtgactgaattttgaatttcattttattttaatgcatttaaatctaaatagctacatgtggctagtggctactatattggacaccacagctctaggaagccacttgcccaggtataagtcccaaatctgcagcaggatgtagagttgtctctgagcaagtaaatgaatgtgtgacaggactccctgtggat

SEQ ID NO: 1256 - protein, 578 aa, Homo sapiens
MHDSLRPHPPVSAGQGEAGRVPTCTLSSGSCPAMCTCSNGIVDCRGKGLTAIPANLPETMTEIRLELNGIKSIPPGAFSPYRKLRRIDLSNNQIAEIAPDAFQGLRSLNSLPCPPQPQWVILWLQRVCCSSSLFLTGGPSDAGSGRSVEKLGRAVAPGNWDALPATVRIFPAFFAQPSWPRPPPEAQHAVLLRPLQSPQGQLLNANKINCIRPDAFQDLQNLSLLSLYDNKIQSLAKGTFTSLRAIQTLLQATGSLLGPSHNEALSRWRHLAQNPFICDCNLKWLADFLRTNPIETSGARCASPRRLANKRIGQIKSKKFRCSGTCPPAHLPTCPPTCLPTCPPAYLSTCIPAHLPTYPPAHLPACLPVHLHTCPPTHLFTYLPAHLFTYLPPCRPACLPVCLSVCIQPAQGPPDVSWMAPTKVSFITVNPDWRVLADSCIMVFLLLFPAKEQYFIPGTEDYQLNSECNSDVVCPHKCRCEANVVECSSLKLTKIPERIPQSTAELNLSNNKVSEIEDGAFEGAASVSELHLTANQLESIRSGMFRGLDGLRTLDGNVSSLRCPDQSLHVAVEQLKCG

SEQ ID NO: 1257 - DNA, 13830 bp, Homo sapiens
  source
  (1)..(13830)
  CDS (201)..(486)
  CDS (4460)..(4952)
  CDS (5748)..(5918)
  CDS (6811)..(6954)
  CDS (10095)..(10238)
  CDS (10541)..(10707)
  CDS (13494)..(13630)
  modified_base (2697)..(2796): a, t, c, g, unknown or other
  modified_base (13826)..(13830): a, t, c, g, unknown or other
gcccaccccacccagccctgacttcacaggtctttaatctgttcccaaaactgaaacaaagggagttgcatgcgactatgtgtgtgtccctataggccttgtcctattaataaaaagtgaaagccagataaaagtaataaaaccctggcttaggctacatgttctaatatgggttggaaaactgtgaggcagcccttcccatggggaaggaacaggtaggcaggggcaagggctcccccagtgccccaggctcacttgtggccatggcaggggccgtcagcgggctggtcacagtgcaggcccacccagccagcctcgcagtggcacatgggccctggggtggcattgggctggcagatgccatgcaggcagtagagcttgcggcagggttcgcagcctggcaccacgcctggcttcatctgcgtcttggtgaagtcctgcagctcgttgttgatgtacaggtttcggatgcaaccgtggaagccggtgccgttgaggatctgccacaggcggaaggcagctgagttgacatccacgggcatccctggggtaggggagggagcagagctgggctgagtaaagctcgggctatgccgggcacccacccctgaggtctgggcagctccatggccttccctcttgcctgcggcctctgtccttcatctctgcaaccctgatccaaggtcctttgccaccttggagggcccaggctccttgcccagaagaaagggaaaagctgcttcctctgtgattggagctggggcatcaggcctggtggtggccagctgctgcgtgtggctctgaggtgcctgttcctaaagtctggcttccctcgccaaggcgccttctctccctgggacgctagcttttacctcccagagaccccagccgtagcaaaggggcaggaccgagacatcacgtgtggcgctaggtcactgcttttgtggctgtcccttctcagcagccctctgaagtagggcttgctaagccccatttgacagatgctcatgactggcctgaagctgcacaaggagtaagctgcggagctgggctgaggcccagggccatccctcacctctgccccagcctcagcacgcctcccacagggtggagatggccccactgcatccagcagcctgctcatcaataccgagaaatgcttgcaggtggtagacggggtcatctagcctgcaaagcctctaaggccagccgaggcagtccctggttgatacagggactctgtgcctgagtctcttgcagtggttctgggtctcagagggccccaagactgggaatggacctgaagccattgaaaagccccttctagcccaaaaccaagaggaaatgtgcccaaggtgttgcagatagctcggacagtcccagggcctcccctaagccagaccttgcacccaacccaagcatccatcctccttggtcagtctgggctaggcagagagcagctgggctccaggcagcgaggccagtccacctgcagcttggccaccaccaggatcatcttcccacttggcatttcccacagtgcagtccctaggcaccagctctcctggctggcctcaggccagacagcaaaagaggccccgccagggccaggtcctcacctcccacatagagtggcgcctcgctgttgagcgtgtaatgtttgccaaagttgtccatggtcatggggctcccgccatcaatggagagattcaccatctggtcaaaggcaaccagctcaacggtgtggaattgcccatcgttgatcgtctcagcactggaggaagagggggttccccgttccagggagtgggcatcagtctggaccatccctgcctgggcacttccccagaaacaccagtagctgcttcccaggagaccaaatatctaaggaaaaggactgtgggggctcaagggtctatcgcatgatccctttcactccccttctttgactccctggggaaggctgagaggtttgaggcaggggtctcaaacttacaagtctccccctccccattaaggagcctcctctaaggtggtggtgggatggggaaggatggggccactgcacaggcctcagagacctcagccccaagctggggctaacccagatggttcaagtgtccttcaaactcaggcagcccaggtttctagaggtctcgataaccacctgcttttggcccaggagacctcgccctggcagtcccgtacccctgagggcagctggggggcataaggaagccctacctgtagatggcagagctggggtagctgcctgggtcgtagctgacacgcacatggccctggtacagctcaactgcaatgtggtcgttgtccccgttgtacagaaggatcccattgtcctctgccgtggagacctgatgggcagtggcactttctctcccaccccaccccatgcagcagcggcacaggctagcagatggggcagagagggcacccaagattggaagagagatgctctgtgcagagcgctcttcccccacctggccagcctccccaaggccattcctccagggggcaccaataggggctgcagcctctggttcaagccccatccactgccagcctggccaggtccaggcaggggagggtgatggggtccctcaggcctggaaactctgtgccagaacaatacagccagcactctgcaccatgatgtatttccagttggagtaccannnnnnnnnnnnnnnnnnnnnnnnnnnnnnnnnnnnnnnnnnnnnnnnnnnnnnnnnnnnnnnnnnnnnnnnnnnnnnnnnnnnnnnnnnnnnnnnnnnngagtattttaatacatgcctaaacaacacaattggattgactacacagttttctgccaagatggtaataaagggaagcaattggttcaggcaggggctgaggcactgaggcacagccagatgtggatgggcagctggggaggagtcataagcagtccttaaatcctggtatgttttaaattagctacaaactctgcccccaggatatcagcaaacacatcctctctgtgcaaactgaaagtttaaaaggggaaatgaatgttgagcttgatgcagaagaggtgggagggacctggtccacctggtggagctgagaggagcaagaactcaggtgggaaatagggaaagacactgcaaaggagaggtggcagggacccagctcccaaccggggggccagagggcagagcccaggaggtgatggacggcagagagcaccgccaaggtctgagctgagctgggcacagaccctgggcaagggtttactcatctgcttggagagtcctgcagccccttgcaggggcctgggctgagaccagtaagtcagatggcctgaactgatggcacttagatggaggaaaagtggccatggcagggcaagtctctttgagttggcctgttgctctgtctccccgtacttctttttttttccttttcgagacagagtttcgctcttgttgaccaggctggagtgcagtggcacaatctcagctcaccgcaacctctgctccctgggttcaagcgattctccagagccaggacaggtgtaggaatgctcttcccaggctgcctcggtttgtacagccatgagcagggcatgcccagtgctgtggtggctcagaggtagctggtctgaacctgctgtttgtcagagcccacccgtgggcatgccagcatggggtcgcacacagcaacccatcacggccatctgctccccgccaccatccccgtatttatcctgctgacaacacaggcagcctgggagagaatctgagtgaatccccagcaaggggctgctcagtcatgatttccgagttttctttgtgttgacagacagctgtaaaatggtcaaggagaggtcactcctgtggcctggggtggggatggtgactccctgtgaagcccagggactccagcaggcctggccaccctggcctcatccctctctataggagacaggctgctacctgagtctgaaggaaagggcacaaaccagggcccatggccactggggagggtcagaggctgtggcctgggcgcctgcagtcctgggttttgttaccctctctgggctttggcttccttgcctgtgaaaggccaggggtgctctggccagcctctgggtccttcctgtctccgctcgtgctcgtgaaatgtcccagggcagagagagggaaaggtgagtggaaagagagggggcagaatgaggcttgatggggagtaggacagcaggaagctctgggtggcagagacccttcacctgtagtgcgctggcaggacctctcaagggtgggtggggctgcaccctgggggttcaccccactctctctttccccccgtggctgaccctaggctccaggccacaggcagcctccttggccccagccacaacgaggccctgtcccggtggaggtcagcgcgggtttgcagcccttgtttctcatagctgatctgcctgctttggacaggcacctggcccagaaccctttcatttgcgactgtaacctcaagtggctggcagacttcctgcgcaccaatcccatcgagacgagtggtgcccgctgtgccagtccccggcgcctcgccaacaagcgcatcgggcagatcaagagcaagaagttccggtgctcaggtacctgcccgcctgcccacctgcccacctgtccacctacctgcctgcccacctgcccaccggcctacttgtccacctgcatacctgcccacctgcccacctgtccacctacccgcctgctcacttgcctgcctgcctacctgtccacctgcatacctgcccgcctacccacctgttcacctacctgcctgcccacctgttcacctacctgcctccctgccggcctgcctgcctacctgtctgcttgtctgtctgtattcagcctgctcagggaccccctgatgtttcctggatggctcccacaaaggtgtctttcattactgtgaacccagactggagggtgtgggcccaaaattctagacttgatctgaatggtagttcagtcccacctcattttattgaggcctagggaagaagcaaggcttgctgaaggtcccagagggaggactcaggtccctccacttttagccagttctcttttatgcctttgttgtcaagccttttaagacactcaggaggcctgggaaccctccttagtgagataggagcctcctccaggctttgggatgcagaaacagccttagcaattgtagtccacgtggcatctggctggggacagtgtggggcagcttctgagcctacatcctggtcaaggtcctgacgccacctgtaccccgtccccacctgtaaaattagcacagtccccacctcgtgccattgcgagtgagagctcgatggttttggcactccttgcgagaggtttaactggatgcgacacccccagtgtcagcctgggcaaggaacatgcgtgctctgtagctcgcccttctgcacacagggactgggcagatgggctcctcagccctgtctggggtgccttcagctgagcagtggggctggggcctgggctgttactgcaggtcctggctgattcctgcattatggtatttctgcttctcttcccagccaaagagcagtacttcattccaggtaggagagtggggggatccaaggccagcctggcgggaatggtggtagtgggtgggcaggctgggggccttggttgacccaaactgctgggagccggccccgggctcctcagcctctgcccccaccctctcatggcaggcacggaggattaccagctgaacagcgagtgcaacagcgacgtggtctgtccccacaagtgccgctgtgaggccaacgtggtggagtgctccagcctgaagctcaccaagatccctgagcgcatcccccagtccacggcagaactgtgagggtccctggcccccccagccctcccctgtccctaactgccactaaccctccttggcctactccaggattttcttggtccagccctgtctggggctgaaccactggagcctctggctcaggacataccaactgctggcttgggcaggaagaaaccccacccctgctgccctctgcttcattcacagcccccctcacccatcaaaagcagatgccagtctctggcactcagggcaggtcaccagcctgaatcagggatggcttttctcaacgatgcgtttgtcttattctgtgggacatgattccaaaactctttgttatttttattcctctatctaaaaatatgaatttgtgtacacatatgtctatgtgcatagatgcctgcaagcatctgtcatttacgtctgtaaatttttcatggcatttttaatgttaaaaatatccccattcatatcctctcccagtactaggcccagccttcctttgaaataggatcaatttgctttgccagataaattcttctgggagtcttctctgtttgagtcccaaatattctcagtttggaagggatttgaaatgtccatcatttgtgaatgtgcaagttcattcttgtctcttacaggcgattgaataacaatgagatttccatcctggaggccactgggatgtttaaaaaacttacacatctgaagaaaatgtgagttacccattggcgagaaggtgtctgttgggatgctggccagggatggacaagggaaatgccagggtgggggcagctcccacggcggggggccaggactctgtgtgtgggggtgttgcctgcaggaagggaggggcctgagctcctggctgctggccatatgtaatcctccccccgcctcttctcccagcaatctgagcaacaacaaggtgtcagaaattgaagatggggccttcgagggcgcagcctctgtgagcgagctgcacctaactgccaaccagctggagtccatccggagcggcatgttccggggtctggatggcttgaggaccctgtgagtgtgcagggctggggagcagggtgggccagctgcaggaggcaggcaaagccaagggaaaggaagagagaggctggaggagcccctcccctgggcccagcttgcaggagggtggggagaactgaggatcctgactgtgttgggacaggtaatcaagttggcaactctatggtgagacctgttctcttgtaccctggggcatggggccaatgcccagttggcctcaagggatggagacatgtggacccttctaggggtcccttcccattgccctctggtcaggctgcaagagcacagcatgagttcaggagtggctggcactgctgcaggcaggaggggctggatgaccttgccaaggtgattcagtgggtgtagataggggagcagggatgctgcactgtccctgagatgctaggatcccataacccacagcccagcctgagctgaccagaatctggagctcagtgggatcctggggtcatctgctcctccatgatgcaggacaccccctccatctgccccaggagggctggctcttcagatgatcctgagggtgtgtatcgtgtcccatagacagggcagtctgtcggatctcccacagagatggaaatgtttcaagtctacgctgtccagaccagtcacttcatgtggctgtggagcagttgaaatgtggctagtgctactcagtgactgaattttgaatttcattttattttaatgcatttaaatctaaatagctacatgtggctagtggctactatattggacaccacagctctaggaagccacttgcccgggtataagtcccaaatctgcagcaggatgtagagttgtctctgagcaagtaaatgaatgtgtgacaggactccctgtggatttttgttcctttattttacaaaaagcaaattttattatgcactatgttttgcagcttgctgttttcacctgtgaatacagcattgccttctttccaggctgttcctataggctgcctcatttttctttatgcttacctagtattccttaaatgtgggtgtgggggctgtccagtcagctgcattctttccaaggaagacttagataaggacagaggaaaagagaagggcccataccccatcactatccagaaatgaccactgttaattgttggtataaacaactgtctttccagtcttttacatatctctaaacctgcatacacatacatatacacacatacatacatacaagcatgcacgcatacagaaatattctaatggactcgtacattttatttagtaacctgctttttccttaaacttaatatgagcaccattacatattaaaatttttttccattccacatttaattcctaatacaaaaaaagtgctctgcatcagtttgaatgactaggtattatataattattggcaatgtaggctgtttctatttttttttttttataagcaatgttgtattgatacctgccttagtgggttcaggctgctataacaaagagccacagactggaggtttatagacaacagaagttctggaggctggaagtctgagaccagggtgccagcatggatgggttctggcgagggccctcttctgggttgcagacttctgacttctcattgtgtcctcacatggtagaaagagggcaagagagctctctgggatctccttgataagggcactaactccattcatgagggctccacccttatgacctcattacctcccaaagaacccccatcctgatcccatcacactggggattaggacttcaacatagggattggaggggatcacattcattctgtgacaatatctttattgtgaagttcacgtataatgcatgataatactcttgttaggaattcctaaagatggagtagtcgggtgaaaacacaaagtgtcattttggggattttgctacatctcaccaaatgcacttccagggaggtataaaggcatctcctgccagtgtgtggaagtgcccagtcactcacactctcagagatcctggatgtcattattattattattatatttttcattcttttttaatttggcaggcaaaaaatcaatattgcgtaagtgtctttgattagtagtaacattgaacatttttgtgaatgttgataaaccattttaatttcttttgtgagttggctaccctgtgttgacttggtttttgtttttacttttggttggcaagtgaaattgagctgggtttttgttgttattgttgttgttgtttagggagacagggtctcactctgtctcccaggcagctggggtgcagtagtgccatcatagcttactgtaaccttgaactcctgggctcaagagatcctcccacctcagcctcccaagcagctgggactacaagtgcacaccaccatgcctggctaagttttaaatttttttgtagagacaaggtctcgctatgttgcccaggctggtctcaaacccctggtttcaaataatccttggcctcccaaagtgctgtttttacaggcatgagccactgcatcaggcttgggctgggtttttgaagatgaacagcagcttttccagatgtagatgaggcaaaagagtattctagaaaactgtcacagcggtgtagcaggctgagggctggtccatctctagggaggcaggcaggtgccagggctgagatggtccgggtctgggtagacatggtctcaggtcacagtaaggagttcgagcatgactcggtgggcagtttggaggctgttagtggactttaagctggagagtgacatgatggattaggtttcaggaagtctcctgggcactgatgtggagcatggcctaaagacgggcaggaactctgggcacccagggcacggaggcaaggccagcatgggggacagggcagtggcagggagagagagacagagcctcgaggcttctcagaggcgggggcgggtctggagtgggcacaggtgtgtaaaactcgcctcacctggccggggcctggctggtgcgtgttcctggctctgcggctcgcagcctatggaggagaactgtgaacgagccacgatggcggaagctgcgtggcccaggtggatggctggcagggcagcaagggtcccctcctccctcccccgttcctccccagaatgctgcggaacaaccgcatcagctgcatccacaacgacagcttcacgggcctgcgcaacgtccggctcctctcgctctacgacaaccagatcaccaccgtatccccaggagccttcgacaccctccagtccctctccacactgtgagtccggcctccaggacaggcgggcgggggctctggagcaaccgtcccaaccgtctcggccagccactttgaaagagctcaccctgggggtgctgggtcttcgtggtttgctgaaacgtgggttccacatttcgaagtctccctccggtcctcagagccggtcctcttggtgatgggtggtggtctgggagacagtgccatgtggccatgtggccctgtgtccgtggtacaggaggggtttgctgggacctctgagaggggcagagtgtctccatggccgcctggcctgcctcttccaggaatctcctggccaaccctttcaactgcaactgccagctggcctggctaggaggctggctacggaagcgcaagatcgtgacggggaacccgcgatgccagaaccctgactttttgcggcagattcccctgcaggacgtggccttccctgacttcaggtgtgaggaaggtaactcgtggccccccggtggcaagggagagggcgccctgggtccaaccagtggggtggggcaggtgaggaagatgggagtggacaggcagcaccccctggcatgcccctgagaggagaggttaggtggggaggggaggccctgttttcaggaggagacgcgcctgcctggtggtgtctttgtgtggttataagagcaataaagttcctatccttaaaaaatgggaaagtatggataaaagaaggaaataaactttacctattattccatcgctcagagaaaacagttcccattttagtgtagtttctttctgtaagtttggtgaactcagacctgccttttggctgtccctaagcactctagactcatggggtcaccttatcttaatatgcaatggaacccttttgagtcccctcccccatatgtaggaaaccctgaccctggtcactctttgctccaatgccttgtttcctgggacttctcagggtagccccatccctcattttttcgccacagcaccaagcacggaaggtcactgtaggaagcagatttttctctgtgcagccatcccatccttagtgtctctcagcaccctgccgcagggaatttctccctggctgacctcagcttccagcccccttctccgcttctgggtgctaaggtgcctcccttctccctggtctctccctttcttgccttctaccccctgcagcctactcccagtggcagctccaccctcagctggcctggccaggccacgtggcagtggagagctttgactttcaccccaagaaacaccatcagggtattttctaaacaaaattaatgaattctctaagaatacttttgcttctgacttctaaaatttaaaaaagagtctatactatttacatatatattttattaatttatataataatagcttgcaagtctttttaaaaatgtctgatttgtttaaaacctaactatatattttgggcattttctcatgccattaactatcctttggaaacattattttttccaagatacggtttccttttatccttctttttacaaaagaaatgcatcctcattccttaaaacaacaacaaccaaggacaaccagaaggaggatttaaaaaagttactgacaggccaggcgcggaggctcatgcctgtaatcccagcactttgggaggccgaggcgggcagatccctgaggtcaggagttcaagaccagcctggccaacatgctgaaaccctctctttactaaaaatacaaaaattagccaggcatggtggcgcatgcctgtagtcccagctacttgggaggctgaggcagaagaatctttagaatttgggaggtggaggttgcagtgagccgagatcacaccgttgcactccagcctgggcaacagaatgagaatctgtctcaaaaaaaaaaaaaaaattaacgatttgcccactaccccccggcccccatgccccaactctggataactcctgtcgacatttgctatgtggctttccagatctttgctgtgtgctcatgtgcacaagtgtggcacacagaggatcttgcagggccacctgtgaaaacctttcaacaggatggaccgctatctggaaggctccacaattgatgtaagcagcccccagctgctggacattcagacaacctcccaagtcccgctccaatgcatcgtgctgccaggagcaccctcgtagatgctccctacgtatatattccactctcccctagaacagcttcctagaggtgaaaggatgtgaatatttctaagatgttgctgctgagagcctggtggccaatcgagcaggttctggaggcaggctgcttgctccaggctggggcaagtttctgaaccactctgcctttagtttcctcattgctccaatgggctaatagtaacacattcactagagagctgttctgaggattcagtgagttcacccttatcctgtggggcctgcacacaggcgacctgcataactgatggtcactgtcacccgggagcatgtgctaccagcatcccagtgtcctcaagaactccgaccgtggtgatattatcatctctctgacacccaatcagcagaaaggaaggcacagattttttgaatagatgaatgaatcaatgaagggatggtgtggtatcgagggctcggattttgcggcagccagacctgggctcagactctgcattgccttggacccactttatgattcaagcaaggtgcctaacgtctccagacctcaataaaatggaaattcatccacttgttcattcattcactcaactcatctgttttgagggctgctgcgtgccaggcactgcactaggcactgggctctatcagtgaaaaaaagaggagaaaagaggcccaggtctccatcctcctcatgcctgcattctaggggcgatgctgcacccctaactgtactgttaaggagacaatgtcgatccagtgcccggagtagcaggcactccggggatgggatggtgcgcggccatccttctgttctactttgaccaggtccactttgagtttgaggagaaagagaccaactaaagacctattttaacctcaaaactgctccagggggcttcattcctggtggcggtggtggctggcggggaggtgtagtgcacagacttactgatggccaaggtactgtcagaggggtcttctgttctgagaggccccagagcatggccctgactgtaggaggccctacagcggcccgtccacctccctgacaggggcttcgtgccttcttccctaggccagaaggaggggggctgcctgccccccccacagtgcccacaggagtgcgcctgcctggacaccgtggtccgatgcagcaacaagcacctgcgggccctgcccaagggcattcccaagaatgtcacagaactgtgagtagctcaaggccttgccccctttacgtgggtccacaggacggggacagtgggggcatttactgtagggctggtgcctagccatgggaggaggaggtgaccaagagcaggcattagctgactaagagctgaagttccggctttgcagaaacactggctccagaaagctttgagctttctctgattctcctctgcgnnnnn

SEQ ID NO: 1258 - protein, 513 aa, Homo sapiens [sequence omitted]

SEQ ID NO: 1259 - DNA, 877 bp, Homo sapiens
  source
  (1)..(877)
  CDS (201)..(677)
agaaaaaagtaatctctttggttgtgttgcccagttatggttttttggccattttgtagtaactgaatgtttccttctggctgccatggcatatgaccggtataggctatctataagcctttgttgtatacactcattatgtcccaacaggtctgtgtgcagctggtggtgggccttatgctgtgggccttataagcaccatgacccatatgactttcacctttcgcctactctactgtggtccaaacatcatcaatcacttcttctgtgaccttctccctgtcctctccctggcatatgcagatacccatattaataaatgtttactttttatcttggtgggtgccctgggagtactcagtggtgtgatcatcttggtctcctacatttacattgtcattgccatcctgagaattcgctctgctgacgcgagacgcaaagacttctccacttgctcttcacacctgatggctgtctccatcctgtatgggacactcttctttatctgtgtatgtccaagctctagtttctctatcaacatcaataaagtggtttccctgttctacacagcagtgatccccatgttgaatccccttatctacagcctgagaaacaaggaggtaaaagattcattcagcaagaagtttgaaagaaagaagtttcttataggtaggtgaactagaataccaattatactgcagattgagaagtgatacttaatagaggcaagacactggactgagtgatattttgtgtttactgctttgttttgagattctacaatctggtatatagtaagagttcaatgtatatttgttgattgaaaggtaaatatgtggccaatactaaattatttgtttaatggacattaaagttg

SEQ ID NO: 1260 - protein, 158 aa, Homo sapiens [sequence omitted]

SEQ ID NO: 1261 - DNA, 1006 bp, Homo sapiens
  source
  (1)..(1006)
  CDS (201)..(806)
ctctcatctgtgctgattcttggccctacacacccatgtatttcttcactggaaaccggttccttctggatctctggtattcctctgtccacatccccgatatcctgctgacttgcatttctgatgacaaaaccatctcctttcctggctgccttgctcagttcttctctgctgtgttggcctaaaatgagtgctatatgatggcttccatggcttatgaccgctacatggcaatctccaagcccctgctttattcccgggccacattcccagagttatgtgccagtcttgttgaggcttcacaccttggcggctttgtaaactcaaccatcatcaccagtgagacacctaccttgagcttctgtggcagcaatatcattgatgatttcttctgtgatctgcccccacttgtaaagttggtgtgtgatgtgaaggagcgctaccaggctgtgctgcattttatgcttgcctccaatcatcactcccactgcacttattcttgcgtccatctcttcatcattgcagccatctcgaagatccgttccattaagggccgcctccaggtcttctccacttgtgggtctcccctgacggctctcaccttgtactatggtgcaatcttctttatttactcccaaccaagaactagctatgccttaaaaatggataaattggggtcagtgttctatactgtggtgattccaatgctaaaccccttgatctatagcttaagaaataaggatgtcaaagatgccttgaagaaaatgttagatagacttcagtttcttaaagaaaaatattggtaaacaatttttaacagattatctccacgtcattgttttcagcttatattctcagaaataaataaaagataaaataattttataacttggaaacggaagtctgcatttttgtttttaagttggagctaaggtattggaatgtattttttaaataaatgaggctggggcatttgcaaaagctactatgcatggtagcttggaac

SEQ ID NO: 1262 - protein, 201 aa, Homo sapiens [sequence omitted]

SEQ ID NO: 1263 - DNA, 874 bp, Homo sapiens
  source
  (1)..(874)
  CDS (201)..(359)
  CDS (420)..(674)
tgaactgagtcttatttagaagttctccactctatatacttattatcagtttgcgataggctctataaagagttttttgcaggaaaaactcatctcagtgaggccattgtttgatgttccaggactaatttgacatgaagataaagaatcacactccagtaactgaggtccccctgatgggaatccctcatacaaaggggatggaaaatgtgctttttgtcttatttctggccttctacctcttcaccttgctggggaacctactcattcttctggccgtcctcactttctccaacctccacacccccatgtatttcttcctgggaaacctgtctgtgtttgacatatttttcccttcagtgagttcccccaaaatgatgctctgcttagtgggacaaagctgcaccatctctttccagggttgtgcctcccagctcttctttcaccatttcctgggttgcaccgagtgtttcctgtacactgtgatggcctatgaccgatttgcagccatctgccaccctttgccatacacggtcatcatgaaacgcagggtgtgtgccctcctgacgctaggcacctggacggggagctgtctgcatgcatctgtcctcacactcctcatctttaagttatcctactgtggccccaatgaagtggacaatttttttctgtgatattccggtggtgctgcccctggcctgcgcagacacctctctagcacggacagtgagtttcatcaacgtaggtgttgttgcgctcatgtgttttcttcttatcctcacctcttatgcttgcattgttatctctatactgaaaatcagttcctcagaaggtaggcgcagagccttctcaacctgcagtgcccatctgacgt

SEQ ID NO: 1264 - protein, 137 aa, Homo sapiens
MENVLFVLFLAFYLFTLLGNLLILLAVLTFSNLHTPMYFFLGNLSVFDIFFPSGCASQLFFHHFLGCTECFLYTVMAYDRFAAICHPLPYTVIMKRRVCALLTLGTWTGSCLHASVLTLLIFKLSYCGPNEVDNFFL

SEQ ID NO: 1265 - DNA, 4137 bp, Homo sapiens
  source
  (1)..(4137)
  CDS (201)..(617)
  CDS (3429)..(3662)
  CDS (3887)..(3937)
gaaagttctgagatgtatctgtgtatcccatatttcagggatcctggggtcttttactgctaacatgaggaacaggcagagaactgcaactacctagttgaaaaacttgaattttgtttcacattttatcgtgttagtgggataatgaatacctaactcaaattttcttcttctctttctacataaaatttccagagaaaatggtaaaaggaaatcattccacggtgactgaatttaatctcgctgggctaacagacaaaccagagctccagctgcctcttttcctcctcttcctgggaatctatgtggtcacagtggtgggcaacctgagcatgatcactctaatagggttcagttctcacctgcacacccccatgtaccatttcctcagcagtctgtccttcattgatctctgccagtcttctgtcattaccccaaaaatgctggtgaattttgtgtcagagaggaatattatctcctacccagcatgcatgactcagctctacttcttccttgttcttgtcatatctgaatgtcacatgttggctgcaatggcttatgaccactacattgccatatgtaacccactgctttaccatgtcgccatgtcttatcaggtctgctcctggatggtagttgaggtgtattttatgggctttattggtgctacgtgctcacacagtctgcatgctaagagtgcttttctgtaaggctgatgtaatcaaccattacttctgtgatcttttcccactactggagctctcccgctccagtatttctatcaatgaaatagtagtttgtgcttcagtgcatttaatatccttttccgcagcctcaccatccttagctcttacatcttcatcgttgccagcatcctctgcattcgctccactgagggcaggtccaaaaccttcagcacttgcagctcccacatctcggctgtttctgttttctttgggtctgcagcattcatgtacctgcagccatcatccgtcagctccatggaccaggggagtgtcttctgtgttttatgctactgttgtgcccatgctgaacccccaatctacagcctgaggaataaagatgtcaaagttgccttaattaagttccttgaaaaaagaagtttcctgtgaaagttgccttaaataagctccttgaaaaaagaagtttcctatgaaggggggtattttgctttagcaaaaacttttaatttctggaaaaggtttgataaggaaacaatctagagacagtaaggtatgtccacaagtaatgagatggctgctactacttggttatttggaagaaagatgccaaggataaggctgaattcataggatcagttacatgttgggagcatttatgggatgccacagagttcatccactcagagtaacacgtatcacttctaaacatttaaaaaaaattcataagcctccgtgtgtgattatactttataagtatggaatatggcactttttaaggcaagacttatttaccttactttaaggaataaatatatcttgtcagtccccatgatattctcaatacctgtgtacctgggtttttctactaagtgtataggtaaacacttctcaaagtgtgatctccaaaataaataattgcaaccattttgaataccagattcaatcactaattcttactaagcatgtagaaatatattagggaatatggaggcatatgatgggtaataaaacagtttctacccataaggagataatacttagtggaagagattgacagcaataaatattgctaaatacattttgtgtattttgacatatatttatggcaaggcccccactaccggcctgggtctcacaccttcaagggagactgtgcgtcaggcgtggaatagtggggggtgtgtgagtgagcatggggtctggccattgcttacatcagacacaccagctgctgttgcgggatgggcagctccaggtgctgacactctctgcaaggctgcagctggactaggtgcactgcaagcagcttcctcagctggcaccggggaatgtggtggcacctaaaagcttggagacaccaggaactgcagggccccaaagaagaagtcacagtgctgtctcggggagctcccaggtctgggatccccaaagggccgcagctcttctctcctgttcacccacaacatggtgagcaaggggcatgtttcagccctatttctgttgcagctcttttagccttgccattcagtgggtcccaggttctcgtcctgagaccagaaagaataaggcacgcagacaagtggaaggtaagcaagacacagaggagctttatcgcacaatagaacagctcagaggagacctgcaatgggcagctcctctccatagcagggtttcccaatgagtgtcaagctctcagcagagagggtagttcctctctgcaggtggtcacccagtcatctcttcagctctcagcagagagggtatctcctctctgctaggcaggtcatcccgtcaagtgcccagctcttagcagagagggtagtttctccctgcagctggtcgtcctatcatctccttggttctcagcagacaggaaaccctggggtggtcagctcctctctgcagctggtcatctcatcatctccctttgtctctccatcctctgctccagtttggccgactctggggtttttatgggcctcagaggggagaaaacgtgtactgattagtccatgagtcgccgtagggaaaagcaccataagttccccctctggtctgtgggactggtgaccccatccccaagcttcaggccctctccagcttggaggtagggcttcaccaaggacccgccaccttctgcccaggagcctgcctgagcatgtgcacccccggctgggctacaacaatgcccgggcttggtcctgactcagagctggcaccaacagcagagagaagccaggcagagggagcaggcaccctcatcccaccgagggccaggggagccttcccaggcccccaagtctgcagagatgcctgggcctgcagccacagcagacatggcaggatggctgcagctgcacccagggagttcccaccctgccagcttggaaggggccggactcctgcttatccttggccctgcagcatgcagccccagccacgcctcctttaagcctggggcaggggctccaagtccttgctgggcctgggctggcatccagggcaggagtgacatcaacataagttcttcccatggccctggtgctcaggggtggcccagggctcccacttggtcagcttgtgaccctgcctcaggggcacctctaggagccgatttcaggtcctgggactagaggtcaggagtgtcaggcttggtggttgtccagatgcagggcagacccctgagactcaacccccagtgcagagccttttctcagggcacaggaacctggcaccatcagcaaggtgggcatggtggccatgccactggccaggtccccaaagcagatgttacctctggcccatcctccacactccatctccaaccacagcaccatgctgggcccagctctgcctcggggccatctctgccaggcctccatgcccaaccgtgctgctcccccaccaggaaactcggcccagccccttcgtggtggtccccaccatgacaggctccaggtggcttccaggggcggggtccagagactgtctgcctcctccccagcccctccccacagcagtggcaggcaagagtggtgacatggggccagggtcaggagccacagagtctctaggcctaggggtgggtcttacctggtcatgcaaaggtgggggtggctcagttgcctgccttggagacatgggggacaggggtcccaccaccgttattgctgcccctgcagcctctcctgccacaaccgctggcctccccactgcagctggcaccatggtagcggcggttctggatggcctacttttgccatcaatataacgtttaacaaaacatgaaatataattttacttccaaaataatttagttttatataagtacaaaaataacttctgtaacacatatgtctttattgttcctcaatatcattcttattttttgatgaaaaaagtcatcaactctccttgttaggcttactaggaa

SEQ ID NO: 1266 - protein, 233 aa, Homo sapiens
MVKGNHSTVTEFNLAGLTDKPELQLPLFLLFLGIYVVTVVGNLSMITLIGFSSHLHTPMYHFLSSLSFIDLCQSSVITPKMLVNFVSERNIISYPACMTQLYFFLVLVISECHMLAAMAYDHYIAICNPLLYHVAMSYQEPGTISKVGMVAMPLARSPKQMLPLAHPPHSISNHSTMLGPALPRGHLCQASMPNRAAPPPGNSAQPLRGGPHHDRLQPLLPQPLASPLQLAPW

SEQ ID NO: 1267 - DNA, 985 bp, Homo sapiens
  source
  (1)..(985)
  CDS (201)..(547)
  CDS (719)..(785)
cactcccaagtactttttcctttctaaattgttcttcacagacctctgttattcttctgtgtttatactccaacttccgaggaagtgtatttcagaggagaatgttatctcctacatggtttgcatgatctagcttttctttttctttttctgtttttttttttttttaatttatttctgaatgttatatgctgacgtcaatggcctatgattgctgtgtggccatctgttacccacttctttatcacattgccatgtcccctaaagtgtgtttcagccttatgcttggttcctacttcctatccttttctggggccatggcccacactggatgcatgctgaggctgacctgtgatgcaaacaccatcaatcattacttccgtgacatcctccctgtgttccagctctcctgcaccagcacctacatcaatgaactggtggttttcattgtggcaggcatcaataccattgtgcccactgtcaccgtctttatctcttatggtgacatcctctccaggatcctccacatcagttccaatgagggaaggtccaaagccttcagcacttgcagttcccacataattgctgtttctctgttctttggattaagtgcatttatgtatctcaaaccatcttctgctgggtctatggatgagggaaaattctcttctgttttttatatgaatgggcttcccatgatgagctccttaatctacagcttaaggaggaaagatgttaaatttgccatgggaaaatctctgagtaggagaatgtttttgccataaacaacatttctctgtgtatgtagttacaggatggggattctctgtattttattataataattgaggaggaaataatttttcctatttgttatcatgatgatggttagttgagtatcatcctgtcaatttgtctccaattttttatagtagatttttcccctcaccctttgcacatctttccccttttcatcatttttcct

SEQ ID NO: 1268 - protein, 137 aa, Homo sapiens
MAYDCCVAICYPLLYHIAMSPKVCFSLMLGSYFLSFSGAMAHTGCMLRLTCDANTINHYFRDILPVFQLSCTSTYINELVVFIVAGINTIVPTVTVFISYGDILSRILHISSNEGSLRRKDVKFAMGKSLSRRMFLP

SEQ ID NO: 1269 - DNA, 1394 bp, Homo sapiens
  source
  (1)..(1394)
  CDS (201)..(799)
  CDS (1020)..(1194)
caagaactgggtttaaatctggagttgaggactcctcaacttttaataggttacttattctctgtgagcttgtttctctcctctgtaaaatggggacagtacttcccaagtagcagggtggtggtgagaatcagagatcatacagctgctgatcacatcttgtttgtgttcccaggggcaccagactagggtttctgagcatgaatccaaccatcccagccttggatacagaaattgcaccaattagtgatacagaggagacccatcctcatcgttgtggcatggaggtcctggtcctcatagtgctgatcctcatcattgacctggtcgggctggcaggaaatgcagtcatgctctggctcctgggcttctgcatgcacagtaacaccttctctctctacatcctcaacctggccagggctgacttcctctgcacctgcttccagattataacattcattaatttcttcagtgactttgttagttctctctccatccatttctctagatttgtcaccacggtgttgttctccgcctgtattacaggcctgagcatgctgagcaccatcagcaccgagcaccgcctgtccgtcctgtggcccatctggtactgctgccactgccccacacacctgtcagcggtcatgtgtgtcctgctctgggccctgtccctgttgcagagcatcctggagtggatgttctgtagcttcctgtttagtgatgttgactctgataattggtgtcaaatattagatttcctcactgctgtgtggctgatttttttaatctgtggttctctgtgggttcaccctggtcctgcttgtcaggatcatatgtggatcccagaagatgccgctgaccaggctgtatgtgaccatcctgctcacagggctggtcttcctcttctgcagcctgcccctcagcattcagtgattcctattatactggatcgagaaggatttggatgacttaccttgtgttgttcgtttaatttccattttcctgtctgctcttaacagcagtgccaaccccatcatttacttcttcatgggctcctttaggcagcttcaaaacaggaagaccctcaagctggttctccagagggctctgcaggacatgcttgaggtggatgaaggtggagggcagcttcctgaggaaaccctgaagctgtcgggaagcagattggggccatgaggaagagcctctgccctgttagtcagatgggactttgagagcaacactaccctgccactcttgacaattatatgcgtttttctcatctttgtgcctctgaaatgccccagtgacaccccagtatcttcaaatagttttatttttaatctcacatttctagttttactcagagaaagcattaattttaaggtacaatgttt

SEQ ID NO: 1270 - protein, 257 aa, Homo sapiens
MNPTIPALDTEIAPISDTEETHPHRCGMEVLVLIVLILIIDLVGLAGNAVMLWLLGFCMHSNTFSLYILNLARADFLCTCFQIITFINFFSDFVSSLSIHFSRFVTTVLFSACITGLSMLSTISTEHRLSVLWPIWYCCHCPTHLSAVMCVLLWALSLLQSILEWMFCSFLFSDVDSDNWCQILDFLTAVWLIFLICGSLSANPIIYFFMGSFRQLQNRKTLKLVLQRALQDMLEVDEGGGQLPEETLKLSGSRLGP

SEQ ID NO: 1271 - DNA, 16256 bp, Homo sapiens
  source
  (1)..(16256)
  CDS (201)..(306)
  CDS (760)..(918)
  CDS (1009)..(1194)
  CDS (1602)..(1618)
  CDS (1692)..(1764)
  CDS (1837)..(2040)
  CDS (3954)..(4181)
  CDS (4272)..(4457)
  CDS (4863)..(4879)
  CDS (4953)..(5072)
  CDS (5184)..(5294)
  CDS (6999)..(7197)
  CDS (7651)..(7809)
  CDS (7900)..(8085)
  CDS (8493)..(8586)
  CDS (8742)..(8932)
  CDS (14104)..(14223)
  CDS (14326)..(14487)
  CDS (14579)..(14707)
  CDS (15950)..(16056)
  modified_base (3847)..(3946): a, t, c, g, unknown or other
  modified_base (6897)..(6996): a, t, c, g, unknown or other
  modified_base (10323)..(10422): a, t, c, g, unknown or other
aggtatggccagctaggagattctgtgggctggaggggcaggccagccatcactgggggtggggagggtcccaaggtgggcgagagaggaggtggggctggggcaagaccctgaggttcttggagcagcctgctgtcaccccatggccccagaccagaggggccaaacttccacttaccacagacatcaacgagtgcgcaatgccgggcgtgtgtcgccatggtgactgcctcaacaaccctggctcctatcgctgtgtctgcccacctggccatagtttaggcccctcccgtacacagtgcattggtgagacctggggctcaggttcctgggaggtcacaaggcatgggtgggagcaaggatcagagatcgcaagagatcagagtggggttaagggttgactgcaggaggaacaaggcccagagccaataggatcagggatcagcagggtccggggtcacatgagatctgccattagcagtcacatggggtcagggattacatagagtcagagtcatgcagaacataggcttgatgagtaggagtggtgaagtccaggatagctagaatcgggagtcaatggggtcagtggtcacataagtttcaggggtcacatgagttcagggtcatatggggtcagagaccacatgggggatcaagggttgtctgggccggagaggcaaggtctgcagcagctgggcagagggacgtgggcaatgtgcaggctcagatgcccatgccccccactggcccctgcagcagacaaaccggaggagaagagcctgtgtttccgcctggtgagccctgagcaccagtgccagcacccactgaccacccgcctgacccgccagctctgctgctgcagtgtcggcaaggcctggggcgcgcggtgtcagcgctgcccaacagatggcaccggtgagtcagggttacccggggataggggttcataggtccatgcacctgtccaggaaatgctcacttttgtgtctgctgtcttgactgcagctgcgttcaaggagatctgcccagctgggaagggataccacattctcacctcccaccagacgctcaccattcagggcgagagtgacttttcccttttcctgcaccctgacgggccacccaagccccagcagcttccggagagccctagccaggctccaccacctgaggacacagaggaagagagaggtctagcctgaccccttctgatccctgacccatgccaagcccctaggcctgaccccttgacccgtgatccacagatctgacctcacagtctaacccccaattccttatccctgacccatccactgacctcccacctgaccctctgacccctgacccagatatttgaccctgagctataacctcctaagccttctacagcctgacctgtaacccaaggccattcaacctgatcatgtgactactatgcaaacacaccctaaccccagaatctaacccctgacccttgacctggagacatgattgttgaactcccagagaccctaactgcaaatactcagctgctgatcccagatctgactcccttctcccgccccaacacttcatggccccatcttcttcccttttaggggtgaccacggactcagtgagtatgagaacccagatgggaggggtgggcaggcgagggacaggagggctcatgctgctgtcacccgcagccggtgagtgaggagaggtcagtgcagcagagccacccaactgccaccacgactcctgcccggccctaccccggtgagctgggcactgtagggatgagtcctcaagggctaaatcactgggtgggcggggagttcacagtttaagtactcggggacagtcaagctggggtggggcgccgggccaagactgaagtggaaagggaggcttcagtcaatatcgtctctgaccagagtgcactgccgcccgcagagctgatctcccgtccctcgcccccgaccatgcgctggttcctgccggacttgcctccttcccgcagcgccgtagagatcgctcccactcaggtcacaggtaaggcccgcccagcaaagccacccctgcctaggccacgcccccactttagttttctctcctccctcccgcccccaggcattccctagcgctaataggctagcgtgtatccagggctgggcactggggaagcctggtgagcaccagagatcccactgccctaaacgatccaggtagcatggtggttagcccattctgagggatttcattcattcaacaaatacttattgagtgttacaggtcttttagattgtctagcaggtttcccagtttttttttgttttttgttttttgttttttttgagacggagtcttgctctgtcgccaggcgggagtgcagtggcgcaatctcggctcaccgcagcctccgcctcccgggttcaagcgattctcctgcctcagcctcccgagtagctgggattacaggcatgcgccaccacgtccagctaatttttttttttttagtagagacggggtttcaccatgttggccagggtggtctcgatctcttgacctcgtgatgcgcccgtgtcggccttccaaagtgctgggattacaggcatgaaccactgttcccagcccataaccatctttcaaaatctgttcagaaagccttctatcattgccaccctactatattatacaaaaccctcagaactccttccttctactctgattttatcattatcattttaatttttaatttttagaaattgcaacggagtctcgctctgtcgcccaggctagattgcagtggcgcaatctcggctcactgcaagctctgcctcccgggttcacgccactctcctgcctctgcctcccgagtagctgggactacaggcgcctgccaccacgcccagctaattttttgtatttatttttagtagagacagggtttcaccgtgttggccaggatggtctcaatctcctgacctcgtgatccgcccgcctcggcctcccaaagtgctgggattataggcgtgagccattgtacccaggcccataaccatctttcaaaatctgtacagaaagccttctatcaatgccacccaaattataatcacaaccctcagaagtccttccttctactctgattttacacgtagaactaaaatattaaaatatacggagattgagacggagtctcgctctgtcgcccaggctggagtgcagtggcgcgatctcggctcactgcaagctccacctcccgggttcacgccattctcctgcctcagcctcctgagtagctgggactacaggcgcccaccaccacacccggctaatttttttgtgtatttttagtagacatggggtttcaccatgttaatcaggatggtcttgatctcctgaccttgtgatccgcccgacttggcctcccaaagtgctgggattacaggtgtgagccaccacgcctggccctgatttagtttttcatagcatttataagacataggagattctgcttattgatcggcttgttgcctgtctgctctgcgaggacaggaaatttttgtctgtttttgttcatgcaatatccctagcacctcaacagtgcctggcacatagtaggtgctcaagaaatatttgggttcctttctttctttttatttgtttagtttgttttttgagacagggtctcaccttgtgacctaggctggagtcagtggcaggatcatggctcactacagccttgacctcctgggctcaagtgatcttccagccttggcctcccaaagtgccaggattacaggtgtgcgccaccatgctctttttttttttttttttttccccggccggggaattttcnnnnnnnnnnnnnnnnnnnnnnnnnnnnnnnnnnnnnnnnnnnnnnnnnnnnnnnnnnnnnnnnnnnnnnnnnnnnnnnnnnnnnnnnnnnnnnnnnnnntctgcagcagctgggcagagggacgtgggcaatgtgcaggctcagatgcccatgccccccacctgggcccctgcagcagacaaaccggaggagaagagcctgtgtttccgcctggtgagccctgagcaccagtgccagcacccactgaccacccgcctgacccgccagctctgctgctgcagtgtcggcaaggcctggggcgcgcggtgtcagcgctgcccaacagatggcaccggtgagtcagggttacccggggataggggttcataggtccatgcacctgtccaggaaatgctcacttttgtgtctgctgtcttgactgcagctgcgttcaaggagatctgcccagctgggaagggataccacattctcacctcccaccagacgctcaccattcagggcgagagtgacttttcccttttcctgcaccctgacgggccacccaagccccagcagcttccggagagccctagccaggctccaccacctgaggacacagaggaagagagaggtctagcctgaccccttctgatccctgacccatgccaagcccctaggcctgaccccttgacccgtgatccacagatctgacctcacagtctaacccccaattccttatcctgacccatccactgacctcccacctgaccctctgaccctgacccagatatttgaccctgagctataacctcctaagccttctacagcctgacctgtaacccaaggccattcaacctgatcatgtgactactatgcaaacacaccctaaccccagaatctaacccctgacccttgacctggagacatgattgttgaactcccagagaccctaactgcaaatactcagctgctgatcccagatctgactcccttctcccgccccaacacttcatggccccatcttcttcccttttaggggtgaccacggactcagtgagtatgagaacccagatgggaggggtgggcaggcgagggacaggagggctcatgctgctgtcacccgcagccggtgagtgaggagaggtcagtgcagcagagccacccaactgccaccacgactcctgcccggccctaccccggtgagctgggcactgtagggatgagtcctcaagggctaaatcactgggtgggcggggagttcacagtttaagtactcggggatagtcaagctggggtggggcgccgggccaagactgaagtggaaagggaggcttcagtcaatatcgtctctgaccagagtgcactgccgcccgcagagctgatctcccgtccctcgcccccgaccatgcgctggttcctgccggacttgcctccttcccgcagcgccgtagagatcgctcccactcaggtcacaggtaaggcccgcccagcaaagccacccctgcctaggccacgcccccactttagttttctctcctccctcccgcccccaggcattccctagcgctaataggctagcgtgtatccagggctgggcactggggaagcctggtgagcaccagagatcccactgccctaaacgatccaggtagcatggtggttagcccattctgagggatttcattcattcaacaaatacttattagtgttacaggtcttttagaatttgtctagcaggtttcccagtttttttttgttttttgttttttgttttttttgagacggagtcttgctctgtcgccaggcgggagtgcagtggcgcaatctcggctcaccgcagcctccgcctcccgggttcaagcgattctcctgcctcagcctcccgagtagctgggattacaggcatgcgccaccacgtccagctaattttttttttttagtagagacggggtttcaccatgttggccagggtggtctcgatctcttgacctcgtgatgcgcccgtgtcggccttccaaagtgctgggattacaggcatgaaccactgttcccagcccataaccatctttcaaaatctgttcagaaagccttctatcattgccaccctacttattatcacaaccctcagaactccttccttctactctgatttttttatttttatttttattttttattttttgagattgagacggagtctcgctctgtcgcccaggctggagtgcagtggcgcgatctcggctcactgcaagctccacctcccgggttcacgccattctcctgcctcagcctcctgagtagctgggactacaggcgcccaccaccacacccggctaatttttttgtgtatttttagtagacatggggtttcaccatgttaatcaggatggtcttgatctcctgaccttgtgatccgcccgacttggcctcccaaagtgctgggattacaggtgtgagccaccacgcctggccctgatttagtttttcatagcatttataagacataggagattctgcttatattagatcgggctattttcctcgttgtctttcgcgaggacacaggggaatcttcttctccttgtcgttggtctcatggcaataattcccttacacgacttccacaggtgcctgggcacatatgtaaggggcttccaagaatatattggggttcccttcttcttctcgtttatatggtataagtgtagttttatgtagaacaggggatctatcaccctgtgaacctaaggcccggggtcatggggcagggatcatgggttcactacagacccgtagctctacctcggggatcaaaagatttcttccaacccttggctccccaaagtcccgggataaaagggtgggcccccaaggtttttttttttttttttttttttcccggcctggggagttttcctgtgaaaactgggaaactgtggcagggtgcagtggctcacggctgtaatctcagcactttgggaggctgaggtgggtggatcacgaggtcaagagattgagaccatcctggccaacatagtgaaacccagtctctactaaaaatacaaaaaaannnnnnnnnnnnnnnnnnnnnnnnnnnnnnnnnnnnnnnnnnnnnnnnnnnnnnnnnnnnnnnnnnnnnnnnnnnnnnnnnnnnnnnnnnnnnnnnnnnnagaccctgaggttcttggagcagcctgctgtcaccccatggccccagaccagaggggccaaacttccacttaccacagacatcaacgagtgcgcaatgccgggcgtgtgtcgccatggtgactgcctcaacaaccctggctcctatcgctgtgtctgcccacctggccatagtttaggcccctcccgtacacagtgcattggtgagacctggggctcaggttcctgggaggtcacaaggcatgggtgggagcaaggatcagagatcgcaagagatcagagtggggttaagggttgactgcaggaggaacaaggcccagagccaataggatcagggatcagcagggtccggggtcacatgagatctgccattagcagtcacatggggtcagggattacatagagtcagagtcatgcagaacataggcttgatgagtaggagtggtgaagtccaggatagctagaatcgggagtcaatggggtcagtggtcacataagtttcaggggtcacatgagttcagggtcatatggggtcagagaccacatgggggatcaagggttgtctgggccggagaggcaaggtctgcagcagctgggcagagggacgtgggcaatgtgcaggctcagatgcccatgccccccactggcccctgcagcagacaaaccggaggagaagagcctgtgtttccgcctggtgagccctgagcaccagtgccagcacccactgaccacccgcctgacccgccagctctgctgctgcagtgtcggcaaggcctggggcgcgcggtgtcagcgctgcccaacagatggcaccggtgagtcagggttacccggggataggggttcataggtccatgcacctgtccaggaaatgctcacttttgtgtctgctgtcttgactgcagctgcgttcaaggagatctgcccagctgggaagggataccacattctcacctcgcaccagacgctcaccatgcagggcgagagtgacttttccctgctcctgcagcctgacgggccacccaagccccagcagcttccggagagccctagccaggctccaccacctgaggacacagaggaagagagaggtctagcctgaccccttctgatccctgacccatgccaagcccctaggcctgaccccttgacccgtgatccacagatctgacctcacagtctaacccccaattccttatccctgacccatccactgacctcccacctgaccctctgacccctgacccagatatttgatcctgagctataacctcctaagccttctacagcctgacctgtaacccaaggccattcaacctgatcatgtgactactatgcaaacacaccctaaccccagaatctaacccctgacccttgacctggagacatgattgttgaactcccagagaccctaactgcaaatactcagctgctgatcccagatctgactcccttctcccgccccaacacttcatggccccatcttcttcccttttaggggtgaccacggactcagtgagtatgagaacccagatgggaggggtgggcaggcgagggacaggaggggctcatgctgctgtcacccgcagccggtgagtgaggagaggtcagtgcagcagagccacccaactgccaccacgactcctgcccggccctaccccggtgagctgggcactgtagggatgagtcctcaagggctaaatcactgggtgggcggggagttcacagtttaagtactcggggatagtcaagctggggtggggcgccgggccaagactgaagtggaaagggaggcttcagtcaatatcgtctctgaccagagtgcactgccgcccgcagagctgatctcccgtccctcgcccccgaccatgcgctggttcctgccggacttgcctccttcccgcagcgccgtagagatcgctcccactcaggtcacaggtaaggcccgcccagcaaagccacccctgcctaggccacgcccccactttagttttctctcctccctcccgcccccaggcattccctagcgctaataggctagcgtgtatccagggctgggcactggggaagcctggtgagcaccagagatcccactgccctaaacgatccaggtagcatggtggttagcccattctgagggatttcattcattcaacaaatacttattagtgttacaggtcttttagaatttgtctagcaggtttcccagtttttttttgttttttgttttttgttttttttgagacggagtcttgctctgtcgccaggcgggagtgcagtggcgcaatctcggctcaccgcagcctccgcctcccgggttcaagcgattctcctgcctcagcctcccgagtagctgggattacaggcatgcgccaccacgtccagctaattttttttttttagtagagacggggtttcaccatgttggccagggtggtctcgatctcttgacctcgtgatgcgcccgtgtcggccttccaaagtgctgggattacaggcatgaaccactgttcccagcccataaccatctttcaaaatctgttcagaaagccttctatcattgccaccctacttattatcacaaccctcagaactccttccttctactctgatttttttatttttatttttattttttattttttgagattgagacggagtctcgctctgtcgcccaggctggagtgcagtggcgcgatctcggctcactgcaagctccacctcccgggttcacgccattctcctgcctcagcctcctgagtagctgggactacaggcgcccaccaccacacccggctaatttttttgtgtatttttagtagacatggggtttcaccatgttaatcaggatggtcttgatctcctgaccttgtgatccgcccgacttggcctcccaaagtgctgggattacaggtgtgagccaccacgcctggccctgatttagtttttcatagcatttataagacataggagattctgcttattgatcggcttgttgcctgtctgctctgcgaggacaggaaatttttgtctgtttttgttcatgcaatatccctagcacctcaacagtgcctggcacatagtaggtgctcaagaaatatttgggttcctttctttctttttatttgtttagtttgttttttgagacagggtctcaccttgtgacctaggctggagtcagtggcaggatcatggctcactacagccttgacctcctgggctcaagtgatcttccagccttggcctcccaaagtgccaggattacaggtgtgcgccaccatgctcttttttttttttttttttttcccgggccgggggattttcccggnnnnnnnnnnnnnnnnnnnnnnnnnnnnnnnnnnnnnnnnnnnnnnnnnnnnnnnnnnnnnnnnnnnnnnnnnnnnnnnnnnnnnnnnnnnnnnnnnnnnttttttttttgagacagagtttcactcttgttgcccaggctggagtgcaatggcatgatcttggctcactgcaacctccgcctcccgggttcaagtgattctcctgcctcagcctcccgagttgctgggattacaggcatgcgctaccacgcccggctaattttgtattgttagtaaagacagggtttctccatgttggtcaggctggtctccaactcctgacctcaagtgacctgcccgcctcggcctcccaaagtgttggaattacaggcgtgagccaccatgcccagccagtaattttttaaaaaatgggagtcttgctctgtcatccaggctggattgcagtggtggtgtgatcatagcccattgcaggctcgaactcctaggctcaagtgattctccctcctcaggtcccccagtagctgggactacaggcacacaccaccatgctcagctaattttttattttttagtagagaagaggtctcactatgttgcccaggctcatcttgtactcctgggctctagcactcctcttgcctcagcttcccaaagtgttggaattacaggcatgagccattgtgcccagcctagctggtaatttttttttttgagatggagtcttgctcattcgccaggctggagtgcagtggcgcgatctcggctcactgcaacctctgcctcccaggttcaagcaattcccctgcctcagcctgctgagtagctgggactacaggcacgcgccaccacaccctgctaatttttttgtattttagtagagacggggtttcaccatgttggccaggatggtctcgatctcctgtcctgaccttgtcatctgcctgccttggcctcccaaagtgctggaattacaggcgtgagctaccgcacctggctgtaattttttttaaatacgaaatgcatcaggagttcatactaatgtttcatattcaaatttagaattatagggtttttaaattttatttatttattattattatttttttttgagatggagtcttgctctgttgcccaggctcactgtaacctctgccttgtgggttcaagcagttctctgcctcagcctcctgagtagctggaattacaggcacctgccacaatgcctggctaatttttatatttttagtagagacggggtttcaccatcttggccaggctggttttacactcctgacctcgtgatccacgtgcctcagcctcccaaagtgcagggattacgggtgtgagccaccgcgcccagctagaattacagggttttaacttaaccttagtcactttacatgtttctcccatgtcaaaaatcttgattttcttttgagggaatagaaaagtccactcttaaattaagtccatatggagtctcaagggacccaaataaccaaaacaatcttaaaaaaaagaaacaaaggtggaggactcatacttcctgatttcaaaacttactacaaagctacagtaatcaaaacagtgtgattctagcataaagacagacatataggccgggcgtggtggctcacgtctgtaatcccagcactttgggaggctgaggcaggagttcaagaccagcctaactaacatggagaaaccccgtctctactaaaaatacaaaattagccgggcatggtggcccatgcctgaaattacagctacttgggaggctgaggcaggagaatcgcttgaacccgggaggtggagattgcagtgagccgagattgagccattacactccagcctgagcaacaagagtgaaactctgtctccaaaaaaaataaagacagacatatgaccaattgtacagaatagggagcccataaaaataaaacctttccatatacggctgaatgattttcaacaagggcgccaagaccattcactgggggaaaggacaatcttttcaacaaatggttttgggaaaattgggtatccacatgcaaaagaatgaagttgacccttacctaacactatatacaaaaattaactcaaaatggttcaaatggctggacctggtgactcacatcagtaattcccgcactttgggaagccaaggcgggaagatcacttgagcccaggagtttgaaaccagcctggtcaacatagtgagatcctatctctacaaaagaaaaaaaaaaaaaaaaaaaaaattagctgggcgtgtggtgcatgcctgtagtcccagctactcaggagaatcacttgaacctgggagatagaggttgcagtgagccaagatcgtgccactgcactccggcctggggacagagtgagactccatctcaaaaaaaaagaaagatggttagaaatgccagagacatgaggaagggaggggcattcaggttgggaaaaggatatcacaagggaagttaagttgggcaaaggcatggaagcatgaaacactggtggaggagggagaacccacacacaggccagtgtctctgaaccaggggaagtccagtgcactgagccttgtcaaggaggcttgagtttaatgccagaggctatgggcagtgtctgcaggattttgagcatcataattgctagctcagactgagcagtccctctgtgccaggtactgtctgaagagttttacgttctaaataccatttaaccttctcatactctgcaaagtgagcgttgttagcctcgttttccagatgagaaagctgagcctcaaagaggttcagtaacctgccccaggtcacacagctgagccgtgttcaagcccatgcctgtgtgggcttcaaaagcacaagggaactgccaacccagctgaaaccctgatcctccatgagctcctggggttagggctcaggtgggagatggctgttcttgggggctttgggaatgtggacaaggcccctcaaaggaggggctgttaaggaagcctaaggagaggtactccaggcaaagagaacagcctgcaaagcccactggccaggtgagtttggggcagagcagagttcactgttatggcccaggctgcatggcaggagtgagggggaaggggtgtgggaaatgaaactggtgagcagtgaggatccaaaggaggggagaggctggaggcagggagtcctgggcttggtgacaaagagagtgaggggggtggttcctggatctgactgcctgtgcacagctttggcactagttaggattcccaggaaaccagctcctgctagtcttgggagggggtaatcaacccttctggaatagggggtcgggtccctggggcaagggcttatggagtcactgggctagaggacactggtgtgaccgaggctatagagtttaaggtattgaggcgactggggagaaaggagttttagtcccttgggtgggagtactgggacgactgaggggccctgaggggatgtggtttggtttgaggtgagtggggtcagggtcttggagtgaaccgggaatggaagtatccgggcctgggtgtggggtgatacggctgtcaggggcctggagtcctagtttggagctttctggggtcttgatattggggttatctaaaagagagaaataggacatcctggagttggagtatgggcgtacaggaacctgaggtcatggtgtgactggggtgttgaggtctgccctggggatatggcagaaggtgagcgctccctgctctgccgcttgacctggccatgcccgcagagactgatgagtgccgactgaaccagaacatctgtggccacggagagtgcgtgccgggcccccctgactactcctgccactgcaaccccggaccggtcacatccccagcaccgctactgcgtgggtgagcgcagggcaggcggcgggcatgcaggtgggtggggggggaccccagataacgacgcttcctttgacttttcttggcctacccgttcttctcagatgtgaacgagtgcgaggcagagccctgtggcccggggaggggcatctgcatgaacaccggcggctcctacaattgccactgcaaccgcggctaccgcctgcacgtgggcgccggggggcgctcgtgcgtgggtgagcgccgccagggcggaggcggcctgggtgggacgggctctcctccagaccgccgtgtaatccctccccttgcccgccgcctcctacacccccttcgtggccccttcctcccgcacagacctgaacgaatgcgccaagccccacctgtgcggcgacggcggcttctgcatcaactttcccggtcactacaagtgcaactgctaccccggctaccggctcaaagcctcccggcctcctgtgtgcgaaggtgaggggaccccattcagaccaaagaaggagctccttagctgtctctccacctggggtggggctggggtgcctgcatttttttttttttcccccgagacggagtctcactctgtcgcccaggctggagtgcggtggtgagatctcagctcactgcaaccttcacctcccgggttcaagcgattctcctgcctcagcctcccgagtagctgggattacaggcattcaccaccatacccagctaatttttgtatttttagtatagacggggattcgccatgttggccaggctggtcttgaactcctgacctcaggtaatctgctggccttggcctcccaaagtgctgggattacaggtatgagccaccgggcccgggccaatccaccagtctttcacggtaaaaagaaaaaagaaaccagccaggcatggtggcacattcctgtagtctgaactggggcgtgaaggtcacctgaacctggccaggcacagtggctcacacctgtaatcccagcactttgggaagccaaagtgggcagaacacatgaggtcaggagttcaagagcaaccaacatggagaaaccccaccgtctacttaataaaaaaaaaaaaaatatagccaggcatggtggcatgtgcctgtaatcccagctactcgggaagctgaggcaggaaaatcactgtgaacctgggaggcgaggttgcagtgagtcgaaatcgtgcccctgccccccccagtaggggctacaaaagggattccccgggtaaaaaaaaaaaaaaaaaaaaaagaatgttttcagattgttcgctgctatagtgatttttgtatgttgatcttgcatcctacaaccttgctgaactcattaattttaatagctttcaaagactccataggattttctgtatacaagattatgtcatctgtgaagttttacttaggtgagccaccacgtctggctccatttttaataacataaagaaagaataaattactaggaataaatctaagaaaagaagttcaggccaggtgcagcggcttatgcctataaccctggcactttggagggccaaggcaggagaatggcttgagcccaggagttcaggaccagcctgggcaatacagtgagatcctatctctaaaaaaaaaaaaaaaaaaaaaaaattaaaaatcagctagttgtggtggtgcatgcctaaagtcccatttccttgggaggccgaggcaggtgtattgctcgagtccagtagttcaggctgcagtgagctatgattacggtactgcattccagcctgggcaacagagcaagccattccagatcctgtctcaaaacaaaacaaaactggccgggtgaggtggctcacacctgtaatcccagcactttgggaggctgaggcaggcagatcacatgaggtcaggagtttgagaccagcctggccaacacggcgaaacctcgtctctactaataatacaaaaatgagctgtgcgtggtggcaaggtgcctgtaatcccagctactcaggaggctgaggcaggagaatcgcttgaacctgg

SEQ ID NO: 1272 - protein, 917 aa, Homo sapiens [sequence omitted]

SEQ ID NO: 1273 - DNA, 1369 bp, Homo sapiens
  source
  (1)..(1369)
  CDS (201)..(1169)
acaagaactggatttcaaactggatttgaggacccccaccttttgataggtgacttattctctgcgagtctctgatctctcctctttaaatgaggacagtaaatcccacatggcagggtggtggggagaatcagagatcaaacagctggtgatcacatctggtttctgtttccagggtcatcagactggggtttctgagcatggattcaaccatcccagtcttgggtacagaactgacaccaatcaacggacgtgaggagactccttgctacaagcagaccctgagcttcacggggctgacgtgcatcgtttcccttgtcgcgctgacaggaaacgcggttgtgctctggctcctgggctgccgcatgcgcaggaacgctgtctccatctacatcctcaacctggtcgcggccgacttcctcttccttagcggccacattatatgttcgccgttacgcctcatcaatatccgccatcccatctccaaaatcctcagtcctgtgatgacctttccctactttataggcctaagcatgctgagcgccatcagcaccgagcgctgcctgtccatcctgtggcccatctggtaccactgccgccgccccagatacctgtcatcagtcatgtgtgtcctgctctgggccctgtccctgctgcggagtatcctggagtggatgttctgtgacttcctgtttagtggtgctaattctgtttggtgtgaaacgtcagatttcattacaatcgcgtggctggtttttttatgtgtggttctctgtgggtccagcctggtcctgctggtcaggattctctgtggatcccggaagatgccgctgaccaggctgtacgtgaccatcctcctcacagtgctggtcttcctcctctgtggcctgccctttggcattcagtgggccctgttttccaggatccacctggattggaaagtcttattttgtcatgtgcatctagtttccattttcctgtccgctcttaacagcagtgccaaccccatcatttacttcttcgtgggctcctttaggcagcgtcaaaataggcagaacctgaagctggttctccagagggctctgcaggacacgcctgaggtggatgaaggtggagggtggcttcctcaggaaaccctggagctgtcgggaagcagattggagcagtgaggaagaacctctgccctgtcagacaggactttgagagcaatgctgccctgccacccttgacaattatatgcatttttcttagccttctgcctcagaaatgtctcagtggtccctcaaggtcttcgaatagatgtttatctaacctgacagttgcagttttcacccatggaaagcattagtctgacagtacaatgtttgga

SEQ ID NO: 1274 - protein, 322 aa, Homo sapiens
MDSTIPVLGTELTPINGREETPCYKQTLSFTGLTCIVSLVALTGNAVVLWLLGCRMRRNAVSIYILNLVAADFLFLSGHIICSPLRLINIRHPISKILSPVMTFPYFIGLSMLSAISTERCLSILWPIWYHCRRPRYLSSVMCVLLWALSLLRSILEWMFCDFLFSGANSVWCETSDFITIAWLVFLCVVLCGSSLVLLVRILCGSRKMPLTRLYVTILLTVLVFLLCGLPFGIQWALFSRIHLDWKVLFCHVHLVSIFLSALNSSANPIIYFFVGSFRQRQNRQNLKLVLQRALQDTPEVDEGGGWLPQETLELSGSRLEQ

SEQ ID NO: 1275 - DNA, 2894 bp, Homo sapiens
  source
  (1)..(2894)
  CDS (201)..(324)
  CDS (2261)..(2694)
acaagaagcagccgcaagtactgatggagaagctacagcaggttacccagaagatctagctaagatcattgatgaaggtggctacactaacaacagattttcaatgtagatgaaactgccttctattgaaagaagatgccgggcaggcacggtggctcatgcctgtagcggggtgtactccccctgcgatattgggagtaatgtcgtcctccccaaacctggatgttagcgacgagatcacagaaagggtgtacacaccctgcgacattggaagtaatatgatcctctccccacctggatactgggaaagataccacagcacgggtatacgtttcctacgctgttgggagtaatatcattctcttcctttctggatattagggagactatcccaggggtgctgtacaattacctcgacattgggagaaacatcatcctctattttcctggatattgggcacaaaaacacaaaagggtgtacaacccctgcgatattgggagtaatagcatactctccttccctggatgttagaaaacaatatcataagggctgaacaccccccgcgataatgggagtcatgtttactctttcacaggccatttggaacaatatcacaggggtgtttacaaacaggggtggtgtacacctcctgtgatattgggagtaacatcattctctccacctccggatattaagaacaatatcggggcgggaggtggtacacccccagtgatattgtgaataatgtcatcctctccttccctggatattaggaacaatatcacaggggggtgtacaccttctgtgatatgggaagcaatatcatcctctcccccgctggatattagaaaaaaatatcactcacggtgtacacccactgtgatatgaggagtaatatcttcctagggtattacgaataatttcacagtctgtacacacatggtgtacactcactgtgatattaggagtaatatctacctagtagataacaaataacatcgcagtgtgtacacccactttgatattacctgtaatatttttctaagttgttacaaataagatcacagagtgtacaaacatggtgtacactcactgtgatatcaggagtcgtatctctgtaatatattatgaataatatcacagggtgtacgcccactgtattattaggagtaatatctctgtaggatattacaattaagatcacagggtgtagagcgaccgtgatattaggagcaatatctttctaggatattacaaataatatcacagggtgtacgcccactctgctgtcaggagcaatatctccctaggatatcaaaaatcctatcacagggtgtccaatgtctgccttccaggttctaagggattctcctgcttcagcctcccgagtagctagggttagccgccaccatgcccggctaatgtttttttattttcactggagacggggtttcaccacgttggccaggctgttctggaactcctgacctcaggtgatccatcagcctcggccgcccaaagtgctgggattacaggtgtgagccatggtgctgggccaagagttatagattcaattcatttggaaacacagctcccatttttgagtgtgcatgtacttttatgaagaaatgatgtcagaaaaccgaaggatgataataaatatgaaaaataacaggcatgtgaaaaggtcttccgattgagaactataaggtttgatttcgttttcagataatggggtcctagctcttgtgttgtccttttacatgttctacatcaatggaagttgtagcaccgtgtcagaataaagtagagtgtatttcacggcttcttaatttctttcagttagactgagatctttttcttaaagagagaaggacattgtcattgcattgtattttttctgaaaagagtaggccgtattttactgagatcacggatttgttatatatgacgttttggtcttctaatattcttcagtggattttctctaaagtagtatgtacagaaagccttgtatagcaaaaaagtaaatcacgtaataattctgagatttttggaattgtcataactgagaaacattgctggcggtgtatggtccacaagtgtgaagatgttccttgtgaattgcttgcatccagcattaagggctggtttttatcttttatttttccaatcctctttccttctcaaggtgtccaagacacacagagccatggaatctcacagatgtctgagaattcctcctcctgggactctcagaggatccagaactgcagccggtcctcgctttgctctccctgtccctgtccatgtgtctggtcatggtgctgaggaacctgctcagcatcctggctgtcagctctgtctctcccctccacacccccgtgtacttcttcctctctaaactgtgctgggctgacatcggtttcaccttggccacggttcccaagatggttgtggacatgcagtcgcatagcagagtcatctctcatgcgggctgtctgacgcagatgtctttcttcatcctttttgcatgtatagaaggcatgctcctgacagtgatggcctatgactgctttgtagccatctgtcgccctctgcactacccagtcatcgtgaatcctcacctctgtgtctccttccttttggtgtcctttttccttagcatgttggattcccagctgcacagttgaattgtgttacaattcacaatcatcaagaatgtggaaatctctaattttgtctgtgacccctctcaacttctcaaacttgcctgttctgacagcgtcatcaatagcatattcatatatttcaatagtactatgtttggttttcttcccatttcagggatcctatggtcttactgtaaaatcgtcccctccattctaaggat

SEQ ID NO: 1276 - protein, 185 aa, Homo sapiens
MSSSPNLDVSDEITERVYTPCDIGSNMILSPPGYWERYHSTEDPELQPVLALLSLSLSMCLVMVLRNLLSILAVSSVSPLHTPVYFFLSKLCWADIGFTLATVPKMVVDMQSHSRVISHAGCLTQMSFFILFACIEGMLLTVMAYDCFVAICRPLHYPVIVNPHLCVSFLLVSFFLSMLDSQLHS

SEQ ID NO: 1277 - DNA, 17588 bp, Homo sapiens
  source
  (1)..(17588)
  CDS (201)..(386)
  CDS (660)..(873)
  CDS (2637)..(3270)
  CDS (3360)..(3460)
  CDS (12023)..(12329)
  CDS (17307)..(17388)
  modified_base (6225)..(6324): a, t, c, g, unknown or other
  modified_base (12380)..(12479): a, t, c, g, unknown or other
cagcgtgctgcgccagctgtagctctgggcaaggatggttgccaggatagggcccagccctccagccaggttcatgctggttgacaggatggcccaccaagtgccaaactgagatggctcaaaccactgtggggcagagggcgacacgtaggtgtccagcctactgcccatgttgagggtggggtcaagaggggcccctcatggcctccttcaaggccgtgttcgtgcccgtggactacagcctcatcttcctcctgggcgtgatcggcaacgtcctggtgctggtgatcctggagcggcaccggcagacacgcagttccacggagaccttcctgttccacctggccgtgtccgacctcctgctggtcttcatcttgccctttgccgtggccgagggcagccccagaagctcacattacagggaagagggagagggcgcttctgtttggcagggcagtttcctcctctgccacctgatcccaccactctcagcctcctaaaatatcttgacaagcaataggagctggccaggaactgctcaggaacctgctctgggttgggtgtggaggtggtgggtaagaaagggcgctcccacatgctctttaggcatcctctatgacaatccaaacaggctctttggaagcactcaccttccgcaggaccttcccacatgggggccagcccagcccctgggccaggccattaaggaaccagagggcagcaaagacaggtactgtggagctccaggcaaagaatatgttgaccaggccaaccaggagcagcccagaagagaagagccagcgagcactcatctggtcagacagcaccccactgacaaacttgctgatagcataagctgccgactggctgctggtgatgaaccctgcagggaacattacacttaggggttagggaccaggggagaaacacaggagcaatgaaagaaggcatggggtcaggtgtgcaggggtgcccagtggggtgagacaggttacttcccagaggaacaggaggagcctgtgctgcaatctgacactcatggggccctactacttcggccacttctcctgcctcaccatcggcactagccccagactgacccatgattctcagctacagttgtcagggaacaaaaagggagcaggacgtggcagttccccctgcctgggatttgcatatgggatttcccacctcactctggatgccagtcccgggcctctagcagttctgttgctccaccacccaacatggggcaaagggctcaggattggagtcagggaccttgtccctcctgaagggtagcatgccaggccacatgaagtcgttgtgccaactttttagttcccagtgctcaacagtgtcagtagccagcactcaccctgaagcctccacatgcacccacacaggtgtgaaaaccatgctcagaagcccctcaaacactctcggaataaacagtgcctccagggcatgcacacacacgtcaaataagcagccctccttagccccgcaggcacccatgtccatggatctcagagcttctttatctggcatatgcagagccctggcctctactgtgcagacaatccacccacaccacatgcctgtacacaaacacccagtgtgtctggctggttctgtgtccccaggtccaccaccctgctgtttcagggctcacccaaatcatccttgtccaaagggatctcttccaccaatgatggcatgacaaaggagaaggtcttgcgattgaagtaatacaggctgtagcccccaaacatggctgagaagatcacagtgcgataatagccatagccctgggctgccatggtagaaaagagcaggccctaccagccaagacgcacagcctctgaccacagttcctgcttgccgctctcacagttcccagatctgctgagttgggttttttctgctccctcctccacccagcctcccaggctccctttatagccgccttctggacaatcattaagcctggggaggctccaaggggacccagtgtcctgagggagacaagaaaacaagagattactgagcgccaaactgtagggggtggaggaggtcccggaaggaggcatgcctgtgagccaggccagcaccctgtgtccccaggatttctgcctttacctcctctatcatgtctgcttgcctgtgaaaccagctttgattaaaggttcaacctaattacttttgtctgcctgagcccaggggaggcaggggtgggatgagcagagatgccctctctagcctgctccctcagtcacagaaccttctcattcattcacggaagtttattaacttactagttgacaggcactgcacttggcactattagtttctacacccactcaccaccaccgcaccaaaacacaaagtcagacacataccccggctaccccacttctaagccttctagagagggcctcaatccgtggaactctcaatacttagcacataatagatttaattgtttcctacagttgccccttgtaattctgtgcaagggggacctcccccagttcaggtcccacggtgtcaacacagaaagccccgctaagggctgaggtcctgatggggccccacagagctacctctgggtccccattaccctgcgacgtcagtctgggcttccttcgggctagctgggggctgcagggtctggtttccaacctgtgggacgttggcaggggccgcaagcagagggactgggcagctcgtgggcgggaaggtgccccggcgggcttcgggctgcagggcacaaccgtcccgcccagggccccggcaacatgccccggcttttccgctcaattgggaaagcaactggagcagaaggcgtaggcgcacgcggagcgggcgaccgcacgtattctcccggaggccccgcgcttctggcacccagaggctcagcctggtaggggagggccaggcggcgggcgggagaggaggagaggcggcgggcggcgaagaggcggcgggctcgtggcacctgcccagccccgtgggtcctcacgctacccaggacacgctactgtgcggctgggaaccacgggggccgggggtgcaggagctggagaggtgcggagaccacaggactggcgcgatagaaaggggtctcgtgctggtggtcagggacagcgcctcggtggccccaagacccatgaattgtctctggaactgcaggaacagctccgggtcgtatcggaagttggggttcgccaacaatggctccccaagacctgagatccccgccctcaggtgactcccctcccccgcataccgcctcctacctgaacagaggcgggagcccgaataggacggggcggggctagcgaaggctgcgcaagcgcggccggcgggggcgtggtcttcgcctgctgcttcgcttgccggccagtggagttccccgccccacatgccggggacgtcgacttactccctcccgctggtcacgctgctccttggacgaacgagcatagcgccccttaggggctgggcacggcatgtccaattcttaagtggttgcattcaacaaaccagtttttagtgagtgccctcctctacaaaacacaccgaacactaaggtgataatcattgttcccaagttgctcacagtctgggaaaggtgttgtaggaacacacagtatttctttttttctttttttttttttttgagacagtctcgctcagtcgcccaggctggagtgcagtggcgcgatttcggctcactgcaagctcctcctcccgggttcacaccattctcctgcctcagcctcccgagtagctgggactacgggcgcccaccaccacgcccgggtaattttttgtatttttagtagagacggggtttcaccgtgtttgccaggatggtctcgatctcctgacctcgtgatccgctcacctcggcctcccaaagtgctgggattacaggcgtgagcaccgcgcccagcccacaatttggaatttaacttgtggttagattgttggggacagagacggggcctggagtaaatatcaaattctagtcctagacccacagcattctaactgtatgaccttggttaatctctatgagctcccgtttcctaccagcctggtagatcattgtgaagactcaacagatgatttagataagagctcagaaattctataagagttctcaacaacaatggttttcactgatcccagttaagagttgtgaggagtaacagtagtgatgctattttacaacaatgatgactgtgttctcagaaacagagcaaatgttaaccctgcccatagcttcaacagaaggtaacatagcctaacaaagtccccaacagtcccaatcagccagcacttcccgacctctccccaatagaaacgatattataaaagcctcagcttgtaagcgatcagggtctcagccagactcctgactggaactccttgcaggcttattcctgtgaataaacctgtttggccgttgagttgcctcctgtctctcgctctcttcccttatatcttcctaacaagagtggctgaaggaattgtaagtgttccaaaattgagagcaaagatcttttactccagagaagatggtcagggaagggaggaggaggagatgagataaaataggatgacaggccggacgcgatggctcatgcttgtaatcccagcacattgggaggccaaggcgggcagatcacttgaagtcaggagttcgagaccagcctggccaacatggtgaaaccctgtctctactaaaaataccaaaattagccaggcttggtggcacacgcctgtaatcccagttactggggaggctgaggcaggagaatttcttggacctgggaagcagaggttgcagtgaggccgagatcgtgccactgcactccagcctgggtgacagagcccgagagcctgtctcaaaaaaaaaaaaaaaaaaaattaaacgggtataaaacctgtctcacaaccatctgatctttgacaaacctgacaaaaacaagaaatggggaaaggattccctatttgataaatggtgctgggaaaactggctagccatatgtagaaagcggaaactggatcccttccttacaccttatacaaaaattaattcaagatggattaaagacataaatgttagatctaaaactataaaaaccctagaagaaaacctagacaataccattcaggacataggcatgggcaaggacttcatgactaaaacatcaaaagcaatggcaacaaaagccaaaatagacaaatgggatctaattaaactaaagagcttctgcacagcaaagaagctaccatcagagtgaacaggcaacctacagaatgggagaaaatttttgcaatctacccatctgacaaagggctaatatccagaatctacaaagaacttaaacaaatttacaagaaaaaaaccccatcaaaaagtgggccaaggatatgaacagacacttctcaaaagaagacatttatgcagccaacagacatgaaaaatgctcatcatcactggctatcagagaaatgcaaatcaaaaccacaatgagataccatctcacaccagttagaatggcggtcattaaaaagtcaggaaacaacagatgctggagggcatgagccactgtgcctggtcgatggtgtttatttgtttgtttgtttgtttgtttgtttttgagacagagtcttgctctgtcggccaggctgaagtgcagtggcaggatctcggctcactgcaacctctgcctcccgggctcaagccattctcctgcctgagcctcctgagtagctgggattacaagcatgtgccaccacgcccagctaatttttgtatttttagtagagacagggtttcaccctattggccaggctggtctcgaactcctgacctcaggtaatccgcccacctcggtctcccaaagtgctaggattacaggcgtgagccactgcgcccggtctgttttttttttttgtttgtttgtttgtttgtttgtttttgagacaggcttgctctgttgcccaggctggagtgcaatggtatcttagctcactctaacctcaaattcctgagcattgagcgatcctcccaagtagctaagactacaggaccaggccacctgggttcaagcgattcttctgcctcagcttcctgagtagttggtattataggtgcccgcaaacacgcctggctaatttttgtatttttagtacagacaggtttcnnnnnnnnnnnnnnnnnnnnnnnnnnnnnnnnnnnnnnnnnnnnnnnnnnnnnnnnnnnnnnnnnnnnnnnnnnnnnnnnnnnnnnnnnnnnnnnnnnnnttgagaaggagtctcactctgttgcccaggctggagtgtaatggcatgatctcttctcactgcaacctccgcctctcaggttcaagtgattctcccgcctcagcctcccgagtagctgggattataagcacccaccatcatgtccagctaatttttgtatttttgtagagacagggtttcaccatgttggccaggcttggtcttgaactcctgacctcaggcgatcttgctttggcctcccaaagtgctgggattacaggcatgagccaccatgcttggccaataacccaatctttactcaatattaccattgtgcattattgcacataattagtgtattggtttagtatctttacatctagactgaaaactgtgaggaaccatttgggtttctttgctgtatccctaacacctggcaagggcctggtatagtgaaaatgcgtaacaaataattgttgaagtctaggcacggtggctcacacctgtaatcccaacactttgagaggctgacgtgggtggatcacttgacctcagggagggtacaagaccagcctgggcaacatggtgaaaccccatctctactaaaaatacaaaaattagcaggacgtgatggcacatgcctgtggtcccagctactcaggagactgaggcagcagaattgcttgaacctgggaggtggaggttgcagtgagccgggattgcgatcctgcctaaaaaaagaaaaataacaaaataattgataagtgaaaactaggtgcaagtataggagttgagagcaaagtgggcaaaggcagattttttcttagtaaacgctgtattgttttgtactttctttctgatctgctgcattttgggatccacttgcaacttaaacctgatgttggccaggtgtggtggctcacacctgtaatctagtactgttggaggccgaggcgagtggattgccagagctcaggagtttgagaccagcctgggccacatgatgaaacttcgtctttagtaaaatacaaaaattagccagatacggtggtgcacgcctgcagtcccagctgcttgggaggctgaggcaggagaatcgcttgaacctgggaggcggaagttgcaatgggatgagattgctccattgcactccagcctgggcaacagggtgagactccatctcaaaaaacaaaaacaaagcaaaaaaatccctgatgttaacaagaatgtgcacagcgataaggctgtatacgaagtgcagatgatggggacaaattgaggccaaatcagatgaaagcagagcttgggactcaggacccctccttcctgggagctgaatagactcgggtggcaggaaagaggctctggctgccggatagctctgggtgggcccagagcaaatgacctgacctggtccccctcacccactcctgcagtggctatcacttagaaatcagcatccaggctgggtgcggtggccacgcctgcaatcccagcgctttaggaggccgaggcaggtggatcacctgaggtcaggagtttgagaccagcctgaacaatacggtgaaaccccatctctactaaaaatacaaaaaattagccgatgtggtggcgggcgtctgtaatcccagctactcgggaggctgaggcaggagaactgcttgaacccaggaggtggaggattgcttgagtccaggagttcaaggctgcacatgaactgtgattgtgccactgaagggccctatctcaaagacaaaacgaaaaataaataaaaatttaaatgaggaggcgggagctacatcagattggagttaccagcaaggaaagcagggaggaaaaatgaaaaagtgagactacctcaaccctggtcagttgcagagacctgggagccctctggacaagggagccactctctcaagagtgaagcaccacccactgccacttcaagacaggagttatgcccagcccaggtgggcagtggtggccttgaaggcagagctttgtttctgtgcaggcctgttgggcaggagggaagagcggagagggagtgagatctggcatcgtctctaagcactgagtgtctgtgggatccctaaacagccctgaacctcactcattccttccttgtcctcaggcttctccctattccccacagatctaaggctgccagctgtccctgccctgaggctgtcccctgcaaccagggaggccacagccccccagctgggacctgcagcctcaaggactcttattccacaagtagcttttcctgagggtgtgctggagacaaacagcatggcgaagggtaatgaaactcaggccctatttttcttttgagacgaagtctccctctgtcactcaggctggagtgcagtggcgtgatctctgctcactgcaacctccacctcctgggttcaagtgatcttcctgcctcagtccccgagtagctgggattacaggcttgtgccccacgcctggctaatgtatttttagtagagacggggtttcgccacgttgaccaggctggtctccaactcatgacctcaggtgatccgcctgccttggcatcccaaagtgccaggatgacaggcatgaaccactgtgcccggcctgagagaggaagatttttctacagaagtatttcagctaataagctaagaaaatagaaaattagggccaggcacagtggcttacacctgtcatcccagcactttgggagcccaggagtttaagaccagccttggcaacatagggagacctcatctctaaaagaaataaaaattttaaaaagttagaaaattaggaatatgattcctaatacatttttaaaaattttggatgtgatttttttttttttggagacggagtcttgctgtcgcccaggctggagtgcagtggttagatctcagctcactgcaacctccgcttcctgggttcaaagtgattcttctgtctcagcctcctgagtagctgggattacaggtgtgcgccaccatgcctggctaaattttgtatttttagtagagatagggtttcaccatgttggtcaggctggtctcaaactcctgacctcaggtgatccacccgcctcggcctcccaaagtgccaggattacaggcgtaaaactcccatgctgggctggtcaaagtgctgggattacaggcataagacaacgcacctggaacttggcttgtgtcaaatggaactcaacatcttcccttttactaaaccccacccaacattcactgcgcacaagttgtcttattcactggacttctaatatgtttaaggggtctgtccccatttattttttgaaacggggtctttctgtgttgcccaggctggagtgcagtggttgttcacaggtgccaacctactattgatcagcatgggagctttggggttttaaaacaaattttttaagccagtcatatttagcagtggggggttgtataccaactttagtgacactaatgttattaaattctaataacccactaccatcagaccagcccagcttgggagttttgacctgctccatttccgacctgggctgtttcacccctccatagacaacctggatagtcccctgtcctgggaggtcaccatgttgaagctgaacttagtgtggacacccaaactgcataatgcattacagtctagaactcctgggctcaagggatcctcccacctcagcctcctgagtagctaggaccacagggtgcaccaccgcgcccagctgtcttcctttttttttctgagaccgagcctcactcagctgtccaagctagagtgcagtggtgtgatctccattcactgcaaccactgtctccctggttcaagcgattctcctgtctcagcctcctgagtagctgggattacaggaacctaccatcatgcccggctaatttttgtattttagtagagatggggttttactatgttggccaagctagtcttgaactcccgacctcaggtgatctgcccaccttggcctcccaaagtgctaggattataggcatgagccaccacgcccagccccctacccttaaaaaaattatatatatatataatagagacagggttgcgctatgttgcccaggctggtcttgaactcctgggctcaagggatcctcctgccttggcctcaaaagtgctggaattacaggcatgggccactgcacccagcctatcttacattttttttaaactcagagcatacctcatttcaattttcctcctctcttgcttgggttcatgtaaaatctttctaactggtttccaagtgtctgctctattatgctccgtatatcctccatactctagtctgctcctacgaacttcagcatcttcggcccctctgcctggaatttacatctttccaatcctgcctcacaaattttctattatataaggctccgaaatatgaactagaagtaatttccgtgaagctgatgactttatctggcatatggtaagctctgaatcaatgtttattgaaagaatgaaatgtcaccccctttgtgaagccttccagagagtgtcccctggaggaaattatttttccaaatcccaggtgccctttgctctatcccgtgccatctcaattttgtgttagatagatccagttggaaacacccattagttggaaagacattggctccggaccaccggtgggtctatagccctgtaatacccccgccacattttggggggcccgaggcaggcgggattacaaaagtccagggatatctaagacatatctcctggctataccaccggtgtgaacacccgtcttttacattaaaatagccaaaaaaaattagccaggcatggtggtgggcacctgtagtcccagctacatcaggaggtgaggcaagagaatggggtgaacccaggaggcggagtttgcagtgagccgagatcgcgccactgcattccagcctggatgacacagcgagactctgtctcaaaaaaaaaaaaaaaaaaaaaggctcctcaagtgcagggattgtgttctattcatgcccgactcttaattaacagatggcggctctctatgtacacttgtcaaattaagtagaaaacatcaaaacccaggcaccctgaggttaagatgccctttagtggtgggagttagtgcatggaaggagcccaggaagcatgcagctaacagcctgctaattagtagtatcaagctaccaaatgggctcatgggtagctttccttaaaaattgtaaaaaaatgggccgggcatggtggctcacgcctgtaatcccagcactttgggaggccaaggcgggtggatcacgaggtccagagtttgagaccagcctgaccaacatggtgaaaccgtgtctctactaaaaatacaaaaattagccaggcatgctggcgcacacctgtaatcccagctactcaggaagctgacgcaagagaatcgcttgaacccagaggcagaggttgcaatgagctgagattgcaccattgcactccggcctgagtgacagagcgggacttcatctcaaaaaaaaaaattgtacaaaatttcctttattaaaaattgtagctccctctctctctccctctccccctccccctccctctccacggtctccctctgatgccaccaaagttatgaaggccgaggctggactgtactgccgccatctcggctcactgcaacctccctgcctgattctcctgcctcagcctgcagagtgcctgggattgcaggcgcgtgccgccacgcctgactggtttttgcattttttggtggagacagggtttcgccgtgttgaccgggctggtctccagctcctgaccgcgagtgatctgcctgcctcggccccccgagatgccgggattgcagacggagtctcgctcactcagtgctcaatgttgcccaggctggagtgcagtgacgtgatctcggctcgctacaacctccacctcccagccgcctgccttggcctcccaaagtgccgagattgcaacctctgcccggccgccaccccgtctgggaagtgaggagcgtctctgcctggccgcccatcgtctggatgtgaggagccccnnnnnnnnnnnnnnnnnnnnnnnnnnnnnnnnnnnnnnnnnnnnnnnnnnnnnnnnnnnnnnnnnnnnnnnnnnnnnnnnnnnnnnnnnnnnnnnnnnnngcctgaacatacggtgaaacccatctctataaaaatacaaaaaattagccgatgtggtggcgggcgtctgtaatcccagctactcgggaggctgaggcaggagaactgcttgaacccaggaggtggaggattgcttgagtccaggagttcaaggctgcacatgaactgtgattgtgccactgaagggccctatctcaaagacaaaacgaaaaataaataaaaatttaaatgaggaggcgggagctacatcagattggagttaccagcaaggaaagcagggaggaaaaatgaaaaagtgagactacctcaaccctggtcagttgcagagacctgggagccctctggacaagggagccactctctcaagagtgaagcaccacccactgccacttcaagacaggagttatgcccagcccaggtgggcagtggtggccttgaaggcagagctttgtttctgtgcaggcctgttgggcaggagggaagagcggagagggaagttgagatctggcatcgtctctaagcactgagtgtctgtgggatccctaaacagccctgaacctcactcattccttccttgtcctcaggcttctccctattccccacagatctaaggctgccagctgtccctgccctgaggctgtcccctgcaaccagggaggccacagccccccagctgggacctgcagcctcaaggactcttattccacaagtagcttttcctgagggtgtgctggagacaaacagcatggcgaagggtaatgaaactcaggccctatttttcttttgagacgaagtctccctctgtcactcaggctggagtgcagtggcgtgatctctgctcactgcaacctccacctcctgggttcaagtgatcttcctgcctcagtccccgagtagctgggattacaggcttgtgccccacgcctggctaatgtatttttagtagagacggggtttcaccacgttgaccaggctggtctccaactcatgacctcaggtgatccgcctgccttggcatcccaaagtgccaggatgacaggcatgaaccactgtgcccggcctgagagaggaagatttttctacagaagtatttcagctaataagctaagaaaatagaaaattagggccaggcacagtggcttacacctgtcatcccagcactttgggagcccaggagtttaagaccagccttggcaacatagggagacctcatctctaaaagaaataaaaattttaaaaagttagaaaattaggaatatgattcctaatacatttttaaaaattttggatgtgattttttttttttttgagacggagtcttgctctgtcgcccaggctggagtgcagtggcacgatctcagctcactgtaagctccgcctctcaggttcatgccattctcctgcctcagcctcccaagcagctgggactacaggcgcccgccaccacgcccagctaattttctatatttttagtagagacagggttttaccgtgttagccaggatggtctcgatctcctgaccttgtgatccgcccacctcggcctcccaaagtgctgggattacaggcttgagccactgcgcccggcctggatgtgatgattgtatcatgttcagtctttttagagaaaagaaatgatgtctagaaattgattcaaaataatccagggaggccaaggcaggtggatcacttgaggtcaggagttcaagaccagcttgggcaacatggtgaaaccctctattaaaaatacagaaattagctgggcgtgttggcgctcacctgtaattccaactacatggtaggctgaggcaggagaattgcttgaacccgggaggcggaggttgcagtgagccacagatcacaccattgcactccaacctgggcaaacaagagcgagaaatcccgtttccaaaaaaaaaaaaaaaagaaaattagagatggtatcaacatgggagaggtaacttgataaattaacactgaggaatttacttggtaaagggggataatataaattttgaaagcttaaggaattgacagaaaaataaacataagaataggtcttaatcattaaagagtaaccaccagaataatcccagctgccatgcttggctaattttttatttttattttttgtagagatgggggtctcactattgttgcccagactggtctcgagctcttgggctcaagtaatcctctcgcctcagcctcccatagtgctgggattacaggcgtgagcaaccacgcccagccatgtgagagttttaattcctctacagcctcatcaacactagttttctttttttttcttttttcttttcatttatttatttatttatttatttatttatttatttatttattttgagacagagtctggctctgttgccaggctggagtgcagtggcgagatcttggctcactgcaacctcctcctcctgggttcaagtgattctcttgcctcagcctcccatgtagctgggattacaggcgtgtgccaccacacccggctaatttttgtatttttagtagagatggggtttcaccatattggccagactggtcttgaactcctgacctcaggtaatccgcccgcctcggcctcccaaagtgttgggattacaggtgtgagctactgcgcccagccaatttgtgtatttttagtagagacagagttttgccatgttggccaggctggtctcaaactcctggcctcaagtgatccacccactttggcctccgaaagtgctgggattacagatgtgaaccactgcccccggcctacagagagcagttttattaatcaaatgctaacagttgagatatggccagactcatgcctttaaaagactgttccagctttttgggctcagtgaagagatttcataagaaaaacttggcatgggaaacatatgggagtggtacaggagggtatctatgtgtcttgttccgatagctctcttgagtaatttcttgtctggaagcccagttggcatcatcttgacttctacctggtggttttggattaattggtcgtgactccccctaaacaggaggattcggtagctgaaggggtgggttgctcctccacacctgtgggtgttccttgttaggtggaacgagagacttggaaaagaaagagacacagacaaagtacagagaaagaaatcgggggaccaggggaccggcgctcagcatatggaggatcccgccggcctctgagttcccttagtatttattgatcattattgggtgtttctcggagagggggatgtggcaggatcataagataatagtggagagaaggtcagcaggtaaacacgtgaacaaagttctctgcatcataaacaaggtaaagaattaagtgctgtgctttagatatgtatacacataaacatctcaatgccttacagagcagtattgctgcccgcatgtcccacctgcagccctaaggcagtttccccctatctcagtagatggaatatacaatcgggttttacatcgagacattccattgcccagggacgagcaggagacagatgccttcctcttgtctcaactgcaacgaggcgttccttcctcttttactaatcctcctcagcacagaccctttacgggtgtcgggctgggggacggtcaggtctttcccttcccacgaggccatatctcaggctatcacatggggagaaaccttggacagtacctggctttcctaggcaggggtccctgcggccttccgcagtgttttgtgtccctgggtacttgagattccttcaagcatttgtttagcaaagcacatcttgcacagcccttaatccatttaaccctgagttgacacagcacatgtctcagggagcacagggttgggggtggggttacagattaaaatggagtctcttatgtctactttctatacagacacattaccaatctgatctctctttcttttccccacaggtagctgggtctttattcctggcttgtttcaaaattagcccctggctgaacaggatggctcatgcttgtaatcccaacactgggaggcacaggcaggaggattttttttttttttttgagatggagtcttgctctgtcacccaggctggagtgcagtgagtgatctccgcttgctgcaagctccgcctcccgagttcatgccattctcctgcctcaccttcccaagtagctgggactacaggcacctgccaccatgcccggctaatttttttgtatttttagtagagatggggtttcaccgtgttagacaggatggtctcgatctcctgacctggtgatctgcctgcctcggcctcccaaagtgctaggatttcaggcatgagccactgcgcccagccccactacgcccagctattttttgtatttttagtagaaatggggttttgccatgttggccaggctggtcttgacctgaggtatcctgactgggattacaggcgtgagccactgggcctggctatttgttttttttgagagaagtcttgctcttatcccccaggtttgagtgcaatggcttgatctccactcactgcaacctctgcctcccaggttcaaatgattctcctgcctctgcttcccaaatagctgggattaaatcgcctgccaccaagcccggctaatttttgtattttttagtagagactgggtttcaccatgttggccaggctggtctcgaactgctgacttcaggtgatccgcccgcctcggcctcccaaagtgctgggattacaggtgtgagccactgcgcccggccgggcctggctattttttatttttatttttgaggcagagtctcgctctgttgcccaggctggagtgcagtggcatgacctcagctcactgcaacttctgcctcctgggttcaagtaattctcaagcctcagcctcctaagtagctgggactacgggcacacaccaccagcacccggctaatttttgtattttagtagacatgggtttcgccatgttgcccagggtggtctcaaacttcagagctcaggcaatccactcacctcggcttcccaaagtgctaggattacagatgtgagccaccatccctggccaaaataaatattttaaaaatatttggta

SEQ ID NO: 1278 - protein, 507 aa, Homo sapiens [sequence omitted]

SEQ ID NO: 1279 - DNA, 27087 bp, Homo sapiens
  source
  (1)..(27087)
  CDS (201)..(498)
  CDS (834)..(923)
  CDS (7389)..(7511)
  CDS (10905)..(11021)
  CDS (13053)..(13140)
  CDS (19148)..(19452)
  CDS (26643)..(26887)
tgacctgtaaccatgggaacggtgggtgccagcactcctgtgacgatacagccgatggcccagagtgcagctgccatccacagtacaagatgcacacagatgggaggagctgccttggtgagtggcaaccccaacactgagtgagggtctgcaccagcctgcctgtccctacccctaccccttaatggtgtttagcacagatgcaggctgtttcctgtgcatttgcccccccagcaggccctgtgctgcttcgcatgctacagtgggagtggtctaggcctgtggggaaggcccctctctccctgtgtgaccttgggaagcccttcctcctctcctggactaggctgctcctaacgctggtattccagagactggcacaacacctcccaggaggccagggcagcacgaagttagagctgtttataatgatgcggcacttctggccagcaggagccagggccgtatatttctggcgggatgcctgccttgcccttcacggtgtgtccttcactagctccattttagaggtttccaggcccaaggctctttttctcctcgactcaggggactgaagcttgcattccctagtgtctctttggtcagtgcaatatacctccaaaatcttttccatgtttaatgtttgctaaggatctgtggccctttaacgggctgtgtctcccacagagcctcattacaacacatttttattgcgtgaacagagtcacatatctttcattcctcttatgtctgggatttcagcaaacacagttgtatggggatgagcaatctaactcattcagtctgagaaccgtgctcttttgcttctcttgtagagcgagaggacactgtcctggaggtgacagagagcaacaccacatcagtggtggatggggataaacgggtgaaacggcggctgctcatgggtaggcaccttcactccctttccttggccactgcaattgtccttttccctccccaacttattgcatcagacctgaacttgggagccacatgccctcagaccagctggactggggtgagcagctcctgtgaaccagggtgtgtgtctgttcttcaccagtgctgttgcttaatcaccaaccaagcaagacccttggtctcgtgtccatcagaataatcaggttaacgtcccaatgcagcccccacctagctgtaagacttggcaaactgccctgaggctctgtctcttggtctttctttgaaatggatgtaataaagtctacctcttagggccagggtattcgcccattttcatactgctgtaaagaactgcctgagactgggtaattgataaagaaagaggcttaattgactcacagttccacatggctggggaggcctcaggaaacttataatcatggtggaaggcaaaggggaagcaaggtaccttcttcacaaggtggcaggaaggagaataaatgcaggaggaactaccaaacacttgtaaaaccatgagatctcatgatctcactctatcatgagaacagcatgggaaccgcccccataatccaatcacctccacctggtctctcccttgacacgaggggattatggggattataattcaggatgagatttgagtggggacataaagcctggccatatcagttgggatgctcaattaaaataataatatggaaaggtgcccagagtccagtgcctgggactgagtgggtggtcagtgaagtcagctgtcttcctctgaagcagcctctagctcagaatggcagctagtctttttttgtgtccactgagtcttctatttctgactcagctgatgataatagtagaagagatgaatggagaggggcaacacttggctgtgggacaagggaagacctgcctgaaggtccagcggtcaagctggagatgagcagaaatagaggtggtcatgggggtgggagtcagacagatcctttggtgcgttactccttctggagaaagtctggctcaacctaaacaaaacccatcttttgacagtttctggatttaacagtcaggcaacatatcatacagccattggttaccaagcaggtaacctttccgagctcttttctgctctttagaaattataaattttcattgtcttaagtgaaaatagtacaaatgagtaacataaacgcttaattacttctaggcttgtaatgaaactcatcatttccttgtctcataacttcccatttcctcatcccatttgccagaggcaacaatagtcaattcttcgagctgtttcttcttctggctcctcctcccccatatttctgaaaaaaatgaagggtatacagttatttttttcttcttttcttttcttttttttttttttttaagacagagtctcactctgttgcccccaggctggggtgctgtggtgtgatcatatctcactgcaacctccgcctcccaggctcaagcgattctctcacctcagcttcctgagtagctggactacaggcatgtgccactgcgcctggctaatatttgtattttttgtagagacagggttttgccctgttgcccaggctggtctcgaactcctgggctctagcgatctgcctaccttggcctcccaaagtgtttggattacacgtgtgagccttcatgcctggccctacagttacttcttgatgtgtctgttttagatggtagcttttaacttcctattatgaaagactaggatttagctctcactgcttccccccgcaatacacacacacacacacctgacctctccctatacccttaatattgttgtctcacaatttaaatcaatattatgtgcttacattattctgactttgaatatctaaatacgattcacctgagtcatgtaacgtgctatgattatattttctttgtttgcttagttttctaagtacctcttaccaattcttttgcaaatttcagacaaagctgtaaaatacttttcaatgtgttcaaatatagtgtaggtaactaatcaaatcaattttcttggtgaaaaagtttcctcggaggcttccagcctgccctagcagggcctggctgtcttggctgagtgcatgtctctcatctgggcattcaccatcagcctacaattccctttgccgctctcctgttgggtggatcctatgtcttgtctctcattagtttatccggcgaatgagatagaggtatttaaaaatttgcatgcctgaaaatgcctttatattctacctgcaccctttattgagaatttggctcagtgtagaattcagagttggaaagaattttccatcactgttttgaagttagtgctccattgttttcaagaatgcagagttgttttgagaagtctaaaatcatttttattcttgatcctttgtgtgaaacctgtgaaagcttctctctgaaagcttccaggatcttctcctccttcccagtgatctgaagttttacaataatgttccttattgtgggattttgcccacctatttttagtacttttcaatatgaacattcaagtccctttgttctgagaaattttcttacattcttttctttgataaatttctttttctttcttttttttgagacagagtcttgttctgtcgcccaggctggagtccagtggtgcaatcttggttcactacaacctccacctcccaggttcaagtgactttcctgcctcagcctccccagtagctgagactacaggcacatgccaccatgcctggctaatttttttttttgtatttttagtagaaaagggattttgctatgttggccaggctggtctcaacctcctggcctatgtgacccacctgtctcgtcctctcaaagtgctgggattacaggcatgagccaccgcacccgtcttctttgataaatttcttcactccattttctctgttctttccctccggaactcctgttagctggctgtggtaactcctggattgaccccctaatttttttttttttcttttctctcccttgtatttttattctttttcttttctctcctttgtatttttgttctactttctaggagagttttcatttttttcttctaatctttgcacaggataaagttttcgttttcatgttttaatttttcaggcattttactttggcctttggttttaggaacctgctcttatttcatggatgcttttcttgtccccctgaggaaattaattacgagattttaactcctcttctgttctctagattatctttgtttcctccaggtttctttttccccgttggtttgatctggtatattcattccgtattagaggctttccagaaatgtctagtgattcttgaccgacttttcatatttaacagtaaaatactaaaaagccaattggatattctattgatttgtgggcttcatgtttgggtgacgaggcagtgacatagccatttcatctggagatcctcgaatgctaatatcgttaggtctttttgcttgggcaggtcaatttagccggagaggagtccttcaaccacctgcctgtaggcttggctgctagcatcctgggttgcagtgttgtttcaacatagctttttggaactttcaatggctgttattttaacatagcttttggaattttcaatggctttaaatctgccagtagggagctgaaggagttgggggaagagggatgagggttagagatctctttttcagggtatagactttcacctgatggtgacaccctctcctcctctgctattcctggtgcccttgagcctggtacctctctggtccagacttctctgctatagccagaataggagaagggtagtcacatgactatgtggagttaaggaggagctctggggtttatctctttcatatgtagactctccataatcttcctgttcttaactccgtcctcatttctgcctctagaataacttgatacctccaattcctgagtctttctgggactctggggctcacaggagtttaccagctgttggcaccccctctgcagactgctaggatctagctttcttctacgccagatactgctctcctgctaacatgtcacttccagaatgtttgacatcttttatctattgtcttttctcctattttctttgtccttaaggatttatactttaaaaaatcaattgattctcatattcgtgaggttttgaaaggaacagagataaacatacatgtactatctgcatatttaattaggattaagcttgttccctttagggttccttctttttttttttttttcttttcttttcttgagacagggtctcgctgtattgctcaggctggagtgcagtggcacaaacatggctcactgcacccttgacctcctgggctcaagtgatcttcctgcttcagcctcccgagtagctgggaccacaggtgtgcgtcaccaggcctcgctaattttttaaaatttgtgtagagatgggggtctcaccacgtggcccaggctggtcttgaacccctgggctcaggtgatcctcctgcctcagcctcccaaagtgttgggattacaggggtaagccaccaccctcgccaccaccccccacccccagcctttaaagtgaggtagctatggtagaaaaatcatgtttctgggtgcctagatgctaacaattcaatgaatgttgaatagcacttgtctattacttggactaactgtatgagatacagaactagaaggctgtttgcttattgttcctcatctccattgttgcaatttaacaattgtggcttatttttcacgtggttatgacagggctttctcctttcagggaaagtgaaacttcaaatttgagtaaattggcagttgcaaggatgaagtcagtagtctacaacaaggcagtggttggggcggcgatgcttacccactcttgctttgcccattactcatatcgaaaggagaaggttcaagattaagaaaggaccatcccctttgccctgttctgcactcacctctagcctgccagatgtggtcctacttaggttgctggctgcagatcagcaggaactttcagtggctttaaatttgccagtagggggagtggctctgcagattgggagacatctttatccctctggtcaccctgacagtcttcctcagaaactagaactcatttaggggggtgggaggagctgcacctgctctccctctagcccatctgcaggtagcagagacttggggtatgaccatgagtaccccaccatgcttcttggcttctgtgaccttcgtcagctgtatcagcacttctttgggaagctaattgtcttttcttacctccttgccagaaacgtgtgctgtcaacaatggaggctgtgaccgcacctgtaaggatacttcgacaggtgtccactgcagttgtcctgttggattcactctccagttggatgggaagacatgtaaaggtagccttcacctccccagggagactggatgccctgttatggagggagggcccatgccgctaacatatggggataaaggcaacataccctccataccccacgtgactcgagatttgcttatgattcatatcaatgggagctttttccccctgggctagtggaaggttataactgagtaagcttaattagaaccaacacttaattacactaattgttgaggaggtcagcctctacaagcatcaaataattcatttcagacagtggccttattagaaaaaggcagttaaaggaagcattcatttgcaggagataatatcaacatatcatacataatagcctagagattattatataaataacagtcaagatgattatccagaggacttaatgaataactgtaccattaacttttactgatgaagagcgaccccaatgacttgctcatatttcatgggcaagagtacaaaggattagccctttagcatgataaaaagtagataaccaattgccagacgaaactgggaaaagataagattgagtatcaggaatcattttaaaacattgaggctatttgatcattgtgtaatttgccaaaacaaatgctctagtcctttatagctttaatcattaaacttgaatacatagtgtactaaagagacccatcttaccttgagagagcaatacaaagatgagaatataacaggacgtcatcattctttcccagagtttgtttccttaatgccaatcaagggcatcataagtcagcgttctcaagacgatgaaacacttgtctttcaaaactggttaagccagataagaaaacatgtataaggttaaaaacatcagcaaacattcttaaatgcttttgtgagtctttttcttaatttcagagactaatgaacacacacaatggcccttcagggagttgtgggaaatgaggcaagtattgctctctgatatgcccaatgctttcctgttgcagatattgatgagtgccagacccgcaatggaggttgtgatcatttctgcaaaaacatcgtgggcagttttgactgcggctgcaagaaaggatttaaattattaacagatgagaagtcttgccaaggtatgtgctgaaaacatagctgtgctgcgcaatggcccacaggttggagcagagagaacgtagcaccctcctggcagagactggcttatcaggcttcttgacagggccactaatccaatctccttcctaggcttcactcatttcatctattaggtaaaataaaaacactgatgtagctcacaggtgtatttggaaattaagctgttaatggttagagaacaccttaaagaacccatcgatgtgatgacagcagagctcactgctagaaatggaatggaaaacagaatgcaaatggggttccagtggggtgttgagattatgaataattttccttttctaaaatttcctttaatgttattgaatttatcacaaaagttggtggcaaagtctgtagatttagttaacatacctccctagcaaaaacttggagttaacccatgatcaagattatgtaccaattggtctctttcttatagcacttgtttttttaattttttaattatttatttatttacagacagagtctcactctgttgcccaggctggagtgcagtggcatcatcttggttcactgcaacctccgccttcctgggttctagcaattctcctgcctcagcctcccgagtagctgggattacaggcatctgccaccatgctcagctaatttctgaatttttttttttttttttttttttttttttttttttgagacagagtctcgctctgtcacccaggctggagtgcagtggagctatcttggctcactgcaacctccgcctcccaggttcaagcgattctcctgcctcaacctcctgagtatctgggactacaggtgcgcaccatcacacccggctaatttttgcatttttagtagagacggggtttccctatgttggtcaggctggtcttgaactcctgacctcatgatctgcctgcctcggcctcccaaagtgctgagattacaggtgtgagccactgcgcctggccaatttctgaatttttagtagagtcagggtttcactgtgttggccaggctggtctcgaattcctaacctcaggtgatccgccctcctaggcctcccaaagtgctgggattacaggcgtgggccaccgcacctggcccagcacttgctttaaaccatcagcctttgatctttgaagagagggaaggcagagagggagggggagggcttgtggggaggagatgcttgttgatccttagagaggatttcagaccccttctcaaacacatccttcccatataagggctgcagcaaggagacttctctaggtagcagttgttgttagtattagcagctgttttgggtgggggaaagctgttttctatttttagatgagcaccttccctttgatatgcagaagaagttctcaggaaagatgtgctgtaatgtattcttgctccatttttgggaataaggactaatttattttgttagaaatctcagaattaggctgggtgtggtggctcacactgtaatctcagcactttgggaggctgaggcaggtcgatcacttgtggccaggagtttgagactagtctggccaacacggcaaaaccccgtctctactaaaaatacaaaaattaggtgggggcatggtggagggcgcggtggcgggcacctgtaatcccagctactcaggaggctgagacaccagaatcgcttgaacccaggaagcagaggttgcagtaagtcgagatcatgcccacgcactccagcctgggggatagagcgagactccatctcaaaaaaaaaaaaaaaaaaatcagaattaaataaaaatcagagtatcagatttcatcttagataacaaagatgtagcattacctttttacaaaaatattatggtgtgatgtttgttttgtttttctcttggtttgttcttaatgcataatttgtcaggcagttcaagtatattcctctttaaattcagtaagttaattctagataattattgtgtggttttcttcagtttgacttggaaagcaaatttgctgttccacataatgtttcctagtgtatagagcaggcaatactgttgaagctgtgtaaacacattaaaaaggaattagaaaagtgatctcattatttttggcaaagcaaaagcccatactgagcagccaaagtcagctactgaacaagtgcactttctcgacaactggctgatattaataacagatttcataaaatggcatcaattcctagggaagaaactaggtttttctcatttttcactgatcggtcttggtagaacaaatacttgcacagaacaaatttactgaagaaatgccaggatttctgggaaaagctagggatgaagaggttttgcaagaatttgcccttttttattttgctttttcattcttcctgttccttccacatttttgccttttattaacatagtttctcatggcacactcggtgttgaaaaaagtggtctagcagtggtctagttggcttcgactgagtgcggcactggtcctggtttatccatttggagacacaagtcgtaactatgttaaaatcctccagagttcagggagtgaagcactcaaattccagcctacaagaaagaggttgagggccagacccagggaaagagatgctgagatggacaaatgcagcctcctgaggctgctgtgcatgacccccgctgcagccaaggaggcttccacactgaaccaggaggctagcagactcataggactggcacataggggaggagcaaaaccaaggcatcggccaaaagcatccaatgtggagctgaactaccacatttcagggcctgcaaagagaaaattagtgaggatattagtattgatgcattctttcagtgcagagggcattaaaacctaggattaactggcctcttggggccagaagactaattctgagaaaataagaaagggatgggaactagatttacctccaaaccaagtgttttctcctttcaatttgccgtagttaataaattaatattgctgttttactaatagttatatgacaataaaaatgcatagctagcacctgtagcttacaaaaccctttttaggtatgttatctcatttggcttcatttaaacattttaaattagccctgcaagtacgcatgggtgaaagagaccaactgagttttgagggaagtgcagtttgcaacagaatgtggaaatgagggccgcggcagtcagtatacttcttgtgggctgctccacactttctttaacacaagtgagtgaggaaaatggatagataatgttttttactctgtgtgtattgtttttggtgttggtcagcaactggtatttatcataaacctattcttcactcatccctcagagtgggtttcagctcccctctccctttgaccattacagatgtggatgagtgctctttggataggacctgtgaccacagctgcatcaaccaccctggcacatttgcttgtgcttgcaaccgagggtacaccctgtatggcttcacccactgtggaggtgagcagactgcccctgtcaagttgggaggggaatgaggctgggcctggaggggagcagggcctacccctgaggtttgctttcctacattggggtatgaaaggtacattgcagtccctgagcaatagcggtgagtccatcaacttgagagcaggatctgctaaaggaaatctccccacatgtatccctttaacacaccgagtgtgaaatggagcagagagaagaactgagctcttccagctgtgaattctctatcgacttgattgacttgcggctgtattcagagagtggaagggtatctcaggagctgataacctatctattggaacatctcagcagatagtaaagtcacagtcctcagagaggcttggggggcacccaccaattccacagccctgctatgcataggaactggctgcaaagccttggtttgagtcccacaactaggtctttgagctggaagcagaactatgaagtttctctctccactctgtgcccattttgcaaaatgttctcatgtctcataacctcatggtcaagcaggctatgccataaactggatttgttaccaactaactcccactccactcccccagccatcagattcacccagcaatctttgagaatacaggttcagattccaattcagaatgtctaggacttccaaggtcatcttcctgaggatctataggatttgggaaccactggcttaaatacttcctgaccagtcctgagtcttgtgctttagaagattggatatgctgggcgtggtggcttacggctctaatcccagaactttgggaggccaaggcgggcggatcacctgaggtcgggagttcgagaccagcctaaccaacatggagaaaccctgtctctactaaaaatacaagattagccgggcgtggtggcgcatgcctgtaatcccagctacttgggagctgaggcaggaaaattgcttgaacccgggaggtggaggttgcagtgagccgaggttgtgccattgcactccagcctgggcaataagagcgaaactccacctgaaaaaaaaaaaaaaaaaaaaaaaaaaaaaatatatatatatatatatatatactagtgctttgctactgacagttatctcccttctccctttcaacacatccttggcatggccaaagacatactactcttcccagtccatcaggaaacctcgaggaaatgtaccctgagtatggatgtatgtctgggtttaggtggagctaccttttgatctggactcagtctcaggttgatgggaattagtgtagtcacttccctttctctgtgcctcaactgtgtaaatggttaagcagggagtcccagttctgtctgcctcccttgctaggcagctcagaaggatggtagagttttaaaatagaagtctgtgcagtgtctgagtttggacatctgaaagtagagtgcggatccttctgagtgttgctaatggaggaatggattggtcaagaatggagcttgagtctgggtgtggtggctcacacctgtaatcccagcactttgggaggccaaggcaggtggatcacctgaggccaggagttccagaccagcctggccaacatggtgaaaccccatctctactaaaaatgcaaaaattagccaggcgtgttggcacatgcccgtaatcccagctacttgggaggctgaggcaggagaattgcttgaagctgggagacggaggttgcagtgagctgagatggtgccactgcactccagcctgagtgacaagagcaaaattccatctcaaaaaaaaaaaaaaaaaaaaaagagtggagcttgagaaggccctattgagcctcctgccaggaaatttgctgggtggggagtggggtgtgcagtcagctggtgccgagcgctcatgctaaaggcattcagtgtcttcctttggttagtgagtttcaaccttgtgactcccctgctgctccttcctcaagggagggaccatgtcagcccattcagtgacaggctgctatgacaggagagtattttgttccacagacaccaatgagtgcagcatcaacaacggaggctgtcagcaggtctgtgtgaacacagtgggcagctatgaatgccagtgccaccctgggtacaagctccactggaataaaaaagactgtgtgggtaaggggaaccgaggcacagactcagacagcaggctggccactggcccagaggcagtgcagctctgcgtgctcccacatcccacctgaccgtccctccactgacttccccaccagctgcagcaactgttctttaaatagttcaaaaacaggagatactttgcaggatctttggtgtttccttctgtgcttctgtgtaggttggaactcacttctgttttcctggttgcttttctgcatgaagaaatggcatatcaggggctcctttcccttggtgggaataaggcctagcatctatgttctgtgctgggcatgagctctaccttcttttcttggggcctttggtgcatgggactcaaccatccttgtcacacttggaaatgtccttctctttctgtaagtgtctgttttgtcctgtctagaagtgaaggggctcctgcccacaagtgtgtcaccccgtgtgtccctgcactgcggtaagagtggtggaggagacgggtgcttcctcagatgtcactctggcattcacctctcttcaggtgagtggggcccagttcccggggcaggtcctcacactggggccaggcctctctggcctccaggtgttagattccctcaaagggcttccaggtcctccgccagatgccccgaccaccgtgctttgagaggtccatgcttcgagaccccatatgctgggcatttttctagtggcccatgtggagtggggtggggggacagtttagctgctaccaggatagcctgtgaccttgcttatgcatttgacaattgacattctgtctgtcaggactgcaaggggcctactctgtcacctgtggctcttcctctcctctcaggaacaaacaacaaaaatcaaatgactctgcttttgggggtaattaccaaatctgcgtgttctctctgggggctcactgtgttcaaggggcttcattcacggggtgctgttcttggacattggctttgttttttttctgttaatttccttgatgctgtgagcatgttccagggtgttgttgcctgcagtcctggtgcccggaatgtgactctcccatgtaacagatacttactgtgtggccactgtgtgtcaggaggctgtggtcagccctggtgggtcatcaccctgggcagaggcccacagaaccccaggaccagcaggctgtactccagagcacctcaaaggcccagggaatgtgcctggagcacatggtgtggatagaaataggcaaagcaggggcagcagggattctgtgccgagaaaggggcccaaaccctttcctgtttgtcaaaagatgaagaatgaaatccaaggtttttaggaggctgtgtcctcccggatatagacgcctttgtcattatgtcattggaacacctgaatgaggttcatattacatcctgatgttcatattacatatatgagcaaagctagagactcaaagcaagacagtacagcttgtatgtgttgactgagcaattcaaatatgccagctaccatagtacacgaattaactgacttaagccatactacaaccctctgaggaaattttactattattctcattaaccagatgaagaaactgaggctcagagaggtgaaataacttactcaaagtggtttagataagaaataggggagctgggatttgaacccaggcagtctgggtccagagtctcaagcactatccttcactgcccctttcaatgcacgtttggactcagccagggcatacatcatggtctgtttcgccaaatccctcagtgacagttccttggtgatttgggccaccccaaggtggggcaagcaaatagctaatggctatgcagttattactacgtaccaggcaaggagctaaacattttcctttttttaaatgcattatctcattttatccttacaacagcctggtaatataggtactataattatgcctgttttacagatgaggacactgaagcttagggagattaagtaacttgctcaagttctcaccacaacttaaaagagctgtagggcattgactccagatcctaccggatggttaagactgactgaccctgggaggagaacagaattttgcacatcaggctctcacagtgggaccctcactccctctcagacctcagagcctagccatgtttagtgagtgccatctgtgtctggaacaacagctccctcagccctgtcctcccacgacgggcttgtttaggagaatctgcccttcaccatttcgccaaacgggcttatccagatttgaactgggggattctggcctttttttctcaggaaggcacaaaaatgacttcatgttctatttcaccgtggaggctatttttgaccctcagttttagatagatagataggtagatagatagatagatagataggtaggtaggtagatagatagatagatagatagatagatagatagatagataattttttgttttttttgaaatggagtctcattcactctgttgcctaggctagagtgcagtggtgcaatctcagctcactgcaacctctgcctcctgggttcaagcaattctcctgcctcagcctcccgagtagctgggattacaggcatgtgccaccatgcccggctaatttttgtatttttagtagagatggggtttcaccatgttcgccaggctggcctctgttttatttgaacactggatttgcctctcacatgagggggtaactgcaattttaggaggctcctggtggccccagtccagggcaatgggcactccatgatccaagccactcttagcctcagggtaggagagggtctcagggtgtgctgtgtgtggtggaagccaccaatggacagcttgctgcttcccatctggtgtctccattcctttgcctctgaaggtaacatctctcacttgtttctttctgaagatgtcaccaccatcaggacaagtgtaacctttaagctaaatgaaggcaagtgtagtttgaaaaatgctgagctgtttcccgagggtctgcgaccagcactaccaggtatggaatcagatggttggtgtagggagcttgcctgcatgtgggaaggggcctgcagccagccgagctggaggtccatgggggccaggggctgtccagccgatccaagcacactgcagatggaactgaaccatccccaacttccagggactcatcccaagaggaagaagagcataacctagcatgcttgtatagttctggggtcacacttcggggcttcctttgcatggtatagttggtgaggctctggggaaacccacgagttcacagaagtcaataagggcttcagatgaattagcaatttgtgatcatattgggttaaattttctagatctcagattttgcttgaaatataagccaaagaaatgaaaaaaggtttggctcagaaaggataactttgatgaacaaagatctaatatccagccttcctgctgggtctagtttttggaagcggtgaccccattggcttcagcaaagcaaataccatccaagtagaactggccttattgagaagagcagaatctaacattcctttttctttcccagcacacatttccagtattattttatagaattcttttggaaattaaaaataaaaaggatcaggattcatgtattagggaggcttcttttcccaatctactctcaaatcacacagacaaataaacctaaagctcactctagtcacttttgactgcctattttaggtaagtaattttaagaaacttggtacctccatttgatggaatattatgcagctattaattctatgttttcaaagaatgtttaatgacacaggaaaatggtcttgttataatgctgagatgtaaagcaggagagaaacattttgtatatctaatacaatccaaattgtgtaagaaaaactgtggtagaagaaacaaaaagaaaactcaccatatcattagtagtggttacatctgggtgggaggcatgggtaattttaattttttttctgcgtttgccaaattaaccatagtgagcatttatacttttaaacctcaggggtgaagggaggggccattgctcaaaaatagatttgaaccagttgtggtgcctcatacctgtaatctcagcactttgggaggccaaggcaggcagattgcttgagttcaggagttcaggagcggcctgggtaacatgacaaaaccccatctctacaaaaactataaaaaaattagccgggcctagtggtttgtgcctgtagtcccagctactcaggaggccaaggcgggcggatcacttgagcccaggaggttgaggctgcagtgagctgtgttgacaccactgcactccagcctgggcgacagagcgagaccctgtctcaaaaaaatgaaataaatacaatgataaaaatagacttggcctatagtttacttaatgggattgtactagtgttaatgtcttagttttgataaatgtatgatgttaacgttaggggagactgagtgaaggttatgtgggaactctatactatcttagcaacttttctataaatctacttatttcaaaatgaaaagttaaaaaaatatatatggaaacatcgaaagggaaaaagatttaaaatgagaatctgttcagtttaagatctgaagttacccttttgaaaaagtaagataaatctttaggggaaaaatgtagagaagaaataaatctgcctccttcctgtggcccctgttgacctatggcttgaatgtccttgtaatgttaaagaagaatctgatacaggcaatacttcatttcaataaagattttgaaatagagacaaattcatggagtggatgatatgtggacctgctctttggtgagggttaacagattcactggaaaccatggtgagaggggagacagccaagtcaggaagaaggatgtgcaaagccctgtcatgcaacacttccactctcatcctagatgccttcatgatattgttaggttctgttgatgctttgtaccatttattgctcctggttatttaaaaatgagacatcactgctgacgggtgttccagctttcctttcaggttagaatgactccaaggtcagtttgcctgaaagcagtagttggtttcctttccactcttgtgctcattccttatttgaagcctcagcccctgctcggcacatccagctttatgcaaaccaactgtgagagtgtaagcacacgttagcaaaccgtcagtaaggaatgcaagacaatccctggttcttgtcttccacatatgtggctagtcagtcggaaacatctcccatttattcatgaaaagaattttcaagagctaaattgtaaagttatataggaggcaatgctagctcttcaacattaaaatgtcgttgtgctccaagttaagggcttgcagtgtcttggcatctggagataatcacttagtcccttgagagttgttttaatgaaatgtttactgagctctagcaaatgttcagctgagtgctttgccaggatttggcttccgataattttgtttcttcatacagagaagcacagctcagtaaaagagagcttccgctacgtaaaccttacatgcagctctggcaagcaagtcccaggagcccctggccgaccaagcacccctaaggaaatgtttatcactgttgagtttgagcttgaaactaaccaaaaggaggtgacaggttggtttgaaaacagtctgcattgccaggcttctcacggcttgctccttatttctttgcctttcactttttattattcttgggggaaaagtaatgcaaacactgaagtatctcctgttttttttcaccccgaaactaaactgaattggtttggaacctgatggttttctctgcttcataaaaacccaaagctaccattctgatccacaaatttctgtttgaatcaaatgctgcccagcctgctaggtgccccctccaggtttctccccattcggtccacagggagctcggggtgttggtagggcctgcagttgatctggccattgtcacacgctgcagcctgatctcctcccgcactgctgtccctcttgtttctgtagcttcttgtgacctgagctgcatcgtaaagcgaaccgagaagcggctccgtaaagccatccgcacgctcagaaaggccgtccacagggagcagtttcacctccagctctcaggcatgaacctcgacgtggctaaaaagcctcccagaacatctgaacgccaggcagagtcctgtggagtgggccagggtcatgcagaaaaccaatgtggtgagtggcctgggacattcttgctaacagaacagccttgggctccataaacactcagggtaaccgaaggcaagtctggcccatcctcccttctcagggctcactttagagaacactccgggcagtgcttctgtttcagtaactgttgcgtttgtgtctgtcgtccctgctaggcccagagctccccggagtgagactgacctcattcatctccctgtcctcagcacctggcatagtatctggcttgtggtgggcactaaaatgttggttgacttgaggaacaggaaagaagtggctgatgttctgattccaaagcctgtgctctggtcccaagcagggtgaatttcagtaattagatttctccaggataaactgatgtccttttcctaagtatcagtagaatcatgaggcccaagcttagctaaggagtaagaatcccatttgtatttctaagtaagcaaagctgaatccaggggcacttgttccagagaattgtcagccttaggcccacagctcaaatttgttgctttgccaaaacttagtgaaaatcaagtgcaaaatcaagtgtaactgtctacaagaggctggtttccagatagtcttgattttcattccagctgattctcttaaaaagaaacaaagtggaaaaaagtaaaaacagcccagctggttgatctgttctcatttaaaattctaagagttccagtttccgtactaaaatagtggggagagttggctgtggctgccctactttccaggatgagttgcagaaactgtcagggccctcctggcctctcagggttacactgcacccctcccccgtctgctatcctgttggggttaggcctcacggacgggccagggagtctttgtggccagttaaaaagtcaagaaaacctaatgtcaagggccccatggactggctcccagtgagggtatcactaatactaccatgggtatgttcctggggagtaaaggcccaaggataaggagcaggagttacttaacaggggcttcatgaccacaacagcctacgaaagacactcggggccaggcatgatggctcacacctataatcccagcactttgggaggccaaggcgggcagatcacgaggtcaggagatcgagaccatcctggccagcatggtgaaaccccgcctctactaaaaaaatacaaaaaattagctgggcgtggtggcgcgtgcctatactcccagctattcgggaggctgaggcaggagaatcccttgaaccagggagttggaggctgcagtgagccgagatcgtgccactgcactccagcctgggcgacagagcaagactccgtctcaaaaaaaaaaaaaaaaaaaaaagaaagaaagacactcagtagagggtttgtgtagctgtggtggtgtgtgaatgtgtccctgagatgcttgtcatgctaaattaggtttgatttgtttctaggggagccaatgtgtcttgtctcaggagctcccaaacactggatgaattctgtagccctcacagcatcaaatcaggtccaggtctgacagcaatgttgaagattttaccatgcagagaaaacggctcaagcagttaccagtgacattccctcttgctgctgagggaggaagtgggtgtaaagaagtgtcaggtgtgttaattagaaaggctttttatccagaaggcagcatgtggcatagacaaggctgtgtgtgtgtgtgtgtgtgtgtgtgtgtgtgtgtgtgtctgtctgtctgtctgtcttctagtcctggtctatttgatggtgttaggacttcataaagaccaggcttgctgatgttttctgagctctggatggtacagtggagacaagcttaggatagttccttttagaaatgattttcggtatttgcagaaaagagctcaaaaaaagaaaaatggagtcacttccatctctcctggggggagagatggaaccattatgtttatctttttaaatattttaaatttagttttcaattatgaaagtagtgcctgtttcaaatggcacagaaatgtatacagtaaagatgaaagttctctccacagctccctaatccaactccccagcagtaatcactgttatagtttgctgtgtgatttttccacaactgtttttatgcacatataaaaaggaaattttatatagtcattcaataaatatttattgagcaccaattgtgtgccaggtaccattctagatatcaggaatccagcaataaagaaacacgcaaacatctcagccctcacagagtttacaattttagaggaagaaggtagacaaccaaccaataaacgaggaaagatactactatcatgtagcagagggcgacagggatatggagagcagggctgcagggaagtggaatggaaagtgccaggccaaggtgaggggtgagggatgaggagcgtactcccccaaagtgcagactgtggtcagggaaggcctcattacaaagtgtcatttgggcagagacgcaaaggacagcaagaagcaagctatggagatatctgggggaagagagtttcaggcaaagagaacaacaaataggaaaaccccaaggtactggaaggaaggccagaaggatgagagctgagagaggcagggagggagagcaagggcagagcagtagcagagggaactcgaaaccagggaggaccctgatcccgaatctgatgagaaaggaagccagtggagggctttgagcataggagtaactgacatgttttcaaaagataactttggctactgtgttgaaagtagactgtaggtttacgtatgaatagatatatctttttaaaaaaataggctgggtgcagtggctcacatctgtaatcccagcactttgggaggccgaggtgggaggatcacttcaggccaggagttcaatactagtttgggcaacatagtgacactctgtctcactatgttggttggtagcacctgtagtcccagctactcgggagtctaaggcgggaggatcatctgagtccaggagttcgaggctgcagtgagctatgattgtgtcactgcactgcagcctgggtggcagaccaagagcctatcttaacaaaataaaaaacaaatatcaatacaatttgaatagtgctatgtgttgtttttaactgtagttagatcaagaacatctctctaacatgatagcggagcaacctcatttcttttacagcttcccaggctgtatttgtttgaagacaccagtattgattagccctacccctactggtgaacatagaagttattgctaatttttatatggcaaatagtgctcaatgaatatcattctttgtacacatggccaatatttctgaaggatagacttgcaaaagtacaatggccgactcaaagaacttgcatatttaaaactttaatagatactgccaaattactttcccaaaagatcatgcctatgcatgtcgcttccaacgttggaagcatcctacatctttgctaacatggattatttatcattgatccttttcatttttgcaaatctggtaagcaaaaaaaaaaaaaaatagtcattttaacttggttttctttattagtaagactaagcatgctgtcttatgcctgtggtcatttggattccttcttctgaaaacatctatattctttgcctatttttgcattgaactgtttgtcctttgtatagcattaaaaaataaattttaaagtcccaatttacaccagagaaaataatcacttctgaccaattgtatattttctttcttatcattattttatatagtaaagtttcattaatttggcatttggggactttggggacagcctgctctccaagtgacctttgtaccatctgtgatcaattttaacaagatggcaaaaaaaaaaaatgattatagggtccaaggaacaaatttcttaagctctgtagtacttcataaagttcttcatgtctaaagaaaattaactatatgacatggatgtctagctattgtactttcataataccagctaaaagataaattatttaagaaatacactggataatatatatgtgtgtgtatgcatgtgtgtgtatatatgtatgtatgtatgtatgtattatatatactgtatttggttgttttgaaaacttgctgagatttttagaagaaacaatccagacaactggcaaactgggaagtattttagtgcctgggttcttgagagactaggaacatttaattccttttgtaacagcttactgctgttcctctgcagcaaccttggatatgttgctaaggagcctcaactttatctctaggtgacatgctgccattggaggatttactcgggaagtgtccaggtcatatgtgtattctagaaagatctctctgactttactggagggagcagaattagaggcagaaagaccaatctgggggcttttgaatgtgttgcctatgagatactgagaacatgcaggtcctagatagagaaacagcaatgggttagagaaatatttaagagggaaaatgagcagcatttggggatgacatggattggggactgagaaggggaaagaggtgggctgagctcagaggattctgatgtggcctgtgatcctggcacttgcttcccatacatccctcatctcaccatgccctgtttcatatgcaggaggcactgagaaaacgccagggggttggttgaatgatgaaatgaatgtgatcactggggaagaaataatcagaagagatttataggagaagcaggaaaaaaataggctcttgagagagcatgagaaaggatgaaaaagatacataaaaggaggctaaagcctgaatattgagtcagagaaactgagaggagtgcaggaaggcaaggcaaggaggtttttgagccagggagtgaagcaatcagaaaaagagtttagaaaggtgcatctgatggtagaatggaaagagtggaggcagggagggacagaaagccaggggaatcttggaaggttactgcggcaatccaaataagagacggtgaggatctaagggacattcatgccatggggacgaagaataggggatagagagaagggacacagctgtaggatgctgccgctgagtgacagggcagtgaggagagaagccagggagagctgtgatttggagccttggtgcctgggaaaatagagatgcttctgtaagaggagtaaagccagaggccagggagagaagtgctccttgggcaacaagatttctaggcagaggtgtccatgggtgtctgggagtctagcgaaacaacttcttctcttcatgtccagcctaacttgcctaatcccgagtctgtccacacaggctcagacctgcctcctgttaaaatggatgggcagcccatgcctctaaggcccccctctatcttgcactcaagctggagcctgttctctctcagcttcttaagaatgttgcccatgctgtccccatcaacccctcccatctcagaattcttctcctctgctagatcatttccaacatcacacaaacccatctcctgtcttaaaaaccaaacaaaccctccattgacttcatgcatctctatagctactgcctcatttctgtgtcccccattctgtgtagaacgaagctctttgaaggagccgtagtcatactgtctttgcctccttacctcccatttctcttcagtctgattttcatgcctaacctctccacagaaacattttccaagattcctaaccacctctgtgatgccgaatccagttgcctttcctcactcctcatgaggcatcctctctgctgatcactccctctcctggaaacactttcttcctgtgggtttcagacacaacacacttctgcttctccatacctcactggctgctcccttttcattttcaatgctggttccggttcctcccctactttctgattatcctagggttgaatccttcgtcccttcctctgtcttcacactctccttggtgaccttacccagtgccatagctttaaataccaccacatgctggcgattctgaaactgccctctccagctcctttgtcccagagatgctgaacatttaagaatgcacacacacacattctctctccctctaagtaaaatatatatgaatgtttacttatttataaactatatacttacactattggctagtacactatgttcatcacaaaagacagaacaagataaagattaaacaaatttaaaaataactggctagcatcttaaggtagaatctttacaattgggcgaagttcattattgatagtggtggttgcaaatccatttgtcctatagtctttttgactattgctagtgctttaggtgaactcttgacagaccagattaaatcgtaactgtttctgtctcatgatgtagtttgacaaagaggtaatacactagtgcctccttataggcagttttgctttctgtggtttcagttacctgggtcaaccatggtccaagaatatcaaatggaaaattccagaaataaacaatttgtaagttttaaattgcccactcttcagagtggtgtgatgaaatctcgtgttgtcctgctccatcctgcctgggatatgaatcctccctttatgctgcgtacccacggtgtataccctccccatcctgcctggaatatgaatcctccctttctcctgcgtacccacactgtgtaccctccccatcctgcctgggatatgaatcctccctttctcctgcgtacccacggtgtataccctccccatcctgcctgggatatgaatcctccctttctcctacgtacccatgctgtgtaccctccccatcctgcctgggatatgaatcctccctttctcctgcgtacccacgctgtgtaccctccccatcctgcctgggatatgaatcctccctttctcctgtgtacccacggtgtataccctcccccatgttagtcacatagtagtcatctcagttatcagattgacagatcacaagaagggtgagtacggtactataagatactttgagagagagaccacattcacataactttttattataatatgttgtgataattgttttattttattattattgttaatctcttgctgtgcctaatttataaatgaaactttatcatgaataagcacgcataggaaaacccctagtgtatatagggtgtggtactctccgaggttccaggcacccactgggggtcttggatgggaaacctccgctccactgtggacacgggtggctgctgtgctaggagcagaagatgcacccacgggccctctcctgtggtgcggacgcgcgtggctgctgtgctaggagcagaagatgcgcccacggacactcctgtggtgcgcatgggctcgcgtcacgtttacgcccttcagtcgggtgttctttccgggaatccatcaaagctgctttctattttgtgatggttagtttagttaaaaacacgatcatataggtcaggacatctcattacccaggcatagctaagctgtaactattctctatgtattgagaggcgagagtcagtcagtgccctgcgcccgagttgtgggtgccagtgcttctcttttcttggcgaccctggctcctcacatgtgtcttgtgcctcacagagatggagact

SEQ ID NO: 1280 - protein, 421 aa, Homo sapiens
MQAVSCAFAPPAGPVLLRMLQWEWSRPVGKAPLSLCDLGKPFLLSWTRLLLTLVFQRLAQHLPGGQGSTKLELFIMMRHFWPAGARAVYFWRDACLALHEREDTVLEVTESNTTSVVDGDKRVKRRLLMDIDECQTRNGGCDHFCKNIVGSFDCGCKKGFKLLTDEKSCQDVDECSLDRTCDHSCINHPGTFACACNRGYTLYGFTHCGDTNECSINNGGCQQVCVNTVGSYECQCHPGELGVLVGPAVDLAIVTRCSLISSRTAVPLVSVASCDLSCIVKRTEKRLRKAIRTLRKAVHREQFHLQLSGMNLDVAKKPPRTSERQAESCGVGQGHAENQCGTHWGSWMGNLRSTVDTGGCCARSRRCTHGPSPVVRTRVAAVLGAEDAPTDTPVVRMGSRHVYALQSGVLSGNPSKLLSIL

SEQ ID NO: 1281 - DNA, 11519 bp, Homo sapiens
  source
  (1)..(11519)
  CDS (201)..(265)
  CDS (5288)..(5676)
  CDS (11165)..(11319)
tccccttctcattgagactgtggcggggtgggggcatgcaggactggcaggggtgaggagaacacaggttggccaggtgcccgtcacaccaagcccaagtgttctaggggtcgtgcagacctgtccagcctgtgctgctgaccagcagggctggccgctcgcggaggcgcatcaccagcccgctcccagcatcccgctccatgaaggccgaccgctccgtgtctgggtcctcaggttctgagatgaaagagcaggaaaaaagcctgtgagaggccacagagcaggcccgggacccaggacgggcatctcctgccatggcaaggcctgcaggctcccaaaggttggggtgcccagccacatcagcagcaccaggccacccctgccatctgaggcctgggcttgctttctctaatattgttgctgggtgctaaggttacaacagcaaacaagactgactcattccttttctccacgcgacttactgtcttatcatcccctggactcaagatgagggtgcagggacaccctcccacaccactccagcttacccaggggcacacctcagggtgtgtggacctgcactaaggtcccctccttagccccgtgagacaccccaggggacacacaggtccacagatcctgccacaggcctgggaacccactggcaggagagtaagacagcgcaggggtccacaaacatttcttaaagggccagagagtaaatacttcaggctttgcgggccacaggttctctgttgcaaaacacgattctgctgttgtagctcaaaggcagctgtagacaactcagaagttaatgagtgtgttgtgttccaatggaacttgatttacaaaagcaggagactggcctgtagccttagtttgccaacccctggatgagtgggttcccaggtctgcagtgagaaggggagaggacagggcattggcaagcaggagagaaggcagctgaggatgggaggcctaccaggccctgaacggagagtgcgtgccgcccagcttcatgaagagttggtgctgcaggtccagaggtctcttgaaagaaagatgctggcttgtcatagacggtcacagccctgcaatgaaatcatggcagggctattgggagggctgaagaaaggcctcaggaatagaggactcagaggctccaggaaaagaaggatgcttggggaatccaagtctcagacgatgacaagaagaagccttgcaattacttgggaatgcacagagagatgttctaggaccaaaattgcctggaccccctggctggctgggaaagaaactctgccccctcctctcccagcttccccaaattttcccataatgttgccaagcattagtccagcgtggaggctactttttgctcaaaccactcatttgggtcccacgcccaatgtaacccatcctcagcaaaacaacctttatttccttcttccacgtttccagaaagttcccctaaagccctaggaatcaccaaatgaaaggggctttttacaaacaggaaacttaagtggagtgccaatacacaacatgaattgcaccaggctgggtctaagataaaaccagactgtggacagcaagacagataagacccacatggctctgcactgcctgggtctgttatggtgtggaggaatgtcttagtctgttgctcctgtgggtgtagctaaagcacgaaccaggagtcttcatccttagaaagcagttagacagacacctgagaaccaatcccaaactgcagccttccacagaaccttctggaaccttcccgaatgcaactcattactgccagagggtctttgatgagagtctactctccaccatttgtcttcaaagagaatacccacatattctctttccatggaaaggtaagttattagagtttatgcagtctggtatattaattgagagcttcaaagaatgtcacgtttacgattcagtctcacagactgggttaaaaaggcagtgttgactattaagttgtaaattactataatgatcattattattattcaagcaagctgtgagaaatgagcattatctcacaatatctgcattttagtgaacctgaaggaagagtgtatttgctggaattacagaagcctgagaaccacaggggaattctcactgcagggtattcagggtcaaaggctgattctattttgcatgctcaatccttcctcaatttatttttatttctttctttattttttgagacagtgtctcactctgtcgcccaggctggagggccttggtgcagtctcagctcactgcaacctcgcctcccgggttcaagtgattctcctgcctcagcgtccggagtagcagggatttgaggcacccaccacaaagcccagctaatttttgtatttttagaagagacgggatttcatcatgttggccaggctggtctcgaactcctgacctcaggtgatccacccacctcagcctcccaaattgttgggattacacatgtgagccaccacacctggccgggcctaggtttttgaagaaggaattgaactgagtgtaggccaggttgtactgctgaagtgtcttctttgtacttggaatgtgctaggatggatagacttcaaagtgcaaagcgcctgaaggatctcgcattcatcaattctatgcactgagcttctgtccccagaataccactctcagagtaggaatatggcaaggccagtttgataggtggggcatggattggaggctcaggccactgcactgcacatacaggtcttgatgtaaacggtctggtggaggtcaagttctgtttagcgtgggtagactatgtgacagagtgaagaaaggtaatggtctaaacgcagcaaaagtttcattcccactcacgtgccagtctgtggagcaggcagctcctctcctcatgaacctgggacccaggtatcctccatcttgtggttctgcttctccagagccttgtcatttttttcatctagctatggtgacaagatcttttggataagccatgaatattaaaccaaaggcaaactctgaaaattgatttgacgtgtggtcagctgctcatttagcacagtccggggaatgctggggtgatgggcaagaaggttttcatgaggaggttgaagagatctaagtataggggtgccagcctggggcacttcagaaggggcactggcctaggggtagcagcagggcgaccctgatttccctggggcagggtgtggctcacgacggggtgctgagaacccaccaagaaggctggaactttcagcactcattgttttatgagggcctgcctgtgtgccaggctggaagacactgaccagaggcccagggcaactgaagagtctcagcctggtctcttggtgcctggggggtacactgtacaagtgatgatgtagttccaaggggcaggactctgacccacactcctggtgccaatgtccgttttgccactcatgttagattttgcttctttaagtgaacttactcaggatagctgggttcttggtcattcttccagtggttttcaagggtgaaaaaaggagtttcagcaagacagctaacgtctggatgagtgagccaggaggtgtctgtagccttcctctagagagcactctgggctggtgggcgtgaggactccagtttcatgcgcgtccgtgtgaagataccaccaaacaggctttgtgtgagcaataaagctgtttatttcacatgggtgcaggcaggctgagtgaaaagagagtcagagaagggagataggggtagggccattttataggatttgggtaggtaaaggaaaattacagttaaaggggggttgttctctggcgggcagaatgggggtcacaaggtactcagtgggggaggttttgagccaggatgagccaggagaaggaatttcacaagacaatgtcatcagttaaggcaggaacaggccattttcacttcttttgtggtggaatgtcatcagttaaggcaggaaccggccatctggatgtgtacgtgcaggtcacaggggatatgatggcttagcttgagctcagaggcctgacacccagggcaggctggctcagcccttttgacttcagatttcagggaaggccagggagctggattgggtgcctggaatttctgagaattatgtttctgagaggattttgaaacctaaacaggaatactttacacacaggtcatcaagcaggaactgggaagttccaaaactgccctccttcatgccacctcctcccttcagaggccaagggtggccaagctgtctcccacacacctcagtgaaaagtccctggctgtcctcccaaccacctcgctgtgaccttgtgaggtgtgagaaggaggaaggggatctacgttctggatgaaccttccttcctccttgctgagaaatagtttaggcccctgcgcctgctgggcctcagaccttctcagagcccagggcccactgtggctcctgcaagctgcctgggaattccacggaggctgactggctgcctctcttattcccagtctgctgcaacccatttcctaagctggggtggctgaaaaccacagaaattcatcctctcacagttctggaggccagagtctgaatgcaggtgttggcagggctgtgctgcctttgaaggttctagggaagaatccttcctggccttttccagttttgggtggtggctggcaatgtgcggcattccttggcttcaggtgcatcattccagctgcacaccgctgtcttttttttttttttttttttttattgatcattcttgggtgtttctcacagagggggatttggcagggtcataggacaatagtggagggagggtcagcagataaacaagtgaacaaaggtctctggttttcctaggcagaggactctgcggccttccgcagtgtttgtgtccctgggtacttgagattagggagtggtgatgactcttaaggagcatgctgccttcaagcatctgtttaaaaaagcacatcttgcaccgcccttaatccatttaaccctgagtggacacagcacatgtttcagagagcacagggttgggggtaaggtcatagatcaacagcgtcccaaggcagaagaatttttcttagtacagaacaaaatgaaaagtctctcatgtctacttctttctacacagacacagcaaccatccgatttctcaatcttttccccacctttcccccttttctattccacaaaaccgccattgtcatcatggcccattctcaatgagctgttgggtacacctcccagacggcgtggtggccgggcagaagggctcctcacttcccagaaggggcggccgggcagaggcgccccccacctcccggacggggtggctggctggcgggggctgaccccccacctccctcccggacggggtggctgccgggtggagacgctcctcacctcccagacggggtggctgccaggtggaggggctcctcacttctcagatggggtggctgccgggctgaggggctcctcacttctcagacggggcggctgctgggcggaggggctcctcacatcccagacgatgggcggccaggcagagacgctcctcacttcccagacggggtggcggctgggcagaggctgcaatctcagcactttggaaggccaaggcaggctgctaggaggtggtggttgtagcgagccgagatcacgccactgcactccggcctgggcacctgtgactatatatatatagtcacaatatatttgctgtcaaagtattatcatcaaaactctatagaaaatatacacatccttgggctgggcacagtggctaacgtctgtaatcctaacactttgggaagttgaggcgtgtggatcacctgagctcacgagttcaagaccagcttggccaacatggcaaaccccatctctactaaaaatacaaaaattagctggtgtggtggcatgcacctctaatctcagctactcaggaagctgaggcacaagaatcgctcgaacccgggaggcggaggttgtagtgagcccagattgtgccactgcactccagccggtgcgacagagtaagactccatgaaaacgcaaaacaaaacaaaataaaaccaaacaaaaaaaaacaacaaaaacaaacaggcacttctgatgcaggccgcaacatggatgaaccttgaagacattatcgtcagtgaaataaataaatcccaaaaggataaacatgcccaggctcagtggctcacacctgtaaccccagcattttgggaggctgagacaggtggatcccttaagctcaggagttcgagaccagcctggccaatatggtgaaagctcgtctctattaaaaatacaaaaattagctgggcatgatagcgcacgcctgtaatcccagctactcgggagactgagacataagaattgcttgagcccccgaagtggaagttgcagtgagccgagatcacgccactgcactccagcctggggtgaacagggaaagattctacctctaaaaaaaaaaattaaacccggtatgattccacttatctatcaggggtctagaagcagttagactcctagagttgcaaactagaaaggtggcccccaggggtaggcgagagagaggagtggagagcttggcgaatggttgcaatttccattttgaaaaataaaactgttccggagatgatggcggtgatggttgctaaacaatgtgaacatacttaatgtcattaaactgtaaactgaaaaagagtggaaactgtaaatgtttatactggccattctatatgcactaatatatatttataatttttaatatttatacgtggtatattttcccataataaaagatgaaaattaaagcagttggatctttaaaaagcaaagaaagaagcgaagaatacacaccagctttctcctgattagaggaagagccccaaagcttctatggacactcacttttctcttcttcttgcatgatgatgaggaaatctttaagaggttggggaacttgggtgactttggctaatgaggagctctgtgccttgagccccccagggcacagaacagtaaatggcctgtgcctccagccctgcagtgtgaggttccagtcctgtgggctccacagccatcacctgtatcaggaggcacatgtctcaacgtgtcttcttgccagccttgaggatggagtctgagcatccatcgtgcaccacgcagggaggacagtggacctgttccccgtggtcatggcccagcaaaggggaagggcagttcagtgagtgtaggcaaaagaaagagcgatcagactgttactgtgtctatgtagaaaggaaagacataagagactccattttgaaaaagacctgtactttcaacaattgctttgctgagatgttgttaatgtgtagctttgccccagccactttgacccaacctgaagctcacaaaaacatgtgttgtaggaaatcaaggtttaagggatctaggactgtgcaggacatgccttgttaacaagatgtttccaagcagtatacttggtaaaagtcatcgccattctctagtctcaataaaccaggggcacgatacactgtggaaagctgcagggagccctgcccttgaaagccgtttattgtccaaggtttctccccatgtgatagtctgaaaagtggcctcgtgggatgagaaagacctgaccgtccccgagcccgacacccataaagggtctgtgctgaggtggattagtcaaagaggaaagccgcttgcagttgagggagaggaaggccactgtctcctgcctgcccctgggaactgaatgtctcagtataaaacccgattgtacatttgttcaattctgagatgggggaaaaaccggcctatggtgggaggtgagacatgtttgcagcaatgctgccttgttattctttactccactgagatgtttgggtggagagaaacataaatctggcttatgtacacgtccagtcatagtaccttcccttgaacttcattatgacatagattctattgctcacatcttcgttgctgaccttctccttattatcaacctgccctcctactacattcctctttgctaaaataataaaaataataatcaataaaaactgagggaactcagaggccggtgccggtgcagatccttggtatgctgagcgccggtcccctgggctcactgttgtttctctatactttgtctctgtgtcttatttctttcctcagtctctcatcccacccgactagaaatacccacaggtgtggaggtgcaggtcaccccttcaagtgagtgctgagaaacggacgggagccttgtttggtttcctcctcctcaggacaaacaggagagtgtggtgggcagatgggaggagaccaatgtgcaaactgtccgctcagcagactgtgcagtttctgttcttggttgtgctgggggtctcagaaatcttattcaaaattttgctttcctcccccactggttgtccttttcatagacatctcacccatgatagcagggaatcagtccctctaaagtattccctaagaacaacaaaaagattatgaaggtgatgatgaggataaagaggatgacgacagacaccatggcatcatgaacccttactgagggcttcctaaaggccaggctctgagctctgtgctctatgcagcttgtttcatttcatctgcatggtctccacgttattagtgcacatttcaggatgattttacagactagaaaaggagcaacgcttttccatataactcttactagatcatgaagtcaaaaagggtgaagtccaatttgaaccatccagtctaagtccagacacatggcatttggccagtcctctccctacaaccaacctgccctctcaaatcctcatcactcaggcggatgcccctgctcactgtgcccttccctttgcgcgttccttgtagaccagagctagaccagtgggtgccacaatcactgtgtcaagtatagaaagggcagctgagatcacatcgaggattccagaaagaattggcacaggatcattcggggcgcatctctcccttgcccctgttcctggctttccttacagctctcgacttcctcaaaggagtcatcaattcagtttggcttccattcctattgaggaagctggaaagcgtttcaaaaatgctcctccgatgtgcctgtggttaagacctctgagctctgcttaaaacttttggaagctgggagccgtggctcatgcctgtaatcccagccctttgggaggctgaggcaggcgaatcacaaggtcaggaattcgagaccagcctggccaacatggtgaaaccacgtctctactcaaaatagaaaaaaatgagccaggcgtagtggcgggcgcctgtcatctcagctacttggcaggctgaggcaggagaatagcttgaacctgggatgcagaggttgcagtgagcagagatcactccattgcactccagcctgggcaatggaatgagactccatctcaaaacaacaaaaacaaaaacaaaaacaaaaaaaaacccacaactttttgagagttggaagaccaggaagtatagtacccgggacttcgagtctggccatgaattttgaataccaccctttctacttctctgtatggcaaggggtgagacgtccatcctctgagactcagcactctcacctgacttgatttccagttgatccgatggaagtgaatgatgattaagccgatcgtaggcgcccgctgtgtgatctctaggtgacggatgcataaagtaaaggcaaagtgaattttagatacattccttaagattttcagcttcaactccacacaattcaacggaaatatcccctgacctgaagttctgctttccctgcattccagacaggacattttgttttgtccttctctcagtaagtactgagtactgtgagaggaacaggggagtctcttttgcttctgattccccagagcctatatcttgcttggcacataggagacagcaaaagtcaaaatctatattaatgattgaattgacacttccttgcttcaccaaaattggctgtcatcagcatgactttgacttacttgattctttttgttttttgtgttttgagacggagttttgctctcgttgcccaggctggcgtgcagtggtgtgatttcggctcactgtagtctctgcctcccaggttcaagccattctcctgccccagcctcccgagtagctgggactacaggcacgcgccgccataccgggcgaagtttttgtattttttgtataggcgggttttcaccatgttggccaggatggtcttgatctcctgaccccgtgatccgccctcctcggcctcccaaagtgctgggattacaggcgtgagccaccatatccggccaaactttctgatgaaaactctaagtccacctaagctaaggacaggagttagagcttccatgaattttaaaacaagacccaccgatttgagtaagcaattactctctcgaaggagaaaagtccgaaaacagaatgatgaaatcactaggacctaactggcatgtggaactattttctgcttatgaactatcaactttcatttcatttccagatggcatggtctcagctgttacacagtgtttacaaatgttctaaatcaagggaatttgtatcaatctagtagaataaataaaatatttgagttcttaatttcctttaattaggataacctttttcttaaagtgaagacagtggttttattatatctttttcttcggaaaagataggctgtattttctagcaattacgaatttgttatatatgatgatctggttcttggaacgttctcgaagctagtgtctctaaggcaggtgtgtacagcaagaggagaataacacagcaatcgatgttgaaagcactataaggcaattgagcttgtcagaactacaaaatattgctgagtgtggattgctctgaaacctgcaaacattactggtgaattgcttctatccaaaatgcagacacaatgctgggtattggtttacttgtttcggatttttcaaccctcttttccaggcaaaagagggttgtatccaaatgatacagacccacagagtctaacagatgtctctatattcctcctcctcaaactctcagaggatccagaactgcagcaggtcgtcgctgggctgttcctgtccatgtgcctggtcacggtgctggggaacctactcatcatcctggccgtcagccctgactcccacctccacacccccatgtacttgttcctctccaacctgtcccttgcctgacatcggtttcacctccaccacggtccccaagatgattgtggacatccagtctcacagcagagtcatctcctatgcaggctgcctgactcagatgtctctctttgccatttttggaggtatggccgagagacatgctcctgagtgtgatggcctatgaccggtttgtagccatcagtcaccctctatattgttcagccatc

SEQ ID NO: 1282 - protein, 202 aa, Homo sapiens [sequence omitted]

SEQ ID NO: 1283 - DNA, 7694 bp, Homo sapiens
  source
  (1)..(7694)
  CDS (201)..(246)
  CDS (1208)..(1324)
  CDS (1508)..(1723)
  CDS (2083)..(2199)
  CDS (2554)..(2706)
  CDS (2909)..(3028)
  CDS (7217)..(7494)
  modified_base (3532)..(3631): a, t, c, g, unknown or other
  modified_base (7609)..(7694): a, t, c, g, unknown or other
tgagggtggctaattagtctaatgggaacggaggtacaacctggacctcattaaccctaaccagttcagctaattgtgttgatgataaatgcttcactttcatgtagcattttcataggcattatatcaaaaggcctctatgaactgagtataattatccccattgtacagccaaaaagacttcagctcagagagggtaaatgacttgctcagagtgttacgtaatgaactggaaattgagcccgggtgtgtcaatcatcatttaacaagaggaaaggaggggaaaaaggcgcttctttctcttgctcatgtttttcttatgttttcttagctcctgtgagttctttgggttgttcttcccctaccctgtgaacccctcaccacaattaccttttgaatctctgtcttagctgcagtttctgcttagcttctccatcagctggggatgggcctaggagtcagtaaggaaggactataaaacagacaagggggctgggtgtggtggctcacgcctgtaatcccaacagtttgggaggccaaggcaggtggatctcttgaggccaggagttcgagactggcctggccaacatggcgaaaacccacctctactaaaaatacacacaaaaaaaaagatagctgggtgtggcagcgggcacctgtaacaccagctactcgggaggctgaggcatgagaattccttgaacccaggaggcggtggttgcagtgagccgagatcataccactgcactccagcctgggtgacagagtcagactctgtttcaaaaaaaaaaaaaaggccaggcgccatggctcatgcctgtaatcccagcactttgggaggctgaggcaggcagatcacctgaggtcgggggtttgagaccagcctggccaacacgacaaaaccctgtctctactaaaaatgcaaaaaacaaaaacaaaaaccaaaaaaacctagccaggtgtggtgaagcatgcctgtaatcccagctacttgggaggctgagtcagaatcgcctgaaccaggaggcagaggttgcagtgagccaagattgcgccactgtactccaacctgggtgacagagtaagactcggtctcaaaaaaagaaaaaaagacaaggggatttggagcaaaaggctatctggcctagttgagcctgagtaagaataccaggttgattgacttttcttttcttttcctgggattcagtactacctacctgttcccctcttgactttcactgtgacaatggcaagtgcatccgccgctcctgggtgtgtgacggggacaacgactgtgaggatgactcggatgagcaggactgtcgtgagtgttggcagaggctgggcggaactccattgagttccactgggaaaggattttcaatcagaaagcaatgccccaggtccacatgagcccttgtgttttcagcactttgtcctgtcctttcacttcctctcgaagtcagataagctgctgagaggcagccacctccttcggagccctcagggcagcactggagctacttgactgctccggagggctttaagtcaggcttccaggcaccagacccccactgcctgcagcagcctgactgctctgtgcccacagccccccgggagtgtgaggaggacgagtttccctgccagaatggctactgcatccggagtctgtggcactgcgatggtgacaatgactgtggcgacaacagcgatgagcagtgtggtgggtgaccccaacgggggaaggcaggcaaggtggccagtgggtggcctggccatgggagaagatagcagcaatggccctagcactgccaaacctccaactgcccagatatctggagcagctagaggaacgcagagggggcagagccgctcagaccccccagaaactgtggaccaggaggctgaggcccagtctctccagggcctccgttctccctggagagtctgcactgactctggggtgcctttcgggggctaggtcagacccgccaaagccagtgaggttgggagtcagagaggagggtgagagggttgcctgtggggccccctcagaactgctgtcccatcgcatccccccagacatgcgcaagtgctccgacaaggagttccgctgtagtgacggaagctgcattgctgagcattggtactgcgacggtgacaccgactgcaaagatggctccgatgaggagaactgtcgtgagtggccccagacctcaggctgttgggttggatgagggcagacagttctgcccattggctaagggcgaggctgaggagtgcatgtaccaagggcaaggagcatgggtgcctcagcagcagctcctcctaggctgagctagggagggagcaagttccccaggtgggaagggaaggcttcctttggtccacctgaatatgggcgtctataagggctgtcccagatgaaacctggttacatctcacttgaagaagctctcctgcctgagcatcctgcctgcttgaggaatcagggcccctctccttcatccaggcctgagtgtgtgcccctccccacccctgccttccctccagcctcagcagtgccagcgcccccctgcaacctggaggagttccagtgtgcctatggacgctgcatcctcgacatctaccactgcgatggcgacgatgactgtggagactggtcagacgagtctgactgctgtgagtactctggccagctgggaggtggggaggccaggctgggaagaactgcttgggtggcaaggcacagtcgccagctggggcaggagttcagagaggagtttctggattttctggtccctcttgggaagagatggaggaactgggattctggggctgtggccttctagtctgccatgggacactgcacagactggctagagacagaagtcttgtgtttccctagcctcccaccagccctgccgctctggggagttcatgtgtgacagtggcctgtgcatcaatgcaggctggcgctgcgatggtgacgcggactgtgatgaccagtctgatgagcgcaactgcagtgagtggggaaatggaattaggttgggcttgaactaaggagaaggcttgtggagccaaagaggccactaccggctgggcgcggtggctcatgcttataatgccagcactttgggagaccaaggtgggtggattgcttgaggtcaggagttcaagaccagcctgggtaacatggttaaaccccatctctactaaaaatacaaaacttagctgggtgtggtggcgcatgcctgtaatcccagctactcgggaggctgaggcaggagaatcgcttgaacctaggaggcagaggttgcagtgacccgagacggcgtccctgtagcagagtgagatgacatctcaaaaaacaagacaatccgggaggtgagggggcgcctctgcctggccgcccctactgggaagtgaggagcccctctgcccggccagccgccccatccaggagggaggtgggggggtcagccccccgcccggtcagccaccccgtccgggagggaggtgggggggnnnnnnnnnnnnnnnnnnnnnnnnnnnnnnnnnnnnnnnnnnnnnnnnnnnnnnnnnnnnnnnnnnnnnnnnnnnnnnnnnnnnnnnnnnnnnnnnnnnnattagttttttccacctttattttcttgtctaatctttgttgctttttttttttttcgagacagagtctcgctgtgttgcccaggctgcagtgcagtggcgtgatctctgctcattgcaacctctgcctccatggttcaagcaattcttttgcttcagcctcccaagtagctgggactacaggcgtgcgccaccacgcccagctaatttttgtatttttagtagagacaggttttcaccatgttggccaggctggtctcaaactcctgacctcaagtgatctgcccgcctcagcctcccaaagtgctaggattataggcatgagccaccatgttcagccccttgtggcttttttacaaacaagaaaactgaagcttaaggggctacgtgacttgcacaaggtcaactggctggtcgatggaacccaagtctgtctgctccaggtccagtgctttgtcctctgcctaacctcctcctcctattcccccctacttcctctctgtcctttccacagctttcatcctgaactcccgtctggtacatccccactccctactgtgtgtggttagcagcatttctcaacctctgttgatgttttgggccagataattctttgtcataggggcctgtctgcatgttatagatttttttttttttttttgagacggagtttcgctcctgttgcccaggttggagtgcaatggcatgatctcccctcaccgcaacctctgcctcctgggttcaagcaattctcctgcctcagcctcccaagtagctgggattacaggtgcccaccaccatacccggctcatttttgtatttttagtagagacgggggtttcaccacattggccatgctggtcttgaactcctgacctcaggtgatccgcccacctgggcctcccaaagtgctgggattacaggcgtgtaatcctgtatagaattatacacgttatagagtctttagcagcatccctagcttctacccaccagatgtcggtaagcaccgccaagcaggacaaccaaaaatgtctccaaacattgctaaatgtcctccgggggacaaaatatccccagttgagatccttattagccttatcctttttcttcaccatgataccccatgaaggggatctgtgtaccggggagtcccatcacatggagtggaattaaacatctttgctgttcaatccagctagagttcaccaaaagggtgcctacagctgtgctgagcctgtcatactactgaagttcctcaggctgtgttgtccaggatctgagtgagaaaaaccctcctcccttctcagagttctcaggccagaaaggatggagtgggggcaggggcacctgggtcttttagtgcttcctggggaagaatcctctaccctgcatttgtagagagacccgaagagcacaggagcactgggcttggagcaaggccttcctgtgaggtctagagacactgcacctcccaactggacctcacttggcttccgcaggaaatcctgcatctttttttttttttttttttttttttttgagacaagggctcatcctgtcaccatggctggagtgcagtggtgagatcatggctcactgcagcctcaacctcccgggctcaagtgattctcccacatcatgctcccaagtagctgagagtacaggtgtccaccaccatgcctggctaacttttgtaaatttcttttctgtagagacagggttttgccatgttccccgggctggtctcaaaactgctgtgctcaaaggatccacctgcctcagtctctcaaagtgctgatattacaggcatgagccaccgtgcccagcccaatcctgcatcttttctagagcagctgattaccatagcatgtggagggagagggccaggcctcagttgagaatctggtgaaagctgtgatcccttaccccagaaacgtacattatacctgtagcatcagggattcacagaacccaaaagccatccatccatccatccatccatccgtctgtccgtccatccatccatccatccatgcattgcaggctaggaagttttaccttatgcttgcacttactcttggggttgagatggagagggaaagttctagagctctctccctgcttttggagggcatggcagcacacctttttatcctggccctaagccctaggctaggccaaggaattataatgtgagacaaggatgtacatcaaggagatgagctgagagagaaaagctggaccaggtacagagtataggaagaggggtgacaatttcgagctgactccttctctgtttcagcccagcctgagggcagggtccagctgagggaaggaagaggagaagaaaggaagggggagagatgagccatgcgctgcggccccctccttccccagctgcgagcagagcagccccagcgggttggatgaatgctgggaggggggagagtgaccctggcagaaccctttgttccagctgaggctggagcagggcactgagccattcacacgccatcccagggcatcctgctgggcacgctggggagggggcacagcagctggtcatgggacttggccaggcagatagctcgatgctcaatagggaagcccagctgcgtgctgctgaagccgggggagaggctgcatctgccagccttcctcaaggctgtggcctgtgccacagacaggaaggccctggcaggtcccagttactctgccctgaggtggcctgggggactcagagcagcccaccctgcttcctgctcccctgtgtggattccttatcctaaagaggctccagcattttaattccaccattagttcttgccctccctggccaacatcccagggtctggtccaagacagaggcagagcgtccatatctcaacctagttttagtgagaaggctatggaggcctctcaacatcaccctttctgtcccttgttcctcttcttcaaaagcaccaaacctctgagtggcatcatttttttttggagggggttgtttctttttttcttttttgagacaaggtcttgctctgttgcacctgctggagtgcagtggtgtgatcatagctcactgcagccttgacctcccaggttcaagcaatcctcccacctcagcctcccaagtagctgggactacaggcacatgccactaccctcagctaattttttagttttttgtagaaacaaggtctcactatgttgcccacgatggtcttgaacttctgagctcaatcaatcctcccatctcagcccctcaaagtgctgtgatataggtatgagccactgtgcctagcctaggtggcatcatctgtttctgggcccttagaggtgccatgcaaaaaagccctgtcatagagcgggtcacctggactctttgtaagcccaaagtcagagggtatctgctgggtcgtttatgccctggaggaggcatggttttactgcctgcatctcccttgaagtgtcactgtgactctccaggtgacagtgcccctggactaggctcctctactttcccctcggaatgggcttgggttgagtgggagctgagccctcactgattccttttccctccgcccaggcctggccagcagccccgagtgtgcttgtggtcggagccacttcacatgtgcagtgagtgctcttggagagtgtacctgcatccctgcccagtggcagtgtgatggagacaatgactgcggggaccacagcgatgaggatggatgtagtaagtacctccccagaggcagtgggaggtggtggagagggacctgggggtggggggcaaggacaaggctgatggagtattttctgcatcaactgtgtcggactcagagagttggtcttttgcaagcttgatagatattgacatttgggtagtttcttcactatatatggctccaactctcctgtgtttcttttggttggttcatgcatatatgtccaagaaaccaaacttgacaacacgtgtaannnnnnnnnnnnnnnnnnnnnnnnnnnnnnnnnnnnnnnnnnnnnnnnnnnnnnnnnnnnnnnnnnnnnnnnnnnnnnnnnnnnnn

SEQ ID NO: 1284 - protein, 348 aa, Homo sapiens
MTCSECYVMNWKLSPVLPTCSPLDFHCDNGKCIRRSWVCDGDNDCEDDSDEQDCRQHWSYLTAPEGFKSGFQAPDPHCLQQPDCSVPTAPRECEEDEFPCQNGYCIRSLWHCDGDNDCGDNSDEQCDMRKCSDKEFRCSDGSCIAEHWYCDGDTDCKDGSDEENCPSAVPAPPCNLEEFQCAYGRCILDIYHCDGDDDCGDWSDESDCCEYSGQLGASHQPCRSGEFMCDSGLCINAGWRCDGDADCDDQSDERNCSLASSPECACGRSHFTCAVSALGECTCIPAQWQCDGDNDCGDHSDEDGCSKYLPRGSGRWWRGTWGWGARTRLMEYFLHQLCRTQRVGLLQA

SEQ ID NO: 1285 - DNA, 39729 bp, Homo sapiens
  source
  (1)..(39729)
  CDS (201)..(409)
  CDS (1705)..(1966)
  CDS (3861)..(4281)
  CDS (6128)..(6513)
  CDS (13450)..(13658)
  CDS (15064)..(15254)
  CDS (15941)..(16150)
  CDS (20045)..(20170)
  CDS (22124)..(22422)
  CDS (22512)..(22683)
  CDS (23437)..(23604)
  CDS (24073)..(24309)
  CDS (27352)..(27646)
  CDS (28263)..(28408)
  CDS (28910)..(29146)
  CDS (30241)..(30380)
  CDS (36370)..(36640)
  CDS (36749)..(36992)
  CDS (39268)..(39529)
cccacctacttgggaggctaaggctggagaatcgcttgaacccagggggcagaggttgcagtgagccgagatcgcaccattgcactccaggctgggcaagaagagcgaaactccgtctcaaaaaaaaaaaaaaagatgctggttcctaaaatgtggcccttttcctcctcacctgctgccagaccatcagccgcgccttcatgaacgggagctcggtggagcacgtggtggagtttggccttgactaccccgagggcatggccgttgactggatgggcaagaacctctactgggccgacactgggaccaacagaatcgaagtggcgcggctggacgggcagttccggcaagtcctcgtgtggagggacttggacaacccgaggtcgctggccctggatcccaccaaggggtaagtgtttgcctgtcccgtgcgtccttgtgttcacctcgtatgagacagtgcgggggtgccaactgggcaaggtggcaggctgtccgtgtggccctcagtgattagagctgtactgatgtcattagccttgatggtggccaggactggtagggccctcagaggtcatggagttccttcgtggagcgggtgctgaggctgtatcaggcacagtgctggctgctttcacctgggccgtctcaccgaagtgtccatggagcctgcgtagggtgggtatctgtgtcgattttacagatgcagaaacaggctcagagaaaccgagtgacttccctaaggtcacatacccagttagagcagagctgggccaggaagtgctgtctcaggctcctgaccaggtctccttgctttgcactcttgccaaaaccatgatccagaactgactttgaggtccccggacctcaggctcctccgaaatggcctcttggaggctgctgagccacagcttaggacccacctcgagaggcaaatgtgctttgagctgccaggcgtcctgggggccctgccttgggcacggggttcagacaggccccagatgtgtggggcgtctttctggacttgagttttcttttctgtgtggtggacacagtgctcaccccttaaagcacctgtgatgtgtgcagcagcccaatccctgcctgtcgcctgttctgctagggaaggaaggaagacttcaggatggcaggacaacagaaagaggtccaggttttagagcaagggcaggtcaaacttagaaaattctggaatgaggatgtgcatttcctcttctggatctgctaaaagaagagggaaggaggggctgctgggggaggagcccagagccgagtttacatccggatcccgcaaggcctcccctgccctgaggtcttgttttgtgatgtgcttgtgtccatcctggtttctgccgtgtccccaacatccggccaagcttaggtggatgttccagcacacactcaccctgtctgtgcacctgtttttgtgtccgtaagtgggtatttactcaccttacgagtgagccactgtgggaattcagggaggtggcgcagtgaccacccctggagggatatgtgtgtggcaggggtcgagggtctcgcccttccctgcttcctgcgcgtggctttctccaggacggggagggctgagctgaagaggtggggacagttgcgtccccccgccacccactgtcctgcggtgagagcagactcactgagcctgcccttctcccttgtgccttccagctacatctactggaccgagtggggcggcaagccgaggatcgtgcgggccttcatggacgggaccaactgcatgacgctggtggacaaggtgggccgggccaacgacctcaccattgactacgctgaccagcgcctctactggaccgacctggacaccaacatgatcgagtcgtccaacatgctgggtgagggccgggctggggccttctggtcatggagggcggggcagccgggcgttggccacctcccagcctcgccgcacgtaccctgtggcctgcaagttccccaacctggcaggagctgtggccacacccacgactgcccagcagcctcaccctctgctgtgggagttgtccccgtccacccctgggtgcctttgctgcagttatgtcgggagaggctctggtgacagctgtttcctgtgcacctgctgggcactaggtcccagctaatccctgtgccaggactctaatttcaccctaacacacatggtggttttcattgctggggaagctgaggcctgagcacatgacttgccttaggtcacatagctggtgagttcaggatcccccagagataccagggccagcactcgatccccacccagccctgaaccccaccatgtgctgggattgtgctgggagtgtccacacgcctgggaccccagggctggtgctctcatctcctttttccagatcatgagaatgaggctcagggaagtttgaaaaaaacctatcccaagtcacacagcaacaggagcaggatttgaacccagaaaaggggaccgcacactctgttctgctagagtagttagctgtcctgggtgatatggcaggtgacaggggcaactgtgcttaacaaaggaacccccatcccccctgccaagttgggagactagaaggtcaggggcagaagctctgaagggccaggtgcagtggctgacacctctaatcccagcactttgtgaggccaaggcgggcagatgatttgagcccaggagttcaagatcagcctgggtaatgtagtgagacgccatctctacaaaaaaattttttaaaaattagctgggcatggtggttcatgcctgtagtccaagctacttgggaggctcaggtgggaggattgcttgagcccaggaggttgaggttgtggtgagctgtgatcatgccactgcactccagcctgggcaatagagtgagaccgtctccaaaaaaaaaaaaagaagaagaaaaagaagctctgaggctccaagtccccaggcaccccttggcttgagggcagacaagggaggagagggtcacctgggcagccctgacttttgtcccctggcaaagggaccttcagtgaccttggccctaggagagcctctgagcacgtcagccatgtcgaaccgctcaggaagggcagcaagaatttggcttctgacctctgcctctcctactcgccatctgcactgggtgtggttgtgcccattttacagatgaggaggctggggcatcgaccagctgaatgccttgtcccaggtactgcgtaggcagagctggcagttgaaccccgtgtcctggttgtcgctgggggtgggctgcaccctgacttgtgaggccagtagcaaggtttgcacgtgacttcgtgaccgtcacccagctctgcagcacatcccgtgacccagctcatccaggccgcatgcaaacctgttgccaggcgagaaaccagtcaccgcacagctgtggttgcctgaaatgattaagctcattaatcaccccggagtgaggacagactcagatgaaaaccagcaaaagccctggaaactcatgtgaccctgccaatgagggcggccatgtgcattgcagcctggccgtcactcctcggtacgtgttttggacttaaacgctccggatgtttactgagtgcttgattaataacatggaaggcctggtctcattgctgtgggagtgaaggatgcacagccaggcctgacatgatgagaacaagaacctggagtctcgctgcctgggtggtaatcctggccctgccacttagcaactgtgtgactgtagccaggtcacttaattttgctagatcctgcctgcgcttcagtggatcttgctggttttccaaggtggccaaacactttaaggcattcatgtggtcgctaggctgcagggttgaaccctggctcaccccgcagggcgccgtgtgctctgtggcctggctgtgcctttgctgacaccgtgcccgtgtgtgttcatgcaggtcaggagcgggtcgtgattgccgacgatctcccgcacccgttcggtctgacgcagtacagcgattatatctactggacagactggaatctgcacagcattgagcgggccgacaagactagcggccggaaccgcaccctcatccagggccacctggacttcgtgatggacatcctggtgttccactcctcccgccaggatggcctcaatgactgtatgcacaacaacgggcagtgtgggcagctgtgccttgccatccccggcggccaccgctgcggctgcgcctcacactacaccctggaccccagcagccgcaactgcagccgtaagtgcctcatggtcccccgcacctcactccctcgttagatcaggctggttctgggagctgacgctgaaaggagcttctcatctggggttcctgggtgtacatagatggttgggtaggttgtgcactgcacaagctgcatgatgctacctgggggtccaggtccaggctggatggacttgttgcttcatcaggacatagataaatggccaaaactcctcagctggaaggtcctgggcaggatctttgggtgtgaaaaccagtcacaggggaagggtgcttgctcatactgccagcacagtgctgagtgctttccatagcgctcgtttactcctcaagcctggagggtggggagtagcatggtcccatttcacgtacaaggaacccgatgcacagagaggtgtggcaacccatccaaggccatacaactggggtgggttgagccggggttgactgtggcaggctggctcaagagtccctgctcctgaacccttgccaggcagcctggcatcagctcggggaatttttgccctgacccttggaagcaagtgggcctctttgttctcatgtcagtgatgagaagagtgactttcctatggcccctctggagtacaggtgtttcctgttggcgggctcttcccccatgacatcagcagcgagctggttatgattccctacgcagaacttgatagtttataaagctctttgtcatccaggccccgttggagtctcacgcagacctggtcgcaggcggggctggtcttgcctgtcccagctgcatggatggggaacttgaggcttgcaaaggttaaggggctgttcgaggcccaggctggcaggagatgggcctgggccagagtctgggacttcccatgcctgggctgtctttggtcctgttgctcaccatccctccctggggccatgaccttagagagccaaatggaggtgcaggtaacccacggcaaggaggggttgccatgactcagagtccccgtcctgtggccggcagtacctggtgcaacgacttggatttcagaccagccactgtagcccgctgacggtgcgctcgaagtgccacagcttctgaagccaggcaggactcaggccaggagactctgttagctgttgagagggagaggccaacggatgttctggttctgctagagagctggttcttcggatcctggtaccagtgcactgagaggaggcccagcttgattctggggctgccttgtggtggcatgtgctgctcactgacaccctcgaggagtgtcttctctcgggcttgttgactgtgcccggttttccgcagttcactggtgcacacataggcacatagcaaaccgcacacacagtcgtgggtatgagtttcactacattccaccaccagtgttcactaccattacctgccttccgtcttaagtgttcatcatttaaaaataaatttattgggctggacgcggtggctcatgactgttatcccagcactttgggaggctgaggcgggcagatcacctgaggtcaggagttcaagaccagcctggccaatatggtgaaactccatctctactaaaaatacaaaattagctgggcatggtggggcatgcctataatcccagctactcaggaggctgaggcaggagaatggtgtgaacccgagaggcagagcttacagtgagcccagatagcaccactgcagtccagcgtgggcaacagtgcgagactccatctcaaaaaaaaaataaataaataaaagaaaaataaatttatgatctatttcaaaaataacacatgtactttgaaacagcagagacacatatgacacggagaatgaaattccccatagcgcacccccaagagacagccctggtccccccgtctttcccgtggacctccagcggggcagatgctgagccgcctgttgtcgagtggcgtgctatcccgtcctccagctcctctgtggcttacagacacccacctgcagccctgtctttgcctcctctagcgcccaccaccttcttgctgttcagccagaaatctgccatcagtcggatgatcccggacgaccagcacagcccggatctcatcctgcccctgcatggactgaggaacgtcaaagccatcgactatgacccactggacaagttcatctactgggtggatgggcgccagaacatcaagcgagccaaggacgacgggacccaggcaggtgccctgtgggaagggtgcggggtgtgcttcccaaggcgctcctcttgctggtttccaggctgctgcccctgtccttagcagagggaggaaacagaggatggctctgggtgaatgatgacttgggcttcgattatgtagtcacagggtatgaccctgagatgcgtggaaccccgagactgtgattatatgtagaaactgggtttccccgttgtttaagtagtcatggtggggtcagaccccacaggacttttgtcttttcaagaaagaaaatggtcgtgtgtcatgcaggggtagttggtactggttaatccaggtttatcctttattttgtgggaactgtacagtcatttctgctacaatgctgtatatgctcttctgaaagacacctatgcaaaatcgcacagtaaaaatgacacaactcatagggaaagcggggccagggcacagccctcaaaatctccatcaatgacatgtaagaaaagagaggaacctgggaaatagcaaagtgccttttgcacattaaatggttagctatatcccacaatactgtgcattcgtaaacgttaatgctgcaataaatacggcacttcaccttgggaagatctggagttggcttatgagtgtggaagggtgtagcgcatgagtttttgtgaaacactggaaggaggattgtgggaaatcaaatggaaagttctcaccccaggcgtggagaagagtgggtcatggccccagcagtgagcccagggaggtcagagacggaggtgtgtgtgtgggtgtgaccctgcgcagttccctgccggctgtagttttttgcattcgcttaatgtttctcgtggaggaaattgtgcatgagcaaatgtgaaaccgtgctgtgctcaaattgtcctaatacatcattgcattggaacagaggggcttttttttttttttttttttttttttttttttgagatggagtctcactctgtcaccagcctggagtgcagtggcatgatcttggctcactgcaacctttgcctcctatgttcaagtgattttcctgcctcagcctcctgagtaactgggattacaggcatgagccaccgcggccggccagatttgcatttttgaaacaactgctaggctgggcgcggtggctcacacctgtaatcccagcactgtgggaggccgaggcaggtggatcacctgaggtcaggggttcgagaccagcctggccaacatggtgaaaccccgtctctactgaatatacaaaaatcagctgggtgtggtggcgggtgcctgtaatcccagctactcaggaggctgaggcaggagaattgcttgaacccaggaggcagaggttgcggtgagccgagatcacaccattgcactccagcctgggcaacaagagcaaaactccatctcaaaaaataaaaaatagaaaaacaagtgctgtagcggaagtgagcactttgcggagtcaggcttgtgtggcctgttccacaaatgatgtgctcacggtggcctcaggcccacctggagtctgcagcatggggcacaacaggttcattagtgtagaattccaggacaggcctggctcctaagcagccttcttttacaaaaactgcagagcccgcctgtatcctagcactttgggaggccgaagtgggtggatcacgaggtcaggagttcaagaccagcctggccaacatggtgaaaccccatctctactaaatatacgaaaattagctgggtgtggtggcacgcgcctgtagtcccagctactcgggaggctgaggcagaattgcttgaacctgggaggtggaggttgcagggatctgagaccatgtcattgcactccagcctgggcaacagagcgagacgccatctcaaaaaaaaaaaacctacagagccacacggcctctttctccaccgagtgttggtgtgggagcttgtgttattgtggtgaaatcttggtactttcttgaggcagagagaggctgagcgcctggagagactttcacatgggtcgccatgtccgccgtcggtttcgctgttgtgctccccatctgaaggctggtgccgtccagacaggctggacgcccctttccaccagatccttcctcccgcagcagtttctagttacgttgtactgtgaggtctgtgtccttggttgatggcaaaagtcagccgaattgaaattcagagccatgcctggctccctggagcttctctcctgggcagctgtgatcattgcctctgctgtggtgtgggtggtggaaatggattcctttcatcttgcttgctacaggtgactgtcacgtggagtcctttggagagagggacgtgttaattgatggatgtggctcccatgctgagaaagctcctgggcgtacattgccttagagtttcattggagctgcgttcttttatggtgtctgctaggcagaagtgatgaagacttggaagaaaacccagaaggttttccacttaatttggaaaatgtgcttttcccctcctgtgtcttttgctaaggtccagcctcctgcagcctccccgctctgtggactctggctttgattctttattaggagtccccctgctcccccaaaagatggtgtctaaattatcatccaattggccgaggttttgttttctattaattgtttttattttttattgtggtaaatttatataacataaaatttgccattttaattgttttgttattgttgtttttgagacagggtctcaccccagtgcccaggctggagtgcagtggtgcgatcatggctcactgcagcctcagcctccagggctccagtgatcctctcacctcagcctctctagtagccgggactacaggcatacactaccacatctggctgattttttgtattttttttttattgtagagacccgctatgttgcccaggctggtctcaactcctggactcaagccatcctcccacctcaccctcccaaagtgctgggattacaggcatgagccacaacacccagccattttaatttttttttttttttttgagatggagtctcactctatcgcccaggctggagtgcagtggcgtggtatcaactcactgcaacctctgcctcccaggttcaagcgactctcctgcctcagcctcctcccgagtagctgggattacaggtgcccatcactatgcctggctaatttttgtattttttagcagagacggggtttcaccatgttggccaggctggtcttgaactcctaacctggtgatccgcccgcctcggcctcccaaaatgctgagattacaggtgtgagccaccgtgcccggcctttttttgtttttgagacagggtcttgccctgtcacccagactggagtgcaatggtgggctcttggctcactgcagcctccgcctcccaggctcaagttgtgcacctccacacctggctaactgtattttatgtagagacagatttcaccatgttgcccaggctgggcttgaaatggactcaagcagtccacccacctcagcctcccaaagtgctgagattacaggcgcgagccaccgcacccagcccattttacctattctgcagttgacagttcagtggcattcagtcagttcacgaggtaaccatcactgccattcatctccagactacttcaccttctcggcagatgtccgaaactgtccgcattgaacacactcctcatctccctctgacagccaccattctactttgtatctctctctgccttctctaggtaactcatgtaagtggaattataccaatatttgcccttgtgtgactggcttctttcatgtgacatggtgtcctcaaggttcatctgtgttatagcctgtgtcagaatttccttccttaaagcctgaataataacccgttgtaaaggctgggcgcggtggctcacaccctctaatcccagcattttgggagtccgaggtgggcagatcacttgaggtcaggagtttgagaccagcctggccaacatagtgaaaccctggctctactaaaagtacaaaattagctgggtgtggtggcgcgcacctgtaatcccagttactcaggaggctgaggcaggagaatcgcttgtacccgggaggcagaggttgcagtgaaccaagattgtgcctctgcagtccagcctgggtaacagagtgagacttcctgtctcaaaaaaaaaaaaaatcatcggatggatggacggaccacttcttgttatttatccatccacgggtgctaggtttcttccacctttggttgtcgtgaataaggccactatgaacatttccttccgtggtgaaggttttgtactagtgaggaaaaggcgtgtttgtggtgttgcataggattctggtaagaaagtttgcactaaccataagtatttgtactacattaaaatgaaagctcaggggccgggcgcggtggctcacgcctgtaatcccaacactttgggaggccagggcgggcggatcatgaggtcaggagatcaagaccatcctggccaacatggtgaaaccccgtctctactaaaaataccaaaaaactagccaggtgtggtggcgggcacctgtaatcccagctacttgggaggctgaggcaggagaatggcgtgaacccgggaggcggagcttgcggtgagccgagatcgcttcactgcactcgagcctgggcaacagagcaagactccgtctcacgcaaaactctgtctcacgcaagactccgtctcaaaaaaaaaaagagttcagggtttatgaaactggccagccgcgtaaagtttgctgtgttgtttttgtgcccgggaggagtgtggccagggtgtcacgtcacacagtacacgtttctcagatggtggttctccagactgctgtcccaaagtctgtttttgcatctggttcccacagacccaccctccacggtgagcctgattttggccagggtagctggaatcttgcttgtctttcagcccggcagctgtaccagtccagggtccacagctagtggcttttaggaaggaatttgttcagttggctttgacacatggccccctagggtccacagctctgtagtgatgtggatgttgttatctacaaagacacatgatccttcgtgtccagatgaaagtgatgatgtctttgcagctgcccagcaaggctgtgtgtgtgtgtgtgtgtgtgtgtgtgtgtgtgtgtggtgtgtgtgtggtgtgtgtgtgtgtatgggggagggaggcaccctttccatctgggggtgtgtgtgtgtggggtgtgtgtgtgtgtgtgcgcgtgtgtgtggtgtgtggtgtgtgtgtgtgtatgggggaggcaccctttccatctgggtccaagagactgggcctggggaagacgcttctttttatctacttagagactttgttttatttgtatttttttgagacagggtctcactctgtcacccaggctggggtatggtgatatgagcatagctcactgcagcctcggcctcccaggctgaagcgatcctcccacctcagccttctgaatagctgggactgtaggcgtgcgtcaccatactgagctattgttttttttgtttggttggtttaattttttttgatacagatggagtcttgctatgttgcccagactagtctcaaactcctgaactcaagtgattctcccacctcagtttcccgacattctgggatcacaggtgtgagccactgctgtctccctgttttattaactgctgaaagacctagataaagaaagtctgaaaagacttactatcagagcaccatcctaagatgattccctctgactcaatggagagggaggggagcttttccttcaggcctgggtggcaggagcccaggtgctccaggccccatttgccccaggccaaatcactcgggaacttggatgcagctgtctttcagggtaacccaaaggaaccagatccccgcaggcagtaggcttctgggctgtcctctcctcctacgtcagctcagtaagagcccttcgaagggatgctgtgtcggaggccccaaaagcccaggctcatccctgagatgcacagggtgggctgggcttaggcagcgctcgagcatctcctggacggtgaccccagagagtgtggagacggagagtccttgagagtcactgagagacgtggctgccctgccttcccaagaggggctctgagtcattccccacactcacctgcccctacccaccctcacctggcccccagcctcacctacccccacatctgtaccgatccctttacccgcaccttccctacccaccctcacctcccctgtaccttcacctcccccactcacccgcccctgcaccctcacctgtcccccaccttcacctaacccccaccctcacctgccctcccctcacctggcctccttccgttggggaaggggttgtaaggggcggcccccaaactgtctgtcctggtgccctgcagagaaaacagtacgtgagggccgcagtccaaaagcttgagtcctggaaggtggaggagacagggatgtgttgggaagggccccatggtcttggatcccttctcgactgtcaatggggccttcatgggagcgccagtctagtgatgcacagctgggtgcccggcgggtggctgaggaggcctaaagtccgaggcggcaagagctcttccagaggctgttgtcctaatcgctctggcatactcaggcgggcacgtagttaggagctgattggagaggagagacccccacaccaatactgggatttgactttcaggctaaacttgagaagtgtggcctctgctgtcctgccagagctctccagccagtgcccagggctctccagccagtgcccgggggtctccaccagtgcccgggggtctccgccagtgccaggggtctccgccagtgcccaggggtctccgccagtgctcaggagtcttggtttctttgtcttacagccctttgttttgacctctctgagccaaggccaaaacccagacaggcagccccacgacctcagcatcgacatctacagccggacactgttctggacgtgcgaggccaccaataccatcaacgtccacaggctgagcggggaagccatgggggtggtgctgcgtggggaccgcgacaagcccagggccatcgtcgtcaacgcggagcgagggtaggaggccaacgggtgggtgggggtgctgcccgtccaggcgtgcccgccgtgtcttctgccgaatgccagcctctcacaggctggggagactttccaccctggggatccaatgggtggctttccagggtcccaaaagcaaacacaggctctttcacagcccctccaggaaagcagaaagccccaagggctggaagggaagggggagctctgctgagaggttacaaggcagcgctggccgacgggagttgcagttgataggttttgtatcatccttgttaaacttgaaccctgtgcagaaatcccttccacggcatgggggctgcctgttgactcgctcctgttccaccacagggagctcctgggcttcttcctcccagaggcccccgacgctcccacctgttggtcgtcagagcttctggttggtgggaaggcacccaggaccttgaggtctccagagagaaaagccagggaaagagggagaccgaaacccatgtgacatgaaactcaggctccaaactgagcacgggaacgtttggggacaggagcgcgatggccttcctcagatagctggggggctggcatgaagacgggagctacagccagcacaggtcctgggccgggagcccagagattgagccctgactctgtcacttactggccacgtgaccttgggcgggtggcatagcctcttggagactcagtttcctcattggtaggagtgacggccacagtggtgcggcctctgcagcacacggggggctcggtgggcggaagccccgggtctataaggcggctgtgcaggagccagccgagctggtctcccaacagccagggctccggggtccttagcagctgtggggggcctgcacctgctttcccatggctgctgtcagaaattaccagaagccaggtggctgagagtaatggacacttgttctctcacagttcctgagggctgaagcccgagatcgaggtgtgggcagggccctgcgccctctgaaggctctgagggaacctttgggcttctggtggctccaggcaccccttgacttgtggtcctgtcactccagtctctctgtctggctgcacatggcgtggcctcttctgtaccattgaaggacacttcagttggatttagggcctaccctcacccattgtggtcgtatcttgatccttcatgacatttgtaaagaccctgcttccaaataagctcacattctgaggttctggggtgagcgggaatttggagagcattgttcaactagtatagaatgtgacctgtcagcctcgggcagccctgagaggcaggggctttccacagcccagctgggtgccctgggctccgtgctgtccgaggagacgccatccccacacccgtccttcacccgccaccctcccgcaggtacctgtacttcaccaacatgcaggaccgggcagccaagatcgaacgcgcagccctggacggcaccgagcgcgaggtcctcttcaccaccggcctcatccgccctgtggccctggtggtagacaacacactgggcaagctgttctgggtggacgcggacctgaagcgcattgagagctgtgacctgtcaggtaaggggccccggggcctgccctaaccgcagacacccggccttcattgtcagtaatggcagcagctgccacattgtccgagacctgccgtgagcccagtgccgcgccaggggctttgtgtgtagcgtgttttgtcctcacactgacagctgtaggctggggttctgagtgagccccacagggcagaggcagaaaatgagtctcagagagggtgagcgagctgcttggggccccacagcaggagatggagcaggagtgcagcctagcctctgcccccagcacctgcgcaagaagctgctctgctctggactgtgttaggctgcgagggctggagagaaatgagagttggtgcttagagagggggcgcaggtccccatggcttttcctcttatgatgaggtagatgggtgaagggaggggccatgcttgcaggggccagtgaccgaggcccgccgttggaactgatggccttcatcccgagcccagcccaggtgggagcagggctttccgagggcttgtcttgggtcggcctgcttccagggactctgctgcagctcccacccctgtccaaagcatggaatcccccaggctccctggcagtcctgtcaacctctgtcctcccaagctgagtgtggggcaagttctggaggtcagcactgctcaggggggcccacgggctgcttgcaggggccaaccgcctgaccctggaggacgccaacatcgtgcagcctctgggcctgaccatccttggcaagcatctctactggatcgaccgccagcagcagatgatcgagcgtgtggagaagaccaccggggacaagcggactcgcatccagggccgtgtcgcccacctcactggcatccatgcagtggaggaagtcagcctggaggagttctgtacgtgggggctggcagtggggtgggcagggtggcctctaaacccgacccctggaggaggctggaggccagtgcaagatcctgtgtggcctcagccaggcggtggtctctgccagatgccaactgttgcccgctggggttcagcgacatgtccgaatgtcccgaggcctctgaggttgttttcttttgccgcagaacaaatcaccacgaacagcgttttaagacaacaccaactctttttttttttttttttttgagtcaggatcttgctctgttgcccaggctggggtgccctggtgcaaacacagttcactgcagcctcgacctctgggcttaattaagtgaacaccttgcctcagcctcccaggtagctgggactacaggtgggcaccaccacacctggctaatttttttttgtagagacggggtttccccatgttgcccaggctggtctgcaactcctgggcacaagctatctgcctgctgtggcctcccaaagtgctaggattataggtgtgagccactggcctgacaacacccacggattgtctctcagttctgtaaggcaaagtccaggcacagcgtggctcacctgggttctctgctcagggtctcacggggccagaatcaaggtgtcaggaacgctgggccctcagcggaggctctgtggagaaattagcttccttgctcactcagcaggtagcagttgtgggatcgaggttctgttttctctctggttattggtcggggaccactctcagctcctagaggccaccacaggtccttgccccgtggccctctctgcctcagcagtgggggctccctgcgtcagtccctcccacaccttgagtctctctgatttgcttctaaagggccctgtgattcggctcagccacctttagattaggttagcctcccctttgatagactccaagtcggctgattaataaccttaatcacatctgcagaatcccttctgccacataaggtcatgacgccgtgctggggactggggtgggaaattacggggtcatttaggattctgcctgccactgccttgctgtgtcccagggcttgggggaggggcctccacagctgggaccacagtccttcctcccctccatggtaaccatctgaggattacttgagaccagcctgggcaacatggtgagaacccatccctacaaaaaatacaaacaaaaagggaccaggctgggcttggtggctcatgcctataatcccagcactttgggagaccaaggtgggctgatcacttgaggttgggagttcgagaccagcctgcccaacatagtgaaatcccgtctctactaaaaatacaaaaattagctgggtgtggtggcaggcgcctgtattcccagctactggggaggctgaggtgggagaattacttgaacctgggaggcggaagttgcagtgagccaaaattacgccactgcactccagcctaggcaatagagtgagactccgtctcaaaaaaaaaaaagggccaggggtggtagtgacaaagagaccctatcccaaaaaaaccgaacactgaatccttgagactgagtaaggacactgtgaaatttttctgggtggggcagggaacagagcgtcttctgtcatttcttccacctgggtgtggtcagctctccctccaagctgcctcctcttcttctcattgtccgggtgttggacacatttggttaactggatagaataacgcgagttcccagggacttggtccatttgctattttattttattttattttattttattttatttatttatttatttatttatttatttattgagatggagtttcgtttttgtcgcccaggctggagtgcagtggcgcgatctcggttcactgcaacctctgcctcccaggttcaagtgattctcctacctcagccttccaagtaactgggattacaggcacccaccaccataccaggctaatttttttgtatttttagtagagacgggttttcgccattttgcccaggctggtcttcaactcctagcctcaggtgatccacgcacctcggcctcccaaagtgctgggattacaggcatgagccaccacgcctggcaccatttgctattttaattcccatgtgtattagtgtcccacggctgctgtaacaaatgaccacaaactggatggcttaaagcaacagaaatggattcccccaatgtgctggagaccagaagcctgcgaccaaactgttgggagggctgtgcttcctctgggggctccagggaggatctatttgttggcccttccagtgctgtgggtgccagcgttccacacttgtggatgcgccgcctcaacctctgcccatcttcatgtgtccatctcctttgtgtctgcgtctttacctcttcttcttgtctgtgttgcctcttataaggacgtttgtcattgggtttagggcccacccaaatcatccgagatgacctcgtcttgagatccttaacctgcaaagaccctttttccaaaaaaaggttatgctcacagattctaggccttaagacatgggtgtatctttctggggggcactatccaaccccttatacaatgaaagacgggaagagggccaggtgtggtagttcacgcctgtaatctcagcactttaggaagctgaagcgggaggatcacttgagcccaggagtttacaagtagctaggcaacatgatgagaccccatttctacaaaaagtgaaaaaaaaaaaaaaaaaaaaaaagccaggtgtggtggctcacacctgtaatcccagcactttgggaggctgaggcaggcagatcacgaggtcaggagattgagaccatcctggctaacacggtgaaaccccgtctctactaaaaatacaaaaaattatggccgggcgcagtggctcccgcctgtaatcccagcactttgggaggccgaggtgggtgaattacaaggtcaagagatcgagaccatcttggctaacacggtgaaaccccatcaagatcacaaggtcaagagatggagaccatcctggctaacacggtgaaaccccgtctctactaaaaatacaaaaaattagccgggcatggtagcgggcgcctgtagtcccagctgctcgggaggctgaggcaggagaatggcgtgaacccgggaggcggagcttgcggtgagccgagatcgctccatgccactgcactccagcctgggtgacagagtgagactccgtttcaaaaaaaaaaaaaaaaaaaaaaaaaaaagaaaattagccaggcacagtggcaggtgcctattgtcccagctacttgggaggctaaggcaggagaatggcatgaacccgggaggtggagtttgcagtgagccgagatcatgccactgcgctccagcctgggcgatagagcaagactctgtctcaaaaaaaaaagccaggcatggtggtgcatgcctgtagtcccagctactcaagaggctgaggcaggagggttgttcgacccacggagatcaaggctacagtgagccatgatcgcaccactgccctcccagcgtgggtgacagagtgtgaccctgtctcaaagtaagtaaataggaggagagacaagtgggcagttcagactgatggtatgggcacagtagagactggtgcagacaggctggcctgtgatgtcaagcaacttctgtaattgtttccggcatccatttgtgtgtcaatttccgtgtcagtaggaagactctgtaggctgccaagaggaataagtgggaggatcctcccagagaggccgggcctgcaggagggccagttctcatgagttctcatttggcccctaccctccaggctgtggttctgaggtgggagacagagcctgacctctgtttgtcttgttttgtctttgcagcagcccacccatgtgcccgtgacaatggtggctgctcccacatctgtattgccaagggtgatgggacaccacggtgctcatgcccagtccacctcgtgctcctgcagaacctgctgacctgtggaggtaggtgtgacctaggtgctcctttggggtgatggacaggtacctgattctctgcctgctaggctgctgcctggcatccttttaaaatcacagtccctgtggcatccagtttccaaagctgattgtgtcttcctttgccctcctttcttttctactatgtgcattcggtgctatgaattttcctctaagtactgcgtttcctgcatctcacaaattttgttacattttcattttcaggtagtttgaatatttttacacttctcctgagatgacatctttggctcatgtgttatttagaagtgttgcttagtttctaaagagttggggcttttccagctgtctctctgcaactgatttctaatttaattctactgtagtctgagagcttattttatatgatttctgttattttaaatgtgttgggtgtggtgtttttgttgttattgtttttgtgtctttttgttttgttttgcttcgtttgttttgtttttgagacagtgtcttgctctgtcactcaggctggagtgcaatggcgcgatctcagctcaccgcaacctctgcctcccgggttcaagtgatcctcttgcctcagcctcctgagtagctgggattacaggtgcacgccaccatacccagctaatttttgtatttttagtagagacggggtttcaccatgttggtcaggctggtctcgaactcctgacctcgtgatccgcccacctcggcctcccaaagtgctgggattataggcgtgagccactgtgcctggccattaggtgtgttttatcacccagcatcatgcagtttatcttggtgaatgttctgtgtactcttgaaaagaatgtggattctgctgttgttgggtggagtgttccagaaacatcaattagatccagttggttaatagtgctcatcaggttgtctctatccttccttcctgactgcctgcttgagctgtcagttattgacaggggtgtggagtctccaactctaatggtggatttgtttatttctcctagtagttctatctttttctctccttctacccttgatcctcttctccccctagggcttcctggtgttagtggtgggagagtggggtagtgaagaacctggactttagggccaaagaggccagggttcaaatcctggctctgtcacttcccagttgagtgaccctggctggtgcctgaatctctgtgagcctccacttcctcctctgtgaaattgagagcacttacctggcaggctgtcatgggcatcaagtaacagggcactccacctggaccctgacacgtgatgcacaggaatgccagctgctatgccatgggtgtggcagtagtaataaagtgaccatctgtatcctcaccacagtgaagcctgtccagggctttctctcctatgcccccatgcctccaggtggccttggatcctgttggttctgtgctctgctcagcgacctttctcccgtgggagttcctgggggttcagcttcatcctacagacagcagcacacactggctgtgcaccctttttttttttttttttttttttttgagatggagtctcgcttttttcgcgcaggctgaagtgcagtggtgtgatcttggctcactgcaacctctacctcctgggttcaagtgattttcctgcctcaccctcccaagtagctgggattacaggctcccaccaccacgcccggctaatttttgtattttcagtagagatggtgtttcaccatgttggccaggatggtcttgaactcctgacctcaggtgatccgcccacctcagcctcccaaagtgcagggattacaggcgtgagccaccacacccggagtgccggttgtttttagcagtttgtcttgttcctggagagactggctcctgcccaggagctcggggagtagggccgcggggtgctgcctcacacctcgagtttggccgtaagcagaggggacattttgtgactgtccccctcctgagcttcccagcagcttttctccaagttacagcccaaaagctcaggtggatttgcaacccaacggtgtctgtgcacctcccactgatgcccgaactgccctggccaagaaacggggccgtcagaacgctgcactaactgcagccttgggcctccatgccagaggccatgcccttccatccaccaccccctggcctgggccctgggccctcctggctcgggaactccaggccccttcctcacggctcgagagacgtgtatttaccgcacaggtgcttgtcattctcttgtggcctcttctccagggagatcacagaaggacagggcctcactgaggtctcggacatggaccctttgatagtggcaggagccaggctgggcaagaggcggccacagtcacctcagcagtgccatcaccaccgccattcagcccttccctgagccgggcgcgcccctggctctggccccagtgtcccagttacagctcacaggagcttgtggtgcccagcggctgcttctgattgagagtcgaggtcggaggctttgggaggctgagaggctgctcggtttcacaactgctgagggagacttgggctccatctcaggtctgccccatgtcgccctcaacctccagccaccggtcctccgtgtcccccatggccaggcacggcttgcagacatctgtcgttggctcctctcagccgtcgtgggctgaccctggcacgtcctcctgtggctgagcccagtggggacagctgcttccttttattaccctagaactctcgtctttgatcaggccccctcccctatgccacacagtccctgtcactcgggtgagcccagtagtcatggggaaggcctgcgggttccaaacatccaaaggcttgcgtgcagcatgacagcttgaaaccgatgttttttaccttgatcagatttcagcttggcgggggctttgctcagctttcagtgaggcctgggccgatttcccagcatcccctcctgaggccagcctctgtttcctgtgattttctgcacaaagtgggagggaggagtcctaggaaatggggggccacctcgaagcctaggcctcctctggcttctctgtgccagtgcccccacgctttgtgtctgtgtccccagcccatgggactctgctattccctgagtgctgccgcatgcccagcccgcactgaggacgtggagccccgaggggcaggatggcctccatggtcacacgtaggaagtggcctccaccctccgatgatcctctccctcctccctttcagcgccctccccgggggtgtcctcagccctcctgcctgtgctttgtcccgtcttctgcaggcgcctgggacgtgctgacaggtcctctgccggctcctgccttgctatgcgcacgctggtcaccacagaggcctggcccttcttctgtagcagtcccacacccgcaacaggtgtggctgctgaccacctgctttctgcccctctggtcctgaggagggcgcagtgggcactcaggcgtggctgagcagatgtgtgttgccgggaggaggaaggactgctccagtcagggctgaatttcccacccggagcatttctgctgtatttggtgtagcgcctgctgcttaaagctctgattcccagttggcaccctttcccttctgcattgaaaaacatacggatgcatgtcttcttgcagtgaatgtgtattctcccagcctctcttctgggttggggctggaggtggagcggcacacaggagccgcagcgatggaggatgtgcgggtgcagcaccccgtacagcagggatgccaaacccgcgctgagtccctctcaacttctgctttgaagcccagtcacgccattgcctgggttttgctgggcggggctgcgtgtgatgttctcctctgtccctcccccagagccgcccacctgctccccggaccagtttgcatgtgccacaggggagatcgactgtatccccggggcctggcgctgtgacggctttcccgagtgcgatgaccagagcgacgaggagggctgccccgtgtgctccgccgcccagttcccctgcgcgcggggtcagtgtgtggacctgcgcctgcgctgcgacggcgaggcagactgtcaggaccgctcagacgaggcggactgtgacggtgaggccctccccgtcaaggctctgccaagaccctggccctgccctccgggatacgagcttggggctgcctccggcctcacaggagtaggggctctgaaaacctttgcttgcagggagattgccaagtctgtcttttaggcccaacaaggaaaactctgcagttccacccatcctgtcccaccaggtagtgtggcttgaaggcagactgtgagggtctatctcaccttcctgcattaggtcaggagtttcacagaaacctgaggcacattcaggggtgggctgcagaggtccatggctcacaccctggaaaatccgcccccaaaagacagtgctgtctccactgaccagtctgtgggatagtgcttaagcctgagtggtttctatcaacatgtagaatcaggaggtataaagagatttgctcaggcatcctgggccctctctgaccagcaggatcttcctttagatcttgacagtgaaacacatctcttctgtgccccctgtgagttttctttcattcattcattcattcattcattcattcattcattcgagacagagtcttgctctgtcacccaggctggagtgccctggtgtaatctcggctcactgcaacctctgcctccagggttcaatcgattctcctgcctcagcctcccgagtagctgggatgacaggtgcgcaccaccatgcctggctaatttttgtatttttagtagagacagggtttcaccatgttggccaggctggtctcgaactcctgacctcaggtgatccgcccgcctcagcctcccaaagtgctgggattacaggcatgagccaccgcgcccggcctgagttttccttttatgaaggacctgcttggttggttgcctgccacatgttgtcagcaccatgggcccaggactgctgaggagctgttgatgccctcgctctcccagagccaccggctctgttagataattcacatgcagtctggccactgtcctacgtcctcattcacaaagagcagacatttcgtagaagatgagggcctgggagtaacctccctgcatgtttttctataaaggcatagtggttaagtccttccagctcattgaccattggagaattttatggaggctgtagactaggggctggtaaactaagggcccaggggccaaatccagcctgccacctacttttgtaaataaagttttcttggtgcacagccatgcccattcattcatttgcacaatgtctgtggctgctttcatgccaaaagcaagagaactgagtggttatgctggagacctacggccttcaaagccccagacctcacgtctggcccttgacagacagagcttccccagccctgctgcgcatcctggcccagcatgtgctgtgtgtgtgatttcagcttgcaggagccgtggttaggaattgtccctgtgttggtccattttgcattgctatgaaggagcacctgaggccgggtagattatgaaggaaagaggtctgtctggctcatggttctgtaggcagcaccagtatggcacccgcatctgctcagcttctagtgaggtctcaggaagctttgactcatggtgaaagtcgaagcgggagcaggtgcatcacatggtgagagagggagcaacggagagagagagagagcgcctctccctcttgccctcaccttgagaggagatgccaggctcctttaagtaaccagctcccatgtgaactcacagtgagagcccatttgctactgcggagagggcaccaggcatctgctcccatgacccaaacactgcccaccaggcctacctccaaccttggggtcatattttattctgttctatgctatgctatgctatgccatgccatgccatgccatgctattcctattctattatttgagacagaatctcgctctgttgcccaggctggagtgcagtggcatgatcttggctcactgcaacctccacctcccaggttcaagcgattctcctgtatcagcctcccgagtagctgggattacaggcacacaccaccacacccggctaatttttgtattttcaatagagatggggtttcaccatgttggccaggctggtctcaaactcctggcctcaagtgatccacctacctcggcctcccaaagtgccatgattacagatgtgagtcactgcgcccagtgagggtcacatttccgttgagatttggaggggcagacgttggagccatctgagccccctcgtcccgctctagcttctcctcccgtgtgccccgcggtgctggtggcaggcccttacgccggttctggctgcatgctctgttccagaagctttcttccctgcttggttaccagaaaatcatcccatccattacaaggacagggtccccttatctcccattcccagggcaggacaccgggggcagggcaggtggggaactgagcaagttctctgggggcaggcgtggctatggctccctctgggtgggcgtctggggaggggtggaggcagccgtcagcgccctggcttgctcttcctccctggccagagactgtggccttgtgctgctcccgtgtgggctgcctgcacctccagtgggttgtgctccctcccctcccctcccctcaagctctgctgagcaccactgccttccacagcccccactctcgggaggcgaggctcctcgtggccattcctgtccttggcacccacccccccaccaacctggtagagccttgggcggggtctgttactccttgcatggcgtagacctccccacagtaggcacctgacacatacctcctggggggcaggcaggaggtgcgttgaggtctcagccctggcagtccctcccctgcgtggcataggcctcgccacagggtcatcgagggtgggtggagactgtactagaccactccccgctggtcctagaaagggtcccatctgtctgctctctgtttggagtccagaccttggttgctgtgccctgcatggtgggctggggggcaccctccagcctctctgagtgcatggcctctcccttgcagccatctgcctgcccaaccagttccggtgtgcgagcggccagtgtgtcctcatcaaacagcagtgcgactccttccccgactgtatcgacggctccgacgagctcatgtgtggtgagccagcttctggcacggggaaggggcgtccgggctgggttcccccaggaacgtggagtttaggggaggagacgtgcctttccagcggggctgggggctgtgtgggagactcaggcggctgggaggctccttgcgggaggcagggaagcctttcccagggcagcggccaggaggacagactgtgagctgtgggctcggcggctacagagtctgcctcagtgggcggggctgatggtgtccaggtgcctgcagcacgcacccacccacgggaccttgctgagcagcgtctgtcaggcagcaagattacccgagggctgcagtggtcctgttccctggcagcttactgtctggctgaggaggagtgatgttcacatatgcacacatgtcatgtgcacacacatgtacatgacaacatcccacatgctcctcaaatagcatgacctgtacagtcacggatatagggcctaggggataggaggccaagacagtcagggaagactttccaggaggcagtggctcctgaaaggctgtctgattcaggcaggaagggagctgagttcagataggaagtagcaatgagtcattgtgtctggggacatggccactccttcgctgcagagggacctgggctgagagctcctctcttatggctgcagtcgggagagaagtctgttggggggagaagggggcttcctcaagggactccctgtgccctttggcaccttcgtgccaggtcaggcttgaggcctgaaggcagtggtgggggccaccaagggtcgcctcctctgctgggcaagttcccaatctgacgggcctgtgccgtgggccccagctgtgggggcgctgttgatgcgcagccaggcctcgccgccagagcccgcacgcttccattccgctgacttcatcgacgccctcaggatcgctgggccggccctgtgggagagtgaatgtggcttttgccaaagttgagtctggagcctggaaacttccctatgggcagccttgatagtggagtggcccaaggagcccacccagccgaccctgcccctcccgtggctggtgggcggcaccaggggctgcctggctttgctcgttcaccaacatcacctgggctggccagggcgcgctcacttctgccaccaccgagggccctgggcgaaggagtgaataccaggctgccttggcagggatgtgttgagggctgtggggagtcggacagcggcgggggtcagaggaggaggagggtgcaccgtgcaggctgaagggccacgttaccctgaggttggccaggctccccaggcctagcctcccagctcccccactttctccccaccctccaccagtggcaaagccagccccttcagggcgcacggtgtctgcccccaaggagggcccattccgttggggttaatgttggccacatctttctgtttgtctctggcagaaatcaccaagccgccctcagacgacagcccggcccacagcagtgccatcgggcccgtcattggcatcatcctctctctcttcgtcatgggtggtgtctattttgtgtgccagcgcgtggtgtgccagcgctatgcgggggccaacgggcccttcccgcacgagtatgtcagcgggaccccgcacgtgcccctcaatttcatagccccgggcggttcccagcatggccccttcacaggtaaggagcctgagatatggaatgatctggaggaggcaggagagtagtctgggcagctttggggagtggagcagggatgtgctaccccaggccctcttgcacatgtggcagacattgctaatcgatcacagcattcagcctttcccactgagcctgtgcttggcatcagaatccttcaacacagaggcctgcatggctgtagcaacccaccctttggcactgtaggtgtggagaaagctccttggacttgaccttcatattctagtaggacatgtgctgtgttgtccacaaatcctcatgtaccctagaaatgaatgtgggggcggctgggctctctccagagctgaaggaatcactctgtaccatacagcagctttgtcttgagtgcagctgggatttgtggctgagcagttacaattcctacgtggcccaggcaccaggaacgcaggctgtgtttgtagatggctgggcagccgcaccgcagagctgcaccatgctggtttgtatcacatgggtgaccatggtatgtctaagaaggtggagtccctgtgaggtctgcaggtgcccccacagctccaggccaccttgaggattgcctctgcctgcccagccctgagttccctctcccctgtcctgtcccactgtcaccccaagccggcctcattgggagcctgttggatggcagggtatagatgtaacctgattctctctggggagcggggttatctggcttctcaagagctcctaggagcccacagtggtggcaccatcacagtcgcagcagcccccagagaacgcggccctgtctgttcctggcgtgctctgtgctgccccgcctgggttccctgccccagtcgcaggccccttggaggaggtaccatgtgtctcccgtttcacagatgagccccggggagctcactctagtagtggccagagaggcctgcggctcagggagcggggcacatttccaacaggacacaccgccctggtctgagtctcgtgggtagtgggagcagaggagagcgccctatgtctgtggggcggcttggctgaacctggaagccacctgacctcccccgtcccttccctgccaggcatcgcatgcggaaagtccatgatgagctccgtgagcctgatggggggccggggcggggtgcccctctacgaccggaaccacgtcacaggggcctcgtccagcagctcgtccagcacgaaggccacgctgtacccgccggtgaggggcggggccggggaggggcggggcgggatggggctgtgggcccctcccaccgtcagtgctggccaccggaggcttcccgggttcctgggggctgtgccaccgcctctgaggcatgcttgctttcttcccttttcaaacccttctgcttccttctttaatgacattgttgattgtggataatctgaaaactacacaaaaatataaagagccaaaatctcacccaaatccacctcctagagtggctgttgggctccgtcagcatccaggcggccgtctgtgttccgcacggcccagcccatcgatagccgcctgcaccaggcctgtctgccctctgtgagcctccccacagggttccctccacaaacaccctgttctcccacccagggctggctgcttcctggaaaacagctggatggttttgtgcatgacagacaaacacagggtgattttcgtggctaaaatactccctggagcttttggcagggtgaggggctggctccagctgagccacgccttgagtgaaatgactgtgaggagaataaactgccgctgccctccaggatcactggggctggctggggagaacccccgtttctgggagcacagtcccaggatgccaaggcgagcttggtgccgagatgtgaactcctgagtgtaaacagcgggggctgacttgacatgctttgtatgcttttcatttgttcctgcagctgtatgcccctaaggtgagtccagcccccttctgcttcctctggggcctcgccagtgagccccaccttgctggggctggttcctcctgcccttctgggtatccctcacatctggggtcttgtcttcttgttttctttttcttttttttttgagacggagtttcacttttgttgcccaggcttcagtgcaatggtgtgatctctaggctcaccgcaacctctgcctcccaggttcaagcagttcccctgcctcagcctccctagtagctgggattacaggcatgtgccaccacgcccagctaattttgtatttttagtagagatggggtttctccatgttggtcaggctgatcttgaactccctacctcaggtgatccgcccaccttggcctcccaaagtgttgggattacaggcgtgagccaccgcacctggcctttttcttttcttttcttttcttttttctgagacagggtctcgctctgtcacccaggctggagtgcaatggtgtcatcatggctaactgcagcctctaccttctaggctcaagcaatcctcccatctcagcccctaagtagctaggactgcacgcatgcatccccatgcccagctaatatttacattttttgtagagatgaagtttcactatattgcccaggctggtctccaactcctggactcgagcgatcctcctgcctcggcctccccaggtgctgggattacaggcgtgagccaccgtgcctggcctggggtattgtcttcttatggcacctgactgtggtgggccctgggaaggaagtagcagaagagggttcttcttggtttcctggacagtaactgagtgttctggaggccccagggcctggctttgtttagggacaaagggaactggtaaccagaagccgagagtttaaacacccactgcccttcttccctgctcctgctgctgcaacccagcttaaccagccaggagtgctaggaacccaagcagggcccccgagcacacagcaggcagctcacgaattctcttttcctgttctcccttgggagctgggaggatcttaatcaggcaataagagatggcactgagcagccagctaattttttaaatcactttattgtttaaccatatgactcacccacttaaaaaagggtacagttcagtgggttttagtgtattcacagatgtgtgcaaccctcaccacagttaattttagaacattttcctgcccctaaaagaaactctgcatgaagccagctgtttttaaattagcaaagttattttgcatcctttaaatatatgttcatggtacaaaattcaaaagatacagaagagtctgcagtccaaagagactccgcccccatgacgccaagcaggcatccctgggaggcatggcctcctgcagtgtgtttcttctatgtccccccaggggtcatctgtacatatgcaagcatacaagagcgtggactttgttttccaagccagaagataattgtagatttatgtgcagttgtgagaaagagcacagacccatttatcctctgcctggtttcccccagtgctgcctgccatcttgcatgacttccattcctatcataagcaagacactgataacgattctttcaccttattcagattgacataagtgttttttgtttgttcttgagacaaacttcctctgtcacccagtgggagtgcagtggcacaatcacagctcactgcagcctcaaactcctgggctcaagcgattctcctgcctcagtcccctcaagtagctcagatggcaggtgtgcaccatcatgccaggctaatttttaaattttttgtggaggtgaggcctcactaaatttcctgggctagtcttgaactcctgagctaaagtgatcctcctgcctcagcctcccaaagtggtaggattacaggcatgagccactgcgcctgggctgacatatgtgttttcgtaagcccgaaagatagcatctgaagagtcaacattgagccttgccttttgctgctaacgatgtataaaagctgctgttctgagcatttcggaggctcccagctgccgtgtgcaccctgcctagagctctaccgtaacccatctccgggaggaggtgctattgttttcctcattttgcaacaaggaggctgaagaactgagcatgaaccactggcctgggtcgttcggttggtaggcagtggggccaggccatccaactcacaaccaccttctactctgcttcccccgcaccctgaagtttgttctgttttgaggacacagccgtcacattcttggtggctgaacagcactccttgtcaggcgtggctgggcccccactggagggcatcatggtcctctctcctgctgcggttgaaccttggctgtttcaaccactcctgccaagtggccctctgaaagggacagtccatcttttctcagcagagggccacactggcaaaacggtccctggcaccctttctctccacctgtctaatatagagtaaaaatggtatcatgttaagatcttcatttatatttattttatcatgaatgatgtaagcatcattttgtgtgtttaagaacctttgggcccagcgtgatggcttgcagctgtaatctcagcactttaggaggctgagatgagcggatcacttgaggccgggagtttgagaccagcctggccaacatggagaaaccccgtctctagtaaaaatttaaaaattagccgggtatggtgatcccagctacttgggagtctgaagcatgagaattgcttgaacatgggaggcggaggttgcagtgagccgagatcgcgccattgcactccagcctgggcgacagagcgagactctgtctcaaaaaaaaaaaaaaaaaagaaaagaaaagaaattatcaatctcctcttttatggcatatatatatatatatatatatatatatatatatattttttttttttggttatgttcagaaaggccttccctgctctgatcataaaaaacaacttattttcacactctctctcttttttttttgagacagagttttgctcctgttgcccaggctggagtgcagtggcgcaatctcagctcactgtaacctccgcctcccgggttggagtgattctcctgccttaccttcccgagtagctgggattataggcatgcaccaccatgcctggctaattttgtacttttagtagagacgggggtttctccatgttggtcaggctggtctcgaactcgcgacctcaggtgatccacccacctcggcctcccaaagtgctgggattacagacgtgagccaccatgcccagcccacactctctttcttaacgtcctcctcctttcgttttacgttcacatctttaattcttctgggatgtaattagatttgatgagcaaggtgggcatccagcttgtttcttggctgatggcttatgggtggcgtgaattagtcggggtctatcaggaggcagaaactctatgagaatttgaacagagaaagttccgtctacaggcttattaccagggactggaatagcagaaattgaacagtgagatgtacagagaactctaagaatgcaggaataggccaggcatggtggctcacacctgtcatcccagcactttgggagaccaaggcgggtggatcacctgaggtcaggagttcgagaccagcctggccaacatagtgaaaccccatctctactaaaaatacaaaaaaattagctgggtgtggtggcgcatgcctgtaatcccagcttctcgggagtctgaggctggagaatcacttgaacctgggaggcagaggttgtagtgagccgagatcatgccattgtactccagcctgggcaacaagagcgagactcagtcaaaacaacaacaacgcaggaatagcagatgagccgaggtggggcctccccagcccccaccccccaccccccaccctgggccgagatccagtcctctttgaatagggcctggccgtggttcacgggacatctgagacattgccgaggcgctgcactggtggatcttgccagaagtctgcccagtgcagatttgggcagaatctcaaactgccttgggatgtaggagagaaaccaggcctggtcaagttcatgggaagaggtggaaacagaccccataggctggggcttgggcagctgtaggaagccctctctgctgcctccctgcctgctctctgctttgaagcatcttccccagtgcccccagtctcatgccctctcaacgttggggtcaaatcctgaggaatacccagactggctctctgggccaaagaggaccctctccagaaagagcagggcccagtgcggcttcctaaagggcaggggaagggcctggccactccccagaggctactcaccagccatcaggatagccccaggaagcaggccttctcgagcccattttattactttattttattattttatttaattttaaatttattttttgagacagagtctcactctgttgcccaggctggagtgcagtggtgcgatctcaacccactgcagcctctgcctccagggttcaagggattctcccacctcagcctcccaagtagctgggattacaggtgcccgccaccacacccggctaattttcatatttttagtagagatgaggtttcaccatgttggccaggctggtctcgaactcctgacctcaagtgatccgcccgcctcggcctcccaaagtgctaggtcaagcccattttaaagttgaagaaactgaggctgaggtaaattccctccccagggatcctgctgcagccagaaggtggtaaaacaggacttcacccgggtctgtctggcgtgaaaggcagtgttcttgtaccaccctagggggcctgagagaactgagtccctcgggcataactgacagttctgttcccattattccgcaggggctcggatctggctgtatgctttccaggatggccttggagacccacataagccctacaccctttgggaagctgcatgttgggttggggtgccgtcagtggcacttgtggaaggtgcagacctgtgtgggtgtgtgggcccagggcccctggtcccttcctccctttgtagggctggttgtgtgctgcctggacctggggggcacgttcacgtggtgaatttgtctatttactatccccgctttggggctggtgccagcacaggcccttgtgaagggggtgcctttgtctggagtgggactgtggcccctccctcagcgtggtgacttctgtgtcagggcttcagcagggacgcagagcccctgagtgttcggaacaagggcgtcattgcaggagttagactgtgtgtgatggagggaggaggggcaggaggaaaggtcagaaggagagttcctgggaaggtccctgaggagcctggtgaggtgctaactggtgtggaggacactcagggcctgtggggacatctcctactgctgggggccagccacaaagggaactggccgaagtcctgtccccgccttcacagcccagcatctggtcacaaggcaggtacttggaagggcgcgggcacctgggccaaaagtgcctgggttccctttgcctttcactgagatgaccttcggggcaggtggctgctgcctcccctcctgtccccaggttttgccaactggccagaggaaggggtcctgggaagcaggggggccagaagccctctctgcaaggaaagcccgaggggtgtgggaggaaggaaggaatgcccaggctggcgaggctctaagtcaccctggcttggctctcctcagatcctgaacccgccgccctccccggccacggacccctccctgtacaacatggacatgttctactcttcaaacattccggccactgcgagaccgtacaggtaggacatcccctgcagccctccatggccattgggttcccgccagcccgtggtggaggggcctaatccccatgccactgatgaggggaggtattctgggtgctagtgggcaggtgccgggcccagccctgcctccctctgctctgccaaccacactaggctgcctccccagacaagctcagcgggcactgcatgttgggttcagaaatcagcagaactccacgttctgagctgctcttcaagttgctcctatgggggttacttttaagctgggaaatggctgtggcgtcgaggggccgggggcttgggctccagagtctgactgtgtgtttgagtccggctgtggaaacctagccattgagatgccccctcttggtggctctgtcctcttaggatgggacaagtctgtgaaggctgctgcagcacccaccgtagacccctaatcgtgtgacgtcaccaggatggtccgggctgctcacttgccacagtggcctgtttgagcccgggaagccaacggggctgctcagctggacaccagccccccgagctgcccatgttggggtcacaggccccacctccctggttggggaggggcaactgagagtgtggagaggtgggaccaggtgtgctggtctccgcaggggctggatcagagcctgggatgggcagggtgagcctcctgacctttaacccagtggtgtcaggcaacgtggcccacccgccagccgcaccaggccccacccccgcaggtgaaggggtgggataggctgggcctgggccaggacacctctggaccacgcattcctcattgcttgggtccctggagcagcagggcctcccgagtgtggtgccgcctgccacctagtggccatttccacgaactcccaggcctggctggggagccggaactgcagcctccatttccaccccactccgggtcgggccacctccctgatgcctcagtattatatcaaactgtcacagtctgtcccacagccttacagaccactgtctccagaatggtcacatccacactgggcagcccagtctcgctagttcctcgtcccacctcctgcctttgctcatgcccgtcctgctctgggcccaccgcggacacatcttccccccgcccgccgtctgacctcacagcagctggggccccaagaggagtatcctgtcctgctgcacttttctcaacacccggtgttggctgcaccttcccacccattgcaggcccctctgtgacaggacgggggctcctaaacacaccacagttccgagtctgaactcacacagtgggatgcggcgtttctgggccacagttgggtgcaggtagcctctgggaggatgggaggtcaggagccatcttgcgagtcaggttgcttgaactcaggatggaagtgttccgggcccattggttgctgtattagcctgttctcacgctgctaataaagacatacccaagactgggtaattgtaaaggaaagaggtttaacggactcacagttccacctgcctggggtggcctcacaatcatggtagaagacaaggaggagcaagtcacatcttacatggcttcagggaacagacagcatgagaaccaagcgaaaggggtttccccttgtaaaaccatcaagtctagtgagatttattcactaccacgagaacagtatggggggaaccacccccatgattcaatcatctcccactgggtccctcccacagcacgtgggaattatgggagtacaattcaagatgagatttgggtggggacacagccaaaccctatcggttgccaacatttacagtaacagtgttaggtgaacagttgtccagtctcctgttttgtcggacactgtttctagcaccttccaggcagaatctcatgtatccttcactttcgaaatgggtactatttcatccccacttttatcaatgagaaactaaagctcgaagaggtcaagtaagttcctggccaaggtcagctagcaggctctagaggcctcgttctccttagaggcagccttgccagggcccaggcttggcaggctgcagggcaggtgcgggcatgcccatggtagaggtgggaccattgaggctcagagagggtaagtgatgagccctggcgacacagcggggtgggtccagagtccggcctgcatcttctggagctggccagtggacaggcctttcccgttcacagccccggggctgctgtgcccaccagggcggatgtgcctaccgaatcccactcctctgtgtgtgtccctttcaggccctacatcattcgaggaatggcgcccccgacgacgccctgcagcaccgacgtgtgtgacagcgactacagcgccagccgctggaaggccagcaagtactacctggatttgaactcggactcagacccctatccacccccacccacgccccacagccagtacctgtcggcggaggacagctgcccgccctcgcccgccaccgagaggagctacttccatctcttcccgccccctccgtccccctgcacggactcatcctgacctcggccgggccactctggcttctctgtgcccctgtaaatagttttaaatatgaacaaagaaaaaaatatattttatgatttaaaaaataaatataattgggattttaaaaacatgagaaatgtgaactgtgatggggtgggcagggctgggagaactttgtacagtggagaaatatttataaacttaattttgtaaaa

SEQ ID NO: 1286 - protein, 1494 aa, Homo sapiens
MNGSSVEHVVEFGLDYPEGMAVDWMGKNLYWADTGTNRIEVARLDGQFRQVLVWRDLDNPRSLALDPTKGYIYWTEWGGKPRIVRAFMDGTNCMTLVDKVGRANDLTIDYADQRLYWTDLDTNMIESSNMLGEGRAGAFWSWRAGQPGVGHLPASPHAAGLNPGSPRRAPCALWPGCAFADTVPVCVHAGQERVVIADDLPHPFGLTQYSDYIYWTDWNLHSIERADKTSGRNRTLIQGHLDFVMDILVFHSSRQDGLNDCMHNNGQCGQLCLAIPGGHRCGCASHYTLDPSSRNCSPHPQETALVPPSFPWTSSGADAEPPVVEWRAIPSSSSSVAYRHPPAALSLPPLAPTTFLLFSQKSAISRMIPDDQHSPDLILPLHGLRNVKAIDYDPLDKFIYWVDGRQNIKRAKDDGTQAGALWEGCGPFVLTSLSQGQNPDRQPHDLSIDIYSRTLFWTCEATNTINVHRLSGEAMGVVLRGDRDKPRAIVVNAERGYLYFTNMQDRAAKIERAALDGTEREVLFTTGLIRPVALVVDNTLGKLFWVDADLKRIESCDLSGANRLTLEDANIVQPLGLTILGKHLYWIDRQQQMIERVEKTTGDKRTRIQGRVAHLTGIHAVEEVSLEEFSAHPCARDNGGCSHICIAKGDGTPRCSCPVHLVLLQNLLTCGEGTFCDCPPPELPSSFSPSYSPKAQVDLQPNGVCAPPTDARTALAKKRGRQNAALTAALGLHARGHALPSTTPWPGPWALLARELQAPSSRLERRVFTAQWQEPGWARGGHSHLSSAITTAIQPFPEPGAPLALAPVSQLQLTGACGAQRLLLIESRAPSPGVSSALLPVLCPVFCRRLGRADRSSAGSCLAMRTLVTTEAWPFFCSSPTPATEPPTCSPDQFACATGEIDCIPGAWRCDGFPECDDQSDEEGCPVCSAAQFPCARGQCVDLRLRCDGEADCQDRSDEADCDAICLPNQFRCASGQCVLIKQQCDSFPDCIDGSDELMCGEPASGTGKGRPGWVPPGTWSLGEETCLSSGAGGCVGDSGGWEAPCGRQGSLSQGSGQEDRLSQSDGPVPWAPAVGALLMRSQASPPEPARFHSADFIDALRIAGPALWEKITKPPSDDSPAHSSAIGPVIGIILSLFVMGGVYFVCQRVVCQRYAGANGPFPHEYVSGTPHVPLNFIAPGGSQHGPFTGIACGKSMMSSVSLMGGRGGVPLYDRNHVTGASSSSSSSTKATLYPPGFSRDAEPLSVRNKGVIAGVRLCVMEGGGAGGKVRRRVPGKVPEEPGEVLTGVEDTQGLWGHLLLLGASHKGNWPKSCPRLHSPASGHKAGFANWPEEGVLGSRGARSPLCKESPRGVGGRKECPGWRGSKSPWLGSPQILNPPPSPATDPSLYNMDMFYSSNIPATARPYRPYIIRGMAPPTTPCSTDVCDSDYSASRWKASKYYLDLNSDSDPYPPPPTPHSQYLSAEDSCPPSPATERSYFHLFPPPPSPCTDSS

SEQ ID NO: 1287 - DNA, 1351 bp, Homo sapiens
  source
  (1)..(1351)
  CDS (201)..(1151)
gcactctccataatggaaatttcttgatggtggtcatttgtcagtttttagaaataagaagtttggccacataaatctgtgagtttgcttttttcttcccttccctcagtgcccagttgtctttcttcataatgatgtcatctcactaatttatttctaattttcaaggtggcactgatccctgaggatgatatgtcaacatgaaaatttctaataactctttggggtttttacctacgactttcattttggttggcatcccagggctggagtcagagcacctctggatatccgtccccttctccctgatatacatcatcattttccttgggaatggcatcattcttcacgtcatcagaacagatattgccctacatcaacccatgtacctcttccttgccatgttggcactggccgaggttcatgtctctgcatccaccctgcctacagtgttaggcatattcctttttggaaatactgaaattagtcttgaagcttgtctttttccagatgttctccatccattctttatccatgatggagccagctgtgctgctggccatgtctttggaccgctttatagccatctacagcccactgagctacacagctatcctgacactgcccagggtctttggcacaggagctattatcgtactgaaaagcattatgctcatggctccgttgcccattctcttatggcgtctgcccttctgtggccacaatgccctctcacattcctattgtctgcaccccaatcttatctatcttgtgggaacatttctgttaacaatatctatgggattttcattgttacctctacttttgggctggattcgttgctgattgtgatctcctatgggctcatactccacactgtattgggtattgccactggagaagggaggaagaaggcactcaacacatgtggctcacacgtctgtgctgtgcttgcttactatgtgcctatgattggcttgtctatagtgcaccgccttggacatcgtgtgtcccctctgctgcaagccatgatggccaatgcctacctcttcttcccacctgttgtcaatcctattgtctacagcattaagaccaaggagatccatggtgccattgtccgaatgctattagagaaaagacgcagagtgtagccaaaaaccatagtaggaagaaatgtttttgtttgtttgcttgctctctataataacaggaggccctagattgcatgttatgcgattgatatcaccttaaaacatggcgtctaacaggaagttctctatagtctgtccatgaactgaggtgagggtgcaggtagaggtgaattatgtgtgacagaacagtacacaaaagt

SEQ ID NO: 1288 - protein, 316 aa, Homo sapiens [sequence omitted]

SEQ ID NO: 1289 - DNA, 1212 bp, Homo sapiens
  source
  (1)..(1212)
  CDS (201)..(643)
  CDS (895)..(1012)
ttactctctcccaagtgattgcaaagctgatttattagactgagaatactgagtttaataactgaattagattaatacatgacaagaagatcacacccaggaattgtccttgccatctagtggaaatcctagaaaatgattccttaacgtctataaccacttattttcttcctcaaacagatgaatttccaaactctgacatggctcctgaaaatttcaccagggtcactgagtttattctcacaggtgtctctagctgtccagagctccagattcccctcttcctggtcttcctagtgctctatgtgctgaccatggcagggaacctgggcatcatcaccctcaccagtgttgactctcgacttcaaacccccatgtactttttcctgagacatctagctatcatcaatcttggcaactctactgtcattgcccctaaaatgctgatgaactttttagtaaagaagaaaactacctcattctatgaatgtgccacccaactgggagggttcttgttctttattgtatcggaggtaatgatgctggctgtgatggcctatgaccgctatgtggccatttgtaaccctctgctctacatggtggtggtgtctcggcggctctgcctcctgctggtgtccctcacgtacctctatggcttttctacagctattgtggtttcaccttgtatattctctgtgtcttattgctcttctaatataatcaatcatttttactgtgatattgcacctctgttagcattatcttgctctgatacttacataccagaaacaatagtctttatatctgcagcaacaaatttgtttttttccatgattacagttctagtatcttatttcaatattgttttgtccattctaaggatacgttcaccagaaggaaggaaaaaagccttttccacctgcgcttcgcatatgatagcagtcacggttttctatgggacaatgctatttatgtatttgcagccccaaaccaaccactcactggatactgataagatggcttctgtgttttacacattggtgattcctatgctgaatcccttgatctacagcctgaggaataatgatgtaaatgttgccttaaagaaattcatggaaaatccatgttactcctttaaatcaatgtaattttagagctctataaataaatgaagagatagttcatgtaacctgccattatgtaagagaaata

SEQ ID NO: 1290 - protein, 186 aa, Homo sapiens
MAPENFTRVTEFILTGVSSCPELQIPLFLVFLVLYVLTMAGNLGIITLTSVDSRLQTPMYFFLRHLAIINLGNSTVIAPKMLMNFLVKKKTTSFYECATQLGGFLFFIVSEVMMLAVMAYDRYVAICNPLLYMVVVSRRLCLLLVSLTRKEKSLFHLRFAYDSSHGFLWDNAIYVFAAPNQPLTGY

SEQ ID NO: 1291 - DNA, 937 bp, Homo sapiens
  source
  (1)..(937)
  CDS (201)..(737)
aagttttggactatttgattcttttatgcttcttttttttcatttttttttctaaaggtaaaatattccttcctggaggttttatcacccacactacatagatgaagaataaaaggaatgtgactgaattcgttttaacaggtcttacacagaaccctaaaatggagaaagtcatgtttgcagtatttttggttctttacatgataacactttcaggcaacctgctccttgtggttacaattaccaccagccaggctcttagctcccccatgtacttcttcctgagccacctttctttgatagacacagtttattcttcttcttcagctcctaagttgattgtcgattcccttcatgagaagaaaatcatctcctttaatgggtgtatggctcaagcctatgaagaacacatttttggtgctactgagatcatcctgctgacagtgatggcctgtgacaactatgtggccatctgcaaacctctgcactacacaaccatcatgagccacagcctgtgcattctcctagtggtagtggcctggataggaggatttctccatgcaaatattcagattctatttacagtatggctgcccttctgtggccccaatgtcatagaccacttcatgtgtgacttgtgccctttgttaaaacttgtttgcctggacactcatacccttggtctctttgttgctgccaacagtgggttcatctgcttattaaacttccttctctaggtggtatcctatgtgatcatcttgagatgtttaaagaactatatcttggaggggaggggtaaagccctctccacctgtatttctcacatcataatagttgtcttattctttgtgccttgtatatttgtgtatctgcacccagtgacaaactctgcccattgataaagctgctgctgtattttatactatggtggtcccaa

SEQ ID NO: 1292 - protein, 178 aa, Homo sapiens
MITLSGNLLLVVTITTSQALSSPMYFFLSHLSLIDTVYSSSSAPKLIVDSLHEKKIISFNGCMAQAYEEHIFGATEIILLTVMACDNYVAICKPLHYTTIMSHSLCILLVVVAWIGGFLHANIQILFTVWLPFCGPNVIDHFMCDLCPLLKLVCLDTHTLGLFVAANSGFICLLNFLL

SEQ ID NO: 1293 - DNA, 4319 bp, Homo sapiens
  source
  (1)..(4319)
  CDS (201)..(308)
  CDS (3128)..(3531)
  CDS (3660)..(4119)
  modified_base (1)..(48): a, t, c, g, unknown or other
nnnnnnnnnnnnnnnnnnnnnnnnnnnnnnnnnnnnnnnnnnnnnnnnaataaatggggtgctctgggtcttctagtaaccagggctgtgtaaaacaagtttttgtcagtaagcttttgttgaagtccaacatactgttctagttactgtggctgtgtaacaaattaccccaaaacggcaactggaaacatagttttatcatgtttgtggattctgtgggtcaggatattgaagagggcacagtgggaatgatttttctctgctccctgaccttggaagtctccgctgagaaggatcaacagctgggggtaactctgaggcacgggttggggcctcctggaagtgactttgctcccgtgtgtggctgttgaagctgactgctggctggaacctcggctggggctgtccacgggagcatctgcctatggcttctcccagcatgccagcctcagggtaatcagacttctgatacgacagcttgaggcgctgaaaaagagtgtcccagcaaacaggacagaagctgcatgtgttaaccacgtcttttattttctgtattctgatgctttaacatttggggaccttgctgactgtggagggactgccccttcccgggttagccaattcctagagacagtaaacaactcacccatgaacacgctattcagttcttcaaatgcaaatacaatggaataccattcagcaatgagaatgagcaaactacaactacacccaacaatgcaggtgatgctcacaaactaacattgaacccaagaagcgacacacataagatcgtatagcatggtttcatttatttaagggtcaaaagcatgcaaaactgagttgtgattttagaagttaggagaggggccacgcttgagtgaaggtggaggttgggagggcagaggagagtttctgggaggctgtgaggttgtgcttcctaatctgggtgccgatcacatgggtgagttcactttgtgaaaatcgacaagctgtgcttttatgatctgcacccatttttctatgtatgtgttatggtttaaaaaatggctgtaggccaggtgcggtgactcatgcctgtgatcccagcaatttagcaggctgaagtgggcagatcacctaaggtcaggagttcaagaccagcatgaccaacatggggaaaccctgtctccactaaaaatacaaaaattagccaggaatggtggtgcgtgcctgtaatcccagctacccgggaggctgaggcaggagaatcacttgaacccaggaggaggtggaggctgcagtgagccaagatctcaccactgcactccagcctgggtgacagagtgaaactccatctcaaaagcaaaaaaaaaaaaaaaaaaaaaaaggctccaaattcttctacttttctcccatggagaagtggaggctattctccccccatgcccctgtactatcttgattctagatgagcttgtgacttgcttgtaagtgatagaaggcactggaagtgatgatatgacacttcaggactaggttagaaaaggtgaggcagtgttttagaatagagtgtattaatagaaaatctggggtccggtactgtggctcacgcctataatcccaggactttgggaggccgaggcaggcgaatcacttgaggtcaggagtcatggtgaaaccccatctctactacttaggaggctgaggcatgagaattgcttgaaccgaggaggtggaggttacagtgagccaggatcactccactgcactccagcctgggcgacagagcaagactttgtctcaaaaaaagaaaaagaaaagccgaggttcaagaaggccaacaggtcagcagataactgccattgaaggacagtttgctactcacagatcccaagaggagggcacgccccatcacgcagggccaccggggagacatagggttggtcaggaggtgaagggagcaggggaaaatgtgggcaagagtggttttagggtacacaggcttaagattgggtggtttgaatcatttcagcaagctctgagacatgaggactgtccccatttgtgtggtacctggccctggggtgtttagggcaggtggatagtgtcctggtgtgtgagagctgtaaatggagcccgtggaagctaaggactctggattggtaggtttgcatttgaagaactgaagagcgtgttcatgggtgagttgtttactgtctctaggaattggctaacccgggaaggggcagtccctccacagtcagcaaggtccccaaatgttaaagcatcagaatacagaaaataaaagacgtggttaacacatgcagcttctgtcctgtttgctgggacactctctttcagtgcctcgagctgtcgtatcagaagtctgattaccctgaggctggcatgctgggagaagccataggcagatgctcccgtggacagccccagccgaggttccagccagcagtcagcttcaacagccacacacgggagcaaagtcgcttccaggaggccccaacccgtgccccagagtaacccccagctgttgatccttttcagcagagacctccaagattagggagcagagaaaaatcattcccactgtgccctcttcaatatcctgacccacagaatccacaaacatgataaaactatgtttccagttgccgttttggggtaatttgttacacagccatagtaaccagaacagtatgttgcacttcaacaaaaagcttactgaaaaagacatgttttattatacttgtgcatgttgcctcagcaaaactattcattattacaattccagaggcataaccccacagatacagtgttttttttttcttttttcctccccaggcagccacgtgagatggcttccggcactgctggcgtgagtagtcttcctggcaatgccagctcttgccgtcctcacctcctggccccagtggcccgcatgacgctctctgttctacacagccctcctggtcttcagtgccctgggaaacatccttgccctttgccttacctgtcaaaagagcaggaagatcaactgcacaggcatctacctggtgcacctggctgtgtctgacctgctgttcaccgtggccttaccgggaagggtggtgtgttatgtgctgggctccagctggcctttcggcaaggggctctgcaggctgacggcgtttgtgctctacaccgacacctacggggggtctacctcatggcctgtgtgagcgtggaccattacccagctgtggtctgtgcccactggggcccgcgcctccgcacggctggccgcgccaggctggtctgcgtggccatctggaccttggtgctgctgcagacgatgcccttgctcttgatgcccatgaccaagccgctggtgggcaagctggcctgcatggagtacagcagcatggagtcagtcctcgggctgcccctcatggtcctggtggcctttgccattggcttctgtgggccagtggggatcatcctgtcctgctatatgaagatcacctggaagctgtgcagcacagctgggagaacccagtgaccagcgggaaaggacaccaccggcggggcagcccaggaggacccagtgaccaacaggaaaggacgccaccggcggggcagcccaggaggacccagtgaccagcgggaaaggacaccaccggcaggacagcccgagaggacccagtgaccagcgggaaaggacgccaccggcgggacagcccgggaggacccagtgaccagcaggaaaggacgccactggcgaggctgcctgcttacgctgctgatgctggtggccgtggtggtctgcttcagcccctaccacctcaacatcaagcagttcatggcgagagggatgctccacctgccatcctgtgccgagcggagggctttcttactgtcccttcaggccaccgtggccctcatgaacatgaactgtggcattaccccatcatttacttctttgcatccacccattacaggaaatggctcctgggcattttaaagctcaaagggtcttcctcctcctcctcctcctcctcctccaccccaggaaaagcttcttcagaaacaccaagtatcacccaggccagaggttctatgttcttagcggagcacgtggtctaacgtgtcatttgctttatgactgtatctagggaggggtccagcgttggggtattgaagttgatacaatttgggcaaaaggttttttaaggaaaagaatacagaataagaaatacaaaattaggccgggcgcggtggctcacgcctgtaatccccgcactttgggaggccaaggtgggcggatcacctgaggtcaggagttc

SEQ ID NO: 1294 - protein, 323 aa, Homo sapiens
MFVDSVGQDIEEGTVGMIFLCSLTLEVSAEKDQQLGLAFRQGALQADGVCALHRHLRGVYLMACVSVDHYPAVVCAHWGPRLRTAGRARLVCVAIWTLVLLQTMPLLLMPMTKPLVGKLACMEYSSMESVLGLPLMVLVAFAIGFCGPVGIILSCYMKITWKLCSTAGRTQTAREDPVTSGKGRHRRDSPGGPSDQQERTPLARLPAYAADAGGRGGLLQPLPPQHQAVHGERDAPPAILCRAEGFLTVPSGHRGPHEHELWHYPIIYFFASTHYRKWLLGILKLKGSSSSSSSSSSTPGKASSETPSITQARGSMFLAEHVV

SEQ ID NO: 1295 - DNA, 6508 bp, Homo sapiens
  source
  (1)..(6508)
  CDS (201)..(581)
  CDS (1537)..(1687)
  CDS (1768)..(2904)
  CDS (2969)..(3085)
  CDS (3132)..(3290)
  CDS (3330)..(3357)
  CDS (3446)..(3531)
  CDS (4133)..(4246)
  CDS (4357)..(4472)
  CDS (4737)..(5126)
  CDS (5796)..(6308)
ggctgcgggtgccaggtgcccgtgctgcagggggcaggcagggcccgagccccacggctcccaccttgtctctttcacagacgccaatgagtgtgaagggaagccatgccttaacgctttttcttgcaaaaacctgattggcggctattactgtgattgcatcccgggctggaagggcatcaactgccatatcagtcagtatggggggtgggcgccggcgggtgggccgaggcacatgggaccccgcctctgaccctgctcctctgcccccagacgtcaacgactgtcgcgggcagtgtcagcatgggggcacctgcaaggtgaggcggggccaggagggtgtgtggcgtgggtgctgcggggccgtcagggtgcctgcgggacgctcacctggctggcccgcccaggacctggtgaacgggtaccagtgtgtgtgcccacggggcttcggaggccggcattgcgagctggaacgagacgagtgtgccagcagcccctgccacagcggcggcctctgcgaggacctggccgacggcttccactgccactgcccccagggcttctccgggcctctctgtgaggtgaggtctgcctggtcaccctgccccacctgctgctctgggagctgtagggcaggcctcgtcccctgaccatggggcctgagtgacccaggggtgctgcaggggaagttgtccccaaggcgtcccaggctcagctctccactgggtgccaggtgggcaggcggggctgtcacaggtcaccaggcttggccccctgtggccattgcttgttgtgatgggtttcctggtggcctgggctaggagcccccgggctgctggctgcccaggcctatctgtccatctgtgcactccctcgggactggagggcagggggctctggtgggcagagcacatggggtagggtgggtgcctgatggtggagaggtatacacctgtcataggtgagtcctgggtcggagtgggcatctctctcagggctgatgctctcgcctccctctgaccatctgttggtactggaccccccccacccacctccctaccaccctcggccgcccacgatcctgccctggccttggtgcagaggatgggcctcctgtccagagggcttcttggggcccagggcaggggtctgacctcaggacctgcaagcatggcagtggctggccctggaaaagacccacagtcttggctctgagggtggccaggcagtgtgtgaggggctcaggagctgtccttcctgccagcagcaggggccaaggccacactcctcccgagggacagtgaggaagctgggctgcagtggaggtgggggtgggggcccacaggtatctgcgttcagctaaggcctgggcagtctcaggtgggcaggggtcttgggctctggctggcactgttaggcccagggcggaggggcctgggggtccccagggatctaccttcgtatggacagaggcctggcctgtgttcccggcctgggcctgggcctaggctctcacaggcaccccccaccctgcaggtggatgtcgacctttgtgagccaagcccctgccggaacggcgctcgctgctataacctggagggtgactattactgcgcctgccctgatgactttggtggcaagaactgctccgtgccccgcgagccgtgccctggcggggcctgcagaggtgctgggtgcggcatggggtggtgggggaggtggtggggcaggggcgggcctgactcctgactgtactgcctgccatagtgatcgatggctgcgggtcagacgcggggcctgggatgcctggcacagcagcctccggcgtgtgtggcccccatggacgctgcgtcagccagccagggggcaacttttcctgcatctgtgacagtggctttactggcacctactgccatgagagtgagtggccacgaacggcgggctggtggtggggctgggctggcctgaggccctggctcaccccgctcgcctctgcagacattgacgactgcctgggccagccctgccgcaatgggggcacatgcatcgatgaggtggacgccttccgctgcttctgccccagcggctgggagggcgagctctgcgacaccagtgagtgttccagcacccgcccacacggcctgtgcctccacccctgtgggccccttatcaccctgagatggaccgctgtctgggtgcggcaggccccgtacccagaaaggcctggccagggggtgctgccaccatggggtggagtcccaggctgcccccatgcccgaggccagctcccccggcccgacgctcctcccccgcccctctctgtcctcacctggcccagctccagtgcttcctcccccgggaagccctccctgagcgccggtgaccccccgcccgctgaccggcgtcctcgcccccagatcccaacgactgccttcccgatccctgccacagccgcggccgctgctacgacctggtcaatgacttctactgtgcgtgcgacgacggctggaagggcaagacctgccactcacgtgagtgtccgcaggccctggccgcctggggctgcccccaggaccctggccctggcggtctggggcctgcctgctgagcggcccatgtgccaacaggcgagttccagtgcgatgcctacacctgcagcaacggtggcacctgctacgacagcggcgacaccttccgctgcgcctgcccccccggctggaagggcagcacctgcgccgtcggtgaggagcccccgctgcctctgcgaccgccgggcatatgccctcccaggcaccgctccctcgggcgcgatgggccgaggggtcttttttgagggccacacctgccacctgccccctgccccctgcccccgggtctgtctgccctgtctgggttgggggcgcggtatggagacccagggccagcccagggccaggtgagacgctccctcctcctcctctccttacagccaagaacagcagctgcctgcccaacccctgtgtgaatggtggcacctgcgtgggcagcggggcctccttctcctgcatctgccgggacggctgggagggtcgtacttgcactcacagtgagtgtgggaggggtgtgggcgggggccgctttcctccacccagatgacatccctgcccccgactcgccccccagtcccttctgccagcccctccccctgctgcccctgcccccagcaaaaggcaccctccttgatgaccctccccagccccacagcctgatcacgccaagccagcctggacagtgcctggcacgcttggggggtgggtactgatcccctgcgttctcttctcccaaaccagataccaacgactgcaaccctctgccttggtgagtggcaccctgggggccacagcaggggtgggtgggacttggcataccacggggggccacctgatgcccaccctctgctctgcagctacaatggtggcatctgtgttgacggcgtcaactggttccgctgcgagtgtgcacctggcttcgcggggcctgactgccgcatcagtgagtggccagacagccccagccctgggagcccctcagcccagccgcggtgtcaggagtctggggacatcaacgtccacgtcccttgaagggcagtgtggccacaactacttcctgcctctcttctgagcctcagtttccccacatgtctgtgccctgtggggttcctgctgtataccctgccaagtgattaagtggggagccccagcctgggggaccagtccggggcccagggagctgtgggggttggagcgtgcagcctgacgtgggctcctctgtggccgcagggctgttgtccctgggtgttggcccagctgtctgtccagcaccccttggctggtccgacgcagcagctggggctaatccaggatgggacaggcccactgcagaagcagacggaggagggtgctgttgggccagggtcaggctgggctcaggaaggcctcaggcaggcagcagcttgggctcgggggcaggggctgctcctcattgtcctggggcttgcgcctgtgtgccactggctccccgctgccctaggccatgccggtcctgcggtgggcgttggcctcactgcactgagcagcggtggctctccctgcagacatcgacgagtgccagtcctcgccctgtgcctacggggccacgtgtgtggatgagatcaacgggtatcgctgtagctgcccacccggccgagccggcccccggtgccaggaaggtaggccccgtgtgattgccctgggttggggcgggttggggggcatgggtgacacccagccccgagggccagatgcccactgctgaccctcgagccccttctccccacagtgatcgggttcgggagatcctgctggtcccggggcactccgttcccacacggaagctcctgggtggaagactgcaacagctgccgctgcctggatggccgccgtgactgcagcaaggtgagggcagcccgtgagccgccctgccctacccgaggctggtgcacgctgaccctggccactctgtgagatcaggaggcgggtgctggggtccggatggactgagagccgtctgccctcagggacacccagggaggcgagagctcagccaggccccatgcttcgatgtgcagttgggaaaacaggcctggtctgggtcctgccttgctccgcctgccctttctgatgtcgagcttggcctgcctccctgggagccctgggtagggggtgggctgggccctggggctcacagacttgggcggtgtccctccttggcatggggcccgtgcctgcctgtgggttctcatctgtgtgcctgcatctgaccctcctgtgcgcctgcgcctgaccctcctgtgcgtgcctgcccaggtgtggtgcggatggaagccttgtctgctggccggccagcccgaggccctgagcgcccagtgcccactggggcaaaggtgcctggagaaggccccaggccagtgtctgcgaccaccctgtgaggcctggggggagtgcggcgcagaagagccaccgagcaccccctgcctgccacgctccggccacctggacaataactgtgcccgcctcaccttgcatttcaaccgtgaccacgtgccccaggtgaggggcctggtggcatctgagcttgcagaggccacacgccggcatctgctcgtggcatggcgaaagcctagccccgcagggcagggaggccctggttggctgagcagagtcactcttggtcacagagagtggccctgtggggtcagatgagaggggcattgggcctggtgctgggtggaggtggcagaggaggctgggagagcagccagctgggggtgcctgtttgtccagctgccctgagggcctggactgacggcgccatggctgcctggccccagctcttgggctgcagctccgtgggcagttttgccctggcctaggacccacctttgcctgctgtgtgcttggagctgggcccctgtctcccaggaggggctcagaactggaggagacccactgtaccccgccctgcctctccttcccccactggcctgcaggtggagctgggtccgccctgaggatgggcgggtgggcaccgtcactcctgcctcctggtatagggcacagccgggtgggaagctgcccccccaggcccttggcatccttgctgtgctctcctgggcgggctgtagggtgtgtcccacgtgtacccacagcgccagtccagggatgtaggtgtcaggttcacggccctgccctgcccacgcactgcctgtctctgcccagggcaccacggtgggcgccatttgctccgggatccgctccctgccagccacaagggctgtggcacgggaccgcctgctggtgttgctttgcgaccgggcgtcctcgggggccagtgctgtggaggtggccgtggtgagtgcccagtggggagcagcacctgggtgggccctgggtcccgtactatgcaggtcctggctatgctggacagaggctctggcgaggctagtcctggtgcggaaggactgcgggcaggcctgtctccctgcggcccctcgctgtccatgccgcagacccgtggaactgctccctgggcctggccagcatgagggagatgcagggctgtggtgtggagcccgcttcccctgcagctgcatcctcgcccggtcccctgctctgtttttgtctctgtgtccctacgtcacaggcagcaggagagtccgtgggcttagtctgccctgggaggcctgctttgggactggcacctgccctggacctggggggtgtcagatgtgaatggataccaagggggtcgggtgagactggggtggagacatgcccggagaggggagggaatgttctggaacatggtgggtgggtgtgcagagcagtgggtgtggccatggcacagtgtggctggtggaggccatggccaggcacaggaaggacgtgcagtgttttggtgccctgaggccgcagagggggtgggggacatg

SEQ ID NO: 1296 - protein, 1063 aa, Homo sapiens
MGGGRRRVGRGTWDPASDPAPLPPDVNDCRGQCQHGGTCKVRRGQEGVWRGCCGAVRVPAGRSPGWPAQDLVNGYQCVCPRGFGGRHCELERDECASSPCHSGGLCEDLADGFHCHCPQGFSGPLCEVDVDLCEPSPCRNGARCYNLEGDYYCACPDDFGGKNCSVPREPCPGGACRVIDGCGSDAGPGMPGTAASGVCGPHGRCVSQPGGNFSCICDSGFTGTYCHESEWPRTAGWWWGWAGLRPWLTPLASADIDDCLGQPCRNGGTCIDEVDAFRCFCPSGWEGELCDTSECSSTRPHGLCLHPCGPLITLRWTAVWVRQAPYPERPGQGVLPPWGGVPGCPHARGQLPRPDAPPPPLSVLTWPSSSASSPGKPSLSAGDPPPADRRPRPQIPTTAFPIPATAAAAATTWSMTSTVRATTAGRARPATHVSVRRPWPPGAAPRTLALAVWGLPAERPMCQQASSSAMPTPAATVAPATTAATPSAAPAPPAGRAAPAPSVRSPRCLCDRRAYALPGTAPSGAMGRGVFFEGHTCHLPPAPCPRVCLPCLGWGRAKNSSCLPNPCVNGGTCVGSGASFSCICRDGWEGRTCTHNDIPAPDSPPSPFCQPLPLLPLPPAKGTLLDDPPQPHSLITPSQPGQCLARLGDTNDCNPLPCYNGGICVDGVNWFRCECAPGFAGPDCRINIDECQSSPCAYGATCVDEINGYRCSCPPGRAGPRCQEVIGFGRSCWSRGTPFPHGSSWVEDCNSCRCLDGRRDCSKGVGWALGLTDLGGVPPWHGARACLWVLICVPASDPPVRLRLTLLCVPAQVWCGWKPCLLAGQPEALSAQCPLGQRCLEKAPGQCLRPPCEAWGECGAEEPPSTPCLPRSGHLDNNCARLTLHFNRDHVPQGTTVGAICSGIRSLPATRAVARDRLLVLLCDRASSGASAVEVAVVSAQWGAAPGWALGPVLCRSWLCWTEALARLVLVRKDCGQACLPAAPRCPCRRPVELLPGPGQHEGDAGLWCGARFPCSCILARSPALFLSLCPYVTGSRRVRGLSLPWEACFGTGTCPGPGGCQM

SEQ ID NO: 1297 - DNA, 1069 bp, Homo sapiens
  source
  (1)..(1069)
  CDS (201)..(869)
tgggcataggaccctctgagccagttgtgggatataatctcctggtgtgccgttttttaagcctgttggaaaagtgcagtattagggtgggagtgacctgattttccaggtgccatctgtcacccctttctttgactaggaaagggaactccctgaccccttgtacttcctgggtgaggcaatgcctcgccctgcttcagctcatgcatggtgcactgcacccactgtcctgcacccactgtctggcactccctagtgaggtgaacccagtacctcagatgcaaatgcggaaatcacccatcttctgcatcgctcacgctgggagctgtagactggagcccttcctattgggctatcttggctccacctcccccacagaacatttctttgaggcagctgagatcatcttattaagtgtcatggcctatgaccactatgtggccatccgtaagcccttgcactatgcaaccatcatgagccaacctatgtgtggattcctgatggtggtggctgggattctgggatttgtgcatggagggatccagactttgttcatagcccagttaccattctgtggccccaatgtcatcaaccactttatgtgtgatttagtacctcttctggagctggcctgcacagacactcacaccttggggcctctgattgctgccaacagtgggtcactgtgtttcctcattttttccatgctggttgcttcctatgtcatcatcctgtgcttcctgaggactcatagctctgaagggcgtcgcaaagctctgtctagttgtgcctctcatatcttcattgtcatcttattctttgtccctttttcatacctgtatctaagacctaacctccttccccactgacaaagctgtgactgtgttttgcaccctatttacacctatgttgaaccctttaatctacaccctcaaaaataaagaagtgaaaaatgtcattaagaagctctggaagcaaataatgacaactgatgataaataagtcttgtgacacaaacatttaggcaagaatatctggtgatattttatagagatttattctatttctt

SEQ ID NO: 1298 - protein, 222 aa, Homo sapiens
LMHGALHPLSCTHCLALPSEVNPVPQMQMRKSPIFCIAHAGSCRLEPFLLGYLGSTSPTEHFFEAAEIILLSVMAYDHYVAIRKPLHYATIMSQPMCGFLMVVAGILGFVHGGIQTLFIAQLPFCGPNVINHFMCDLVPLLELACTDTHTLGPLIAANSGSLCFLIFSMLVASYVIILCFLRTHSSEGRRKALSSCASHIFIVILFFVPFSYLYLRPNLLPH

SEQ ID NO: 1299 - DNA, 937 bp, Homo sapiens
  source
  (1)..(937)
  CDS (201)..(737)
agttttggactatttgattcttttatgcttcttttttttcattttttttttctaaaggtaaaatattccttcctggaggttttatcacccacactacatagatgaagaataaaaggaatgtgactgaattcgttttaacaggtcttacacagaaccctaaaatggagaaagtcatgtttgcagtatttttggttctttacatgataacactttcaggcaacctgctccttgtggttacaattaccaccagccaggctcttagctcccccatgtacttcttcctgagccacctttctttgatagacacagtttattcttcttcttcagctcctaagttgattgtcgattcccttcatgagaagaaaatcatctcctttaatgggtgtatggctcaagcctatgaagaacacatttttggtgctactgagatcatcctgctgacagtgatggcctgtgacaactatgtggccatctgcaaacctctgcactacacaaccatcatgagccacagcctgtgcattctcctagtggtagtggcctggataggaggatttctccatgcaaatattcagattctatttacagtatggctgcccttctgtggccccaatgtcatagaccacttcatgtgtgacttgtgccctttgttaaaacttgtttgcctggacactcatacccttggtctctttgttgctgccaacagtgggttcatctgcttattaaacttccttctctaggtggtatcctatgtgatcatcttgagatgtttaaagaactatatcttggaggggaggggtaaagccctctccacctgtatttctcacatcataatagttgtcttattctttgtgccttgtatatttgtgtatctgcacccagtgacaaactctgcccattgataaagctgctgctgtattttatactatggtggtcccaa

SEQ ID NO: 1300 - protein, 178 aa, Homo sapiens; identical to SEQ ID NO: 1292

SEQ ID NO: 1301 - DNA, 11388 bp, Homo sapiens
  source
  (1)..(11388)
  CDS (201)..(305)
  CDS (2392)..(2556)
  CDS (3432)..(3626)
  CDS (10949)..(11188)
tccaagggcagttttagccattcattgcctgccctacgaccctcacattagagagtactgtactttctctccaaactatggatggccactaacagtatttcttttccatttttttcttcagagagcactgcagttgccctatcacttatcaatctcttggggatattctgaatgcatccttttttagtaaacgaaaagggatgcaggaagtaaaactgaactcttacgttgtgagcggcaccgtcggtttgaaggaaaaaatttccctctctgaacctgtgttcctgacttttcgccataatcaggtgagaaacacccagggctgggtctccatgcagtaccttaaagggtgagcaggtgcagtcagcttcccaagtaggaaacggaattcagaagtaagagaacacacaagacacgctgaggcatcttcaatgagattttgcttcaccacagtgaggatggctattaccaaaaacttaaaatatcagtatgtggcaaaaaaaaaaaaaaaaaaaaaagaggaacccttatagatctgctgatgaaaatgtaatgtggtacagccattatggaaaacagtacagaggcttctcaaaaagttataaacagaattatcgtctgttccagcgattccactttggggtatgtggccaaaagaattgaaatcaggatctcaaagagataactgcactctcgtgtttattgcagtattattcacactagctgagatatggaaacagcctaagtatctgtcaacagatgaatgaagatttttttttttttttgagacagagtctcgctctgtcggccaggctggggtgcagtggcgtcatctcggctcattgcaacctccatctccccagctgaagcaattctcctgcctcagcctcccgagtagctgggattataggagtgtgccactacacccagctaatttttggtattttcagtagagacggggtttcaccatgttggccaggctggtcacgaactcttgacctcaggtaatccgtccaccccagcctcccaaagtgctgggattacaggtgtaagacaccatgcctggccaatagtttttttttttttttttttcttaagggacagggtctcactctgtcacccaggctgaagtacaatggtgcaatctcggctcactgcaacctctgcttcctgagttcaaatgattctcccacctcagcctcccgagtagttgggattacagacacctgccatcatgcctggctaatttttgtatttttagtagagacaaggtttcaccatgttgaccaggctggtctcaaactcctgacctcaggcgatctgcctgcctcagccacccaaagtgctgggattacaggcatgagccaccatgcccagcctaatgtacaacactcaatgtaactacacttaataatgtattgtacacttgagatctgctgagagagtgcattgcaagtgtattcaccacgcacacacacacacacacacaaatatgtgaggtgttggatgtgttagcttcattgtagtaatcatttaaaaatgtatacatctatcaaaacgtataaatacaaattcttctttgttaatcacactttagtaaagctcaggaagaaaggaagtgttgaggcatccagagcttgccacagtgagatgccattctcacgttgaagccaaaaggcaatggaggagaagctctattgagctcagtggaagctggaggcaggaatgagggatcgctctgcagaaactggagatggctcaaagcagaaagggcacagggaagaaatactttatttctctctcttctctcacccagtgagtctcaccaatgcctctctttgcttctataaatagcaaggaagctggcgaagccattcagagggtcaaccccagggtgctgagctgaccagagaagggcagaatagatggagaataaacccaccgcaggcgtggtgatgtgaaactcttcccctacaagtgtatttccgatccagtttccaacactgtgcattgtgattaacctgtaaagttgaaataatatgccaggcatgttggctcatgcctgtaatcccagcactctgggaggccgaggcaggcggatcacttgaggccaggggttcaagaccagcctggccaacatggcaaaaccccacctctactaaaaatacaaaaattagccaggcatggtagtgttcacctgtagtcccagctacttgggaagctgaagcaggagaatcacttgaacttgggaggcggaggttgcagtgagctgagatcacaccactgcactccagcctgggtgacagagcaagactccatctcaaaataaaataaaataaaataaaaaataaaaccaggaagagacccactttcatactattctctttccagcctggtgacaagagaacaaaacatatctgtgtctactgggagggatcagagggaggccactggtccacggagggctgctctcatgtgcacagcaacggttcttacaccaaatgcaagtgcttccatctgtccagctttgccgtcctcgtggctcttgcccccaaggtaccaagattcattcctgtgaacctgtgtatgtccgagaatttgtgagttatcctctgcatttcttacaaaaagattctaaaggtcgggcgcggtgtctcacgcctgtcatctcagcactttggggggccgaggcaggtggatcacttgaggtcaggagttcaagaccagcctggctaccatgatgaaaccccgtctctactaaaaatacaaaattagctgggcatggtagtgcacacctgtaatcccagctactcaggaggctgagggaggagaattgggtgaacccaggaagtggaggttgcagtgagtcgaggtcatgccactgtactccagcctcggtgacagaggaagactccatgtaaaaaaaaaaagaaaagaaaaagaaaaaagattctaagacaaggagtcaaatggtagtagcttacttgaaaggggattacaggaaacactagtgggggactgagacaatgagatggaagtaagacaggtgtcagtgcagacagcattatcaagccagttaccaccataggtaactggaatttattccctctgggggactctgggagtcagtgtagaactcacatctctgggtcattctatctgagcagcaagggagctggagtatttatacactaactcccattagtcatttgttaagagctgtatccagcactggtctagttgttttggtttttaacattcctgtgtgatgagtgttactactgccctcattttgaagatgagaacactaagtctcagaaaggtaagtcaattgtttcagggactgaactaggaagcccatctggcactacctcaggaaaataacaacaccatcggacaccataatggattccccctttggtgttttgcaggaggaccctgtgctgaccgtgatcacccaggtggggctgaccatctctctgctgtgcctcttcctggccatcctcaccttcctcctgtgccggcccatccagaacaccagcacctccctccatctagagctctccctctgcctcttcctggcccacctcctgttcctgacgggcatcaacagaactgagcctgaggtaggtaatttacccaaattacctcattgccataacgaatccagccatcttgtcccacaagaagatggagagcaaggcattagtcagcagtgatgatgtagagaggaaaagtatgagctccatttcagttgtcctcctatagaagttggaataagacctttacattctgaggggccatttagcaaagtgatggagtgtcaggctgatggtattaaatagggtaacattagcggttgttaggatcaactccagaatgtcacaggcttgccacagtaggagttattttttccttatgtatcagtagagggtgagcaaacaggtctgaagagtgtctatcctgcaccctcaggttgagggaggctctgtcattttccatacacagctcccaaggtcatcgtggtgttcacatatcagccaacccggagggggaaaagaacatggctgagttcccatgggggaggttaacatgtgccacatcatgaagtggtgcatatcacttcccctcacactctattggctaggactcggtcacatgataacacataactgcaagggcagttgggaaatgtggtctctgtctgggaagccacttcctagtgacaaatctatactctggatttgagggtggggaagaggcttgcatttttggtgggcagtgggtttgctgcactgatctgcgcttgaatcgcagctcttcaccctacttgctgtaagacctgttgaagtgacttccccttttaatttatttaaatttaatttttaaactgaaaaatataaagtatatgtatattttttttctgtacagcatgttttgaaatattatacgtcatagaatggctcagttgatctaattaacatttgcatcacctcacatactcagctttattgtgtgtgtgtgtgtgtgtttgtgatgagaacactaacgtattcttttaaaagtttttaagaatacatacattgttaccatgcaactatgatcaccatgttttacaatagatctcttgtggcttcccctttttaaacttcctctgcaaaacaggggcctaatcataggatttagtaagaacttagcaagacaaaacataaaagattatgaattaatcactcagagaacaatgttcacttttatctttatcatgatcctggccatcatattatccaggaagatttaaagctagatggttctctaagtctcctgttaaccctaaaacactatgatcacacagctagaaagttacaaaagcactctgtttatatttaaattttttttcctgagaaatagtatagttttatggttaagagtaagtacattttctggagatagtttaggttcaaatccaattttattttttactcgctgtgagatttgggggccagattttaacctcttggtgtttcatttgaaaataggcagaggttgggaagacacagtcctcaggccaaatctggcccaccttctgtttttgtaaataaagttttattaaaacacagcctcatctattcatttatatattgtttgtggctgcttttacgctacaatggcagaatggtgtaattgcaatagagatttgactgcatagcttaaaatttggcccttaaaatttttttgtctcagagtattgagacaataatatgagttaatacttaacaaagcaatttgatcagtgttcacccatagttaagtgctcggaaggtactaattacttctctgataaaattttcaaatgatgtttttaaaaactgtaaaaataatattgtgggtaagatggagttgacttagtcatcttgaaaatatatgcttttatataatgctctaaaatcctacctcttattttatttatttattcatttgatggatattttaaaaatacccactgtgtgtcaggcattgtgttgcaaatacattaataattaggggactaggggaactacctcagttactttccccatagagttcacagcttagaaacatgtgctgaggccaggtgcggttgctcacgcctaatccgagcactttgggaggccgaggtgggtggatcacctgaggtcaggagtttgagaccagcctggctaacatggtgaaaccctgcctctactaaaaatacaaaaaattagccagacctttggtgggcacctgtgatcccagctactcgggaggctgaggcaggaggatcacttgaacctgggaggcggagcttgcaatgagccgagattgcgccactgcactccagcctgggcaacagagcgagactttgtctcaaaagaaaaaaaaaaaagcagccacagataaaagtaaatgaatgtgtgtggccatgtgctaataaaactttacttataaaaacagatactgggccagaactggcccaaagccactgatttcctaaccctgctcaaggcagcagtggaaaggacttcaagctgggaatgacagaaaatacttatcaggacaacaaaagttgaaggtaaagataactgcagtgagatgaaactagcagcagaaagaatagcaacagggctatgaatggtctaagtgggagttaataaaaatatgggccgggcgcggtggttcacgcctgtaatcccagcactttgggaggccaaggcgggcagatcacaaggtcaggagttcgagaccatcctggccaacatagtgaaaccccgtctctactaaaaatacaaaaaattagctaggcgtggtggcgggcacctgtaatcccagctacttgggagactgaggcaggagaattgcttgaacccgggaggcaagtgttgcagtgagcggagatcatgccactgcactccagcctgggtgacagagggagactccatctcaaaaaataaaacaaaataaaaaaataaaaacatgaacactgctaaaggaagtgggccagattttagaaatgtttgtaaggggagttggtaagacttgaggcccaaatagatgtggaagtggtgtgtgtgtgagaaagcagaaataaggatgaattagaggtttcccatttgggaggttgggtagatggatggcgagaaagaggaacagacttggagcgagacatagaatgaattcgggtttaaatctgttagttagaggtgctggtcagacactggaattgagacatacaatagaaaattggaaataggaattttgagcccaggagagattgaagcaggagaaagggatattggagttttctacacgaaggagacacttcaagctacagaaataacgatcagtgataagtaaaatggattaagaataaagctctgtggaggaggaaggaggcggtagagggaggaggaggaggaagaggaagagggggcgttgggacaggaggaagaaagttccacacgtggtctctccataattctctccagagtccttgaggccatgctctcagaatagaggccactcagtaaggagggtcttcacaggtgccaggccctctgcaaacacctatgaggtagggaccaccaggatgtaggagccacagtctccacattctggatggggacacaaaggcttagaagtcaccccagcctagtccacattttaattgccaattatacttcaaaccagttcttccttaagcctgaattctattttctcttgaaaatccccagagcaatggttctcagcatctttgaagttggatccctctgagaattttgttgaaagctaaagccctttttcccagacaaatgtacctatacacaaaattttgaataaaacttcagttaattcagggacaggaaaagcaaattcaggccaggcgtggtggctcacgcctgtaatctaaagattgggaggaggaagatacatgagatagacgagaagactcaaagataagcaggtgagaattcctggatagatgaatgtccaggacatcaaaggacagaaagtgccaactaggttgatcagcttctgctgaaaggccaagtagaaggacgggcacagtggctcatgcctgtaatcccagcactttgagaggccaaggcgggtggatcaggagttccagaccagcctggccaacatggtgaaactccgtctctactaaaaatacaaaaattagccaggcatggtggcacgtgcctgtaatcccagttactctggaggctgaggcaggagaatcgcttgaacctgggaggtggaggttccagtgagccgagatcatgccactacactctagcctgagtgacagagcaagactctgtctcaaaacaaaaaacaaaacaaaacaaacaaacaaacaaacaaacacacaaaaacaaacagaaacgccaagtagagagactgctggatttggtagttaagaggctgtgttagtcagggtttctggagagacagaaatagtaggatgtgtgtatattacctgattggatttacctgctttgttgcatgcctgctattttttgtttgaatgccattcttggtgaattttaaattatgagtgctgtatcttttcaaaaaaattatttaaacagttttaggcttttgaggggacataattaagtgacttggaaacagtttgatacattcaagtcttgattctaagattgaatagagtggtcacggaattctctttcgtctagggctcatttggccccattaatgatataatactctcctgataattttacctgaaattctggatgttaggagagtctgctctaacatacagagagcctgtttacagaaaatctgctctaacatacagggaatctgtatatcagactcccctaacacacagaacttcaggtaaaattgggtaataggaacaaaccatttggacaataggaacaagctatttccagttctgtgtgaactcagaagattgttctgcctactcctctttaggagccttctcctagttttggttagtctccttgcaagcatttgctgataagtaatcaaaccctctgccaatctctccccttccccgcttcccaaccccactgtagctccctaccctgtggtattttgcctcataaattcttttttttttttttttgagataaagttttgttcttgttgcccaggctggagtgcaatgacgcagcctccgctcacggcaacctccacctctcgggttcaagtgattctcctgcctcagtctcccaagtaggtgggattactcgtgcctgcctctatgcccagctacttttcttttttttttttttttttgtatttttagtagagacggggtttcaccatgttggccaggctggtctcaaactcctgacatcaggtgatccacccgccttggcttccgaaagtgctgggattacagatgtgagccactgcgcccagcctgcctcatacattctagataacttggtctctgtctccattttctagagctgtcataatgaagagccaccatatggacggcttaagcaatataaatttattgtctcacaggtctggaggccagaagtctacggtctatgtgttgatagggtaggtttctttttctatttgtttttattttttattttttttatttttttagacagagtcttgttctgtcacccaggctggaatgcagtggcttgatctcggctaacagcaacctccacttcccgggttcaagtgattttcctgcctcagcctaccgagtagctgggattataggcacatgccaccacacttggctgatttttgtatttttagtagagatggggtttcaccatgttggccaggctggtctcgaactcctgacctaaggtgatacatgccttggcctcccaaagtgctgggattacaagcgtgagccaccttgtccggcctttccctccttttagaaatcactgtaaacataaatattcaatgcctattctccaatatctgtaactcataatgtcatacatgtcatttagcatttagttgtttaatgtgggagagtaaatcccatcctcattatgttatcacgattagaaatggaagccttattccgcacattgaatggaaaattttgtgtctgtgaacacatctggagaattatgagaaatcatgaagcatgacttctataaaagtatattcatttgttctggctgccataacaaggtaccacaaacggagtgatttaaacaatggaaattaattttctcacaattctggaggctcatggtctgagatcaagatgtcagcagggttggctttttttgagacgtctctcctcggcttgttgatggccatcttctccctgtgttctcacttggtcatccctttgtgtgtgtctgcactctaatctcctatttttaaatttttatttatttattattattttttaagatggagtttccctgttgttgcccaggctggagtgcaatggcacaatctcagctcatcgcaacttacgcctcccaggttccagcgattctcctgcctcagcctccagagtagctgggattacaggcgtgagccaccacgtctggctaatttttgtatttttagtagagagggggtttctccatgttggtcaggcaggtcttgaactcccaacctcaggtgatccaccctcctcggcctaatctatttttagatgtacataacttgtattggattagggcccacatatctgaacttattttaacataatgacctcttgaagagccctgtctccaagtacacccaccttctgtgatactggggattagaacatcagcacatgaaattttttttttttttgagatgaagtctcactcttttcacccaggctggagtgcaatggcacaatctcagctcactgcaacctctgcctcccaggctcaagcgattctcctgcctcagcctcccaagtagctgggattacaggcgtgcaccaccacacctgcctaatttttgtaattttagtagagataagatttcaccatgttggccaggctggtctcaaactcttgacctcaggtgatccacccacctcggcctcccaaaatgctggggattacaggcatgagccaccgcacctagccaatagatgtttccactatagacatttggagctcaattccaccgaggatctccagggggcagtgtagagcacatgtcttagattggtagattctaccaatttttgtttattatacatttgggggctgttcccacgacatgtattccttgggtttctaccctgctctatgcatgatgtaaacagacttcaatggctagcagaagtcttcagaaaatgtgtagcccccaggcaaaatgttacagatgctcaaattgaaattccaggccacatccaggaaatgctaagtgctgagcatataatcaggtacagaccacatctgctgcacacccctaactcttctgttccctccaggtgctgtgctccatcattgcagggctgctgcacttcctctacctggcttgcttcacctggatgctcctggaagggctgcacctcttcctcaccgtcaggaacctcaaggtggccaactacaccagcacgggcagattcaagaagaggttcatgtaccctgtaggctacgggatcccagctgtgattattgctgtgtcagcaatagttggaccccagaattatggaacatttactcagtaagcataatgtgtgtctttatgatggtagtagcaatggctactgtaaagaataacaccaatattacaactatcaaagccctatggtgcatcaaaaatcgtgcttcctctatgcagtagctcatgccattctcaccatgaccctatgacgtcagcagtttatttccttacgcacaggacacctgggcctgagtgcatttcata

SEQ ID NO: 1302 - protein, 234 aa, Homo sapiens
MQEVKLNSYVVSGTVGLKEKISLSEPVFLTFRHNQPGDKRTKHICVYWEGSEGGHWSTEGCSHVHSNGSYTKCKCFHLSSFAVLVALAPKEDPVLTVITQVGLTISLLCLFLAILTFLLCRPIQNTSTSLHLELSLCLFLAHLLFLTGINRTEPEVLCSIIAGLLHFLYLACFTWMLLEGLHLFLTVRNLKVANYTSTGRFKKRFMYPVGYGIPAVIIAVSAIVGPQNYGTFTQ

SEQ ID NO: 1303 - DNA, 8360 bp, Homo sapiens
  source
  (1)..(8360)
  CDS (201)..(406)
  CDS (3710)..(3809)
  CDS (5106)..(5414)
  CDS (5775)..(5891)
  CDS (8035)..(8160)
taacactcgccgtgagggtccgcagcttcattgttgaagtcagctacaccaagaacccactggaaggaaccaattctggacacagggggacttcgtgcacgcagcactccatgagaccatgagctttctcaccgggcaggaggagcccatccccagctacacgtctgggcccagcgctctcggagctgctttggagaaacatgcttggcgttgtctatgccaatggccaggctcctgggactctacaggtttctccaggtaagtactcagagccgtaccctcccctaatatttgctgtggtattggccacaatgggggtgacgctgaggccctaccacggagggtcctggctccccgccaatgccctacagcctgacgccatcctccccctcaccatgacctctctgtaagagaatggtgatcgctgctgcattcaccaggacactgagattgagggaactagcagtgacacgttgcagctcacccagcactggggcgctgaagctgggttttgagtccaggccatagggcttgtgccgccagcctccacacggccccgccccgctggggcctcctgactctcaggccctcgggtgtcattcccataatagtagctatgtctagaggcaactttttttttctgtttattttatgtatgtatgtgggtgtattgagatggagtcttgctgtttcccagggtggagtgcagtggcacgatctcagctcactgcaatctccgcctcccgggttcaagcgattctcctgcctcagcctcccgagtagctgggtttccaggcgccccctaccacctcccggctaatttttgtatttttagtagagacggtgtttccccacgttggccaggatggtctggaacttctgtccttaggtgatctgcccacctcggccccacgaagtgctgggatcacaggtgtgagccactgtgctggggcattttaatttttttagtgatggggtctctgtcgctcaggctggagtgcagtggcatgatcacggctcactgcagcctcgatttgctaggctcaagcagtcctccggcctgagatataatccacataccgcgtaactcactcatggcttttggtatgttcgagttgtgtagccatccccacagccaatttgagaacattttcatcaccccacaaggaaaccccaacccctttagccagcagtttccatcagctccacctgccggcaaccactaatgtatgttttgtctgtacagatttgctttttctggatacttcctataaacggaatcatacgctgtgtggtcctttgtgactggcttttctcactaaatatattttcaaggttcatccacgttgcagcctgtgtcagagcgtcgttcccttctattgattaattttccatcataggctgggtatagtggccctgtgggaggccaaggtgggaggattgcttgatgtcaagaggtcaagaccagcctgggcaacatagggagactccatttctacaggaaaaaaaaaaaaaaattagtggcatgcagctgtagtcctgggtactcagaaggctgaggcaggagaatcacttgagtcggggggcggggggggtgggtcaagggtgcagtgagctataatcgtaccactataatccagcttgggcaacagtgcaagaccctgtcttaaaaatccgttgtatgaatagagcatgtcgtgtgtatccatttattagttgatgtatatttgaactgtttccattttgggcctactgtgaatagggctgctatgaacatttatgtatccgtttttgtgtgtatgttcagtgtgttttcaattctcttggttgtatgggtagaatttctgggccaaatgttcatgctatgattaactatctgaggagctgctggagtgttttccaaagcagcgcaccattttacattcccaccagcattgtatgacgagtccaatttaatagattcatgttccactgagaaacctgtaaatttgggtttacaggattcctctgcccttgaacgccttaaatttgcaaagtttgctggcctgctgggggagaggcctgccttcctacctgtgaagcagggggccctgtaaatcacagaacaggttggaagggttttcctggggcggtgtgaatgttggggccacaaagaaagctcaccccttcaccccttactccttcagggtgggttgtcatgtattggggagtttattctgaggtgtgacacttcaggtatgggcttgatcgtacgatcaatttagtccagtcctatcctgataaaaaggagagttgatttctatagaacctctgcaaataaccgcatagctattctaggtgcttttaaccccaaagtatcaagccaggctgatttttttccaagaattcaccttgattacttcccacttggattcttacataaaatgcttctgaactagaagtttctatatgtagactttcttttctttccttttaattcaagcacatttaaaggattagagactcaattttttttttcctttttgaatttttttgagacgaagtctgactcttgtcgcccaggctggagtgcggtggtgcgatctcggctcactgcaacctctgccccctgggttcaagcaattctcctgtctcagcctcccaagtagctgggaccacaggtgcccgccgccatgaccggctaatttttgtatttttagtagagatggggtttcactatgttgcccagtctggtctcaaactcctgacctcaggtgatccacccgcctcagcctcccaaagtgctggaattacaggcgtgagacactgcgcctggccttttttaaaacaaaacaaaacaaaacaaaacaaaactctccctgtgttgcccaggctggcctgcaactcctgggcttgtgatccacctcagcctcccagtgttgggtttacaggcatgagccactgcgtgcagctgcaactgcatttcttgactgcagctcaagaagctgttttcctgtacctgtagggttgccagataaaacagtacccccagtgaaatttggttttcagataaacaatgaatagtcctttttagtagaatttggtcccaaatattgcacaggacatacaagacatacttatgctaaaatattagatgaatttatctgaaatttaaacttaattgggtatcctgtttttttattttcaaatctgttagctctacctgttgcgtcagccttatgggtctgtgtaaaccaatcagaccagagcaccgttccgttcagaccccataacctttgcatagcctatttccttactaccctctggcggtaggagaatgttttgcacccacacgaggagcgtgttaaagtctctgatccaacagaccccagagaccgagcagtttcatcctgtgcctcagccacaggtcagaagcaaacacagacacaaaacctcgttgaccccgatttcatagaactttatcttccggggcacgaagagtagtctcttcattggcaaatcgacaagcaggcaaaaactgacaaagatcacagcgtggccaaacaacacaagtaggttccgagtcattgccactgccagtgaagaactgtccgtccgcgctgtgtgaaccgtaactagaatccgaaccccaggcccggcatggtggctccagcctgtaaccccagagttgtccacgctgtggaaaccggaactagagtccgaatcccaggccccgcacggtggctccagcctgtagccccagagttgtcggcgctgtgcaaaccggaactagaatcggatccccaggcctgctgaggcaggaggatcacgtgagcccaggaattttaagaccaggctgggaaacatagaccccatctctacaaaataattttttttaactgggggtggtgggtggtgcacatctgtagtcccctgaggcaggaagatctcttgagcccagtaggtggaggatgtagtgagctgtgttcctgccactgcactctagcctgggtgacagtaaaaccctgtctcaaaaaaaacaaacaaaaacccagcttggcaaaggagcagaaacgtaagtttgaagtgggcaaaacgagaggaatgaacattaagttcaattattccttggggctgggtgctgcggcttacaactgtaatcccagcactctgggaggctgaggcaggccgatcacgtgaggtcaggagtttgagaccagcctggcctcaagtgatctgcccacttctgcctcccaaggtgctgggattacaggtgtgagccaccacatctggcctttttctttcttcctttccttttctcctttttttttttttctgtgcctgcttggctcgctctctctcccctcctccatccctccctccctccctccctcctctccctccctccctcccttcttcccttcctgcctgccttccctcctgtttctctgtctgactctgtctctctgtctctgtctctgtctgtctctgtctgtctcttcctctgtgtgtctctgtgtctgtctctctctctctctctctgtgtgtgtgtctctctttctgtgtgtgtctctttagagtagggggtcatactgtgttgcccaagctagtctcgacctcctgggctctagcagtcctcccaccttggcctcccaaagccctgggatgtacgtgagccaccatgcccagacttatgtgggaatttttttttttttttgagacggagtctcattctgtcacccaggctagggtgcagtggtgcgatttcggctcgctgcaacctcggcctccagggttcaagcgattctcctgcctcagcctaccaagtagctgggattacaggcacccaccatcatgcctggctaatttttgtatttttagtagagatggggtttcactatgttgttggccaggctggtcttgaactcctgacctcaagtgatctgcccgccttggcctctcagtgctgtgattataggtgtgagctttcagtgacaaaattgggggacacacccagggccaccagggacgtgtgggtcaacctggctttcttttgaacctggtggtcagcaggtgcctgagctgctcctcacccctccccattgccctggcctcttcctgcacaggtcagcccctcctccacactggccagcctcagcgacaggacccagttcccatccttctttcagaccctgctcagtcacctcacgaccacccatgcagtggtgcagctgatgcttcacttccgatggtcttgggtgagcgtcctggcgcagggggacgactttgagctgcagggcaggtctctggtcgtccaggagctgggccaggctggggtctgcattgaattccaactctgcatccccacccgggagtccctgaagatgaaaaacatcatctggctgatggagaactgtacggccaccatcatcctggttttccttaacagctagcacttcagactcatcctgcagtgcctggcaggccgaggcatcctgggccaggtctgtgtcagctgggacactctgcacatggcgctggtcctgactgtgccagtgccttctgggttctgcagggctcattcagcctcctgctttgcaacagccagccccccgacttccctgcgccttgccaggaccccagaagacatgttcatatggagattctgggaggtcaccttcaagtgcacatagccccatagcagctgggggccagcagggaaaagcacagcggctgcaggagtccagttctgctcaggaaatgagagtctgagggttgagcactaccctttccagaaggaaagcaaagtacacatcgcctacacagtggtctatgccatcgcccaggccctggcaggctgcaagcatggggaccaggggtgtgccgatgcctgggacttccagccctggctggtgagaggcgaacgtgtggagtggggctgagcatggtggctcacgcctgtagtcccagtactttgggagaccaatgtgggaggatcattcgagcccaggagttcaagatcagccagggaaacacagtaagacactgaatctacaaaaaaatttttaaatcagccaagcatgggctgggcacagtggctcacgcctgtaacccccacattttgggaggcagaggcaggtggattacgaggtcaggagatctcgagaccatcctggctaacacagtgaaaccccatctctgctaaaaatacaaaaaattagccaggcgtgatggtgggcgcctgtagtcccagctactcaggaggctgaggtaggagaattccttcaacctgggagggcagagcttgcagtgagccgagattacaccactgcactccagcctgggtgacagagcgagactatctttaaaaaaaaaaaagtcgtgatggtgcacgcctctagtcacaactacttggaaggctcaggtgtgaggatcgcttgagcccaggaggttgaagctacagcaagccatgatggtgccactgcactccagcctgggcaacagagtaagaccttgtctcaaaaacaaactgtggagtagatgattcagggaaggggagacagcaggaaactcacttggtctcctggtggggaggacaggggcagtgctcctcagtgaggatatcttgtattcacagccctaagccacatcttagcaggagcactggacgaagatttttttttttttgagacggagtttcgctctgtccaggctggagtgcaatggtgtgatctcagctaactgcaacctctgcctcctgggttcaagcaattcttctgcctcagccttctgagtagctgggattataggcatgtgccatcacgcctggctaattttgtatttttagtagagatggggtttcaccatgttggtcaggctggttttgaattcctgacctcagatgatttgcccaccttggcctcccaaagtgctaggattacaggcatgagccaccgtgccgggctgaggaattttttgttttgttttgtgttaagacagtgccttgctttgttgttcaagctggaatacagtgatgcattcacagctcactgcagtctcaacctcctgggctcaagcgatccttcagcctcccgagtagctgggactacaagcatgcaccaccacgcccagctaatttttgtattttcaccatgatgcccaggctggtctcaaacttctgggctcaagcgatctgtccactttggggtaagtgttgggatcacaggcataagctaccatgcctggccaggatgaggggtcttaagtccatgctaggtttgtgactgagggatcaggatgtctaggtgttcagggactgacctgtgtaggtcccgccaggattttactccacttggagtgtgatgggaaggccaaggaggaagtgtttgctcagacggaatccctggagcaggggccacactgtggcttttgtgcgttccttcctccgtggaaaaaaaaattcttaattcaattttaccattgccttggtctaaagatgaatatatcctgggttggactcattattatatgttcattattacttttttttgagacagagtcttgctctgtcgcccaggctggagcgtagtggcatgatcttggctcactgcaacctccgtctcccgggttcaagtgactcttctgcctcagcttcctgagtggctgggattacaggcgtgagccaccacgcctggctaatttttgtatttttggtagggacggcatttcaccatattggtcaggctggtcttgagctcctgacctcgtgatctgcctgcctcggcctcccaaagtgctgggaccacaggcttgagccaccgtgcatggcccattaattactttttaatttttttctttgcttttacaagcagttaacattagaacattttcatgggaccctgcaaatatcacagccctgggtctcccgtgcctcatggatacgttggccctgcctgaggcagcccctgctcaccacggtggctgaggacctgatgcattttgcacaggccctgggactggccctgcccatctacagtgtcatccatccttccccagctgcttcgtcctctcaagaacgtgcatttcaagacccctgatgggacagagatcatgtttgatgccaacggagatttaattacagaatttgatgttgtctatggacagaagaccactgagggctgattccactttgtccacataggcatagtcaacccgtgagcccctctgggagacagaatgacagtgcatgtgacaaaggaggacctctaggtcagtttccagggtgcagaaatgatcccagttctggtgtattcgagtcagagggaagcacagaggccagcggtgtccctatttggtacatgaagttggtgcagctctaaatt

SEQ ID NO: 1304 - protein, 285 aa, Homo sapiens
MLGVVYANGQAPGTLQVSPGKYSEPYPPLIFAVVLATMGVTLRPYHGGSWLPANALQPDAILPLTMTSLPRTVAPACSPRVVGAVQTGTRIGSPGLLRQEDHVSPSSTLASLSDRTQFPSFFQTLLSHLTTTHAVVQLMLHFRWSWVSVLAQGDDFELQGRSLVVQELGQAGVCIEFQLCIPTRESLKMKNIIWLMENCTATIILKESKVHIAYTVVYAIAQALAGCKHGDQGCADAWDFQPWLLLRPLKNVHFKTPDGTEIMFDANGDLITEFDVVYGQKTTEG

SEQ ID NO: 1305 - DNA, 1279 bp, Homo sapiens
  source
  (1)..(1279)
  CDS (201)..(377)
  CDS (419)..(627)
  CDS (878)..(1079)
tgtatgctgagtgccggtcccctgggcccacttttctttctctacactttgtctctgtgtcttatttcttttctcagtctcttgtctccaccttgcgagaaatacccacaggtgtggaggggcaggcccccttcaatcagtaatgaataggtgtgaaacgctggtaaggctggtttagtgcatagggagccttccttcacatggctggtgtcattacgatcctgtggcagacgcagggatgtgtgtctcccacaggtacgaagagatgtcttctgtgcccagaggagcagtactcaagccgcaccagagatggctgcctgcccaggacagagaccttcctggcctttgacgaccccctgggactcatgctcgccttggtggcgctcatgctggccagcctggcagtgctggtcctcagactgttctgaagcaccgagacacacctgtggtcggggccaacaacagagctctcagctgcacgccgctcacctccctgaccctctgtgccctctgtcccttgccttgccttggttgtcccacagctgccacctgccgcctctaccagaccacagttgctgttgtgttcaccatggctgtctcttccgtcctggccttcagggtcaccaggtgacagggtctgggtgtgcctgggacctggcgcttccacctcggtggtccttgctgcttccttggtgcaggttgttctctgtggcatctggctgggcacttccccaccattcccagatggggacatggcctcagagcccagccacattgtcatccagtgctgagagggctctgctgtcgctttctcctgtgtgctgggctacctgggcctcctggctgggggcaccttctttgtagccttcctggccaggggtctgccagacgccttcaacaagtccaagttcctcaccttcagcgtgctgctgttctgcagcttctggacaaccttcctgcccctgtaccacagcgcacagggcaagtccactgtggccgtggagatcttttccatcctggcttccatggcagggctgctgggtggcatctttgccccaaatgttacatcatcctgctaaagcccgagcggaatgccccagactgggtgaggcgaggacactgggatcggtgggaaacgtggagccaggagctcctcagacctgcgccataaacccacgagccaggccttgttgaagatatcagggcccctgatttgagctctgggcttctgtgtggattaaaagatagttaaaggatgggcgtggtggctcacgcctgt

SEQ ID NO: 1306 - protein, 195 aa, Homo sapiens
MAGVITILWQTQGCVSPTGTKRCLLCPEEQYSSRTRDGCLPRTETFLAFDDPLGLMLALTVLKHRDTPVVGANNRALSCTPLTSLTLCALCPLPCLGCPTAATCRLYQTTVAVVFTMAVSSVLAFRVTRGLPDAFNKSKFLTFSVLLFCSFWTTFLPLYHSAQGKSTVAVEIFSILASMAGLLGGIFAPNVTSSC

SEQ ID NO: 1307 - DNA, 6985 bp, Homo sapiens
  source
  (1)..(6985)
  CDS (201)..(312)
  CDS (814)..(927)
  CDS (1027)..(1140)
  CDS (1253)..(1420)
  CDS (1899)..(1926)
  CDS (2420)..(2505)
  CDS (3682)..(3795)
  CDS (4627)..(4823)
  CDS (5350)..(5500)
  CDS (6328)..(6785)
ttaagtgggtaaggcactctctggaagcttctgcttgataagccgcctgtctaatttgagaaacagccctgatggagggtagcaggtggaggtgccaggtgcattgtgtcaggagggagccatgaaaactgctgaacagtgcttgtctatggcttcacaagtccttcagttctttttttgctttactttgtttcatagatattaatgactgtgagagcaacccttgtagaaacggtggcacttgcatcgatggtgtcaactcctacaagtgcatctgtagtgacggctgggagggggcctactgtgaaaccagtgagtctgccactctttggggagctctgggatgtatgggtcatgttggagggatcccacttcaacgtgggaaaactttctttgtactggaaatctctggaagcaagaccgcagtgatttctgcactgggacagtatcacttgtgtctcatttgcatttatgagtcctgatgatagcttatggggaggagcttctgctgaggacctatagaattagactgtgtaataaatattcctgcttgcaaggaaagtcatatttctactttcatttccatgggacttccagaggcccaccccacatcttgcctaacttgtggcattcaaagtaacccagttgggagctcctttattcctggaaaagcctgattgtgttaaagtactacgactgtggctgttctcagaataggatgttggatgtaagcagtaggaaaggcttggctctcgcctgtcgtgaatggtcctggatctcgtcttcagccgattgtctcccctttgattctagatattaatgactgcagccagaacccctgccacaatgggggcacgtgtcgcgacctggtcaatgacttctactgtgactgtaaaaatgggtggaaaggaaagacctgccactcacgtaagtggtagttggccttggatgctatctctgggacccttccctctgtcttctgtgggagggggccactgggactcacactgaaatattttcctccaggtgacagtcagtgtgatgaggccacgtgcaacaacggtggcacctgctatgatgagggggatgcttttaagtgcatgtgtcctggcggctgggaaggaacaacctgtaacataggtaactttatgccccacgtgggatctgcagtgggcatggccacctgggcgtgtctgctggttggcccctggagcttatgatatttctctgggcctggttcttgcccctccagactgtttctggatactcagggagggtggtcgtgtctgctcttcttttatagcccgaaacagtagctgcctgcccaacccctgccataatgggggcacatgtgtggtcaacggcgagtcctttacgtgcgtctgcaaggaaggctgggaggggcccatctgtgctcagagtgagtgtcctccccccttgaactctcccagggctgtcggagcagatcctgacacccttggggacttgcaatggaaaccagaagcagagctgtttgatgtctgcttttgtatcacctgggtctgcattaatgacttgatgggatacagccctgacctgggcatgagaaagtcgccaataagataagtggagacagatggcgtctcagttcccagctctgggtctgaccagcagcctgtctccttccattctcacccccacccctatcccctaccagggcctcttcctgtgtacatgtgtcccacagcaaatgaaactaagtgtggtgcgggcctggttccaatttagcaaaggtattttgctggtgttaactacgactttatcatttgggtattaggaaaataagtggtggttttacttagggctaagaccgctttccctgttgaagtcctcactattaagttgtcttttctttgcagataccaatgactgcagccctcatccctggtaagtgtgacatccttttaagccagcactcatccactatcgtgtgtgtgtgtgtgtgtgtgtgtgtgtgtgtgtgtgtgagaatcacccagggattgtgtttaaaatgcaagttctgagtcaggaggtctggggtggggcctcagactgcttttctaacaagctcccaggtgaagcgatcctgctgccccatggaccacactttaattagccaggttgtgtcctcatttagagcagtgatttttcaaccttggctgcacaccagaatcacctgggagcttttaaaaatcccgctgcctgggctgcaaccaagacctgtgaaattagactttctgggggtgggacccaggcatcagtattcttttaaaattccccaggcaacggccatggggtgagagccactgactgtaactggtgtggtgacatgtgagtgattggcagccagagtaatggactgggaggttggtaaccaaggtggtctttgctttcttagttacaacagcggcacctgtgtggatggagacaactggtaccggtgcgaatgtgccccgggttttgctgggcccgactgcagaataagtaaggactgtctccgtctggttttcccaatggctttaccgcttcattccatgcctcaccccaagactttcatctttaaaaacaaagccaccattccctttaagtagctctcatagagcaaaggatctctctcctccagctgggattaagatatgccaggctggatcctcccaggtacctgctggtagttccctgggtggtgtagccctccttgttcttggggagagagtgccagtcacagaatctgatgattaatctacagtggggtcctgaagaaagtatgtgcatttccccatgactaacatgaaattatgggcaagcagatgttaaccacagctacactggtataggataaagctaatacaaacggaagggaggacgactgtggcttccagaggcttgtctgtgctgggtctgatcaggccctggagaaatgactaaaacaggaaaataggggcaggcaacgcagtttttcaagaggcttaaagcatattattttgagccttttctctacttttttacaagccctttctcttacagaacaaaaaaggtgctagagtagttatggtttgattcttgtacccaaattgtctgaaattttactggtgcttgaaatccaagtctgggattaactagtcttcagcactagatgggggcaggttgtatctgtttcatgtttctaaataaacagttggcaaactgtggcccaggggccgtatccagcccactgtctgtttttataaatacagttttcttggcacacagccacacattcatttatgtattgtctatggctactttcatgataccacaagagttggatagttgtgacagagactatataccccacaaagcctaagatgtttactgtctgaccccttccaggaaactttgccaggcttgctgtaaattgcactgtcaaaggaatcaaattaaaaattgctgcctcccaaaatggttctccactgttagaactcaggatggtggtggtctttgggagccagtgattggaggtttttgcaatagatctgtttcttcttttggatgctgcttacctgagtgaaaattcatcaagcttatgatgatatgcttttcttgtatgttatgtcaataaaaacaatctcaaaacattgccacacaccatcagtccctaaacttgaactccatttctcctagacatcaatgaatgccagtcttcaccttgtgcctttggagcgacctgtgtggatgagatcaatggctaccggtgtgtctgccctccagggcacagtggtgccaagtgccaggaaggtatgtgtgccaggcttcagctgcccatgggtcttctggggtgagcgagctttgcagtcaccatttgacttttcacaaataagccactgtgctcagggaagggaacacacagtgggactacaagggaaagggaacgtgaagagtcttccccaaaacaggtagctgttgtttttggtcagctgttgccacaaaactgtgtaccaaaccatcccaaactgctgtggcttgcagcaagcattatttttattgctcatgatatgcagcatgggcagagagattgcgctgtgggttgggttcagttcgaccagtggctgtgtctggggcatattcctttcatcgccagtgggtaggtgtgcaagaggctagtcaaaggctctgctcacatcacatctgccaatgttacattggccagagcaagtcttgtggccaagcgcagagccagcaaaggcaggaagtacacatgctgttactgtgggaagaatgatcttaacatggcaaagggcacaggcataaccatttcataacagggaccaaagaattgaaccccgatccggttcacagaaaaataaactgctcacccgtctccacctgtcagtttcagggagaccttgcatcaccatggggagtgtgataccagatggggccaaatgggatgatgactgtaatacctgccagtgcctgaatggacggatcgcctgctcaaaggtaggacatgatggctgccgcagttcacctgtgttctggaatcagggatgagcatgcctgctaagctgccagcttctgtttttctccaggtctggtgtggccctcgaccttgcctgctccacaaagggcacagcgagtgccccagcgggcagagctgcatccccatcctggacgaccagtgcttcgtccacccctgcactggtgtgggcgagtgtcggtcttccagtctccagccggtgaagacaaagtgcacctctgactcctattaccaggataactgtgcgaacatcacatttacctttaacaaggagatgatgtcaccagtatgtaacaacctttgttttttttttgaatggtggatgtctgcttgcttgctttaaaggaggaatgccatgagctaggatctacttctccctagcttacattcctgttttataataaagtaagcttgaacttagccagcctcaaagagaacatctcagccttttgttcttcctctcaatcttacacgtgtgtgggtttttaaaaatcgttttagggtcttactacggagcacatttgcagtgaattgaggaatttgaatattttgaagaatgtttccgctgaatattcaatctacatcgcttgcgagccttccccttcagcgaacaatgaaatacatgtggccattgtaagtataagacccattcacacctcattattcgatggcaaggcagttcggttaaccagtgtctgaatggagcaaattcactgacaaaaagctttgcagacacagattgtcgagtaattttgaagaaaggctgctttgagtattcctctgactctcaagtctgacaattgtttttccagtctgctgaagatatacgggatgatgggaacccgatcaaggaaatcactgacaaaataatcgatcttgttagtaaacgtgatggaaacagctcgctgattgctgccgttgcagaagtaagagttcagaggcggcctctgaagaacagaacaggtaggtgtcaagtgggactagtttgtgtgatgatagtagatgatctcattatactattcaataaagccatcaggtcgagggattatctggcagtgccctaccctcgcaggagctcccaatttaactgagaactgagggcagcctactttactaaggtcacatggcccatgggaacagaggtctgcctcatattttccttcccaacacactatgcaacgttccctgcagaacaggtattgtgctagatccgtgacaaagccctaggacactgcttgtcctttgtccttgagtttgaagctgtacaaagcctgacttggcattttggtgtcctgggacagcctagccactgctgagctctgtgaggctcgatggccccgcaggggtgtccaggcttccctcctgaggatctcgagcaccgtttcagccaagggagagattgggcatggagccatggcacgtttgagctgtctgtgctaatttgaatcggatttctagttctgaaaaccaactcctgtactgagctgcctcagtagccagacttaacaagacactgctctccccatgcgaagtcaaagagcctgtaggagctgccgctccacccagtctctccagggataagagtatcaaggtctacaggggcctgatcccagcatttgcttatcaagttgtgaagtgaccatatgcaatgatgaaaagggacttgtccctgtggcccccctcttagggataaagggcaggagaaccactgttggtattcttttgttcctgcgatgatgcttttttctttctttcttggagagttaattggttttgtgcctgccttacagatttccttgttcccttgctgagctctgtcttaactgtggcttggatctgttgcttggtgacggccttctactggtgcctgcggaagcggcggaagccgggcagccacacacactcagcctctgaggacaacaccaccaacaacgtgcgggagcagctgaaccagatcaaaaaccccattgagaaacatggggccaacacggtccccatcaaggattatgagaacaagaactccaaaatgtctaaaataaggacacacaattctgaagtagaagaggacgacatggacaaacaccagcagaaagcccggtttgccaagcagccggcgtacacgctggtagacagagaagagaagccccccaacggcacgccgacaaaacacccaaactggacaaacaaacaggacaacagagacttggaaagtgcccagagcttaaaccgaatggagtacatcgtatagcagaccgcgggcactgccgccgctaggtagagtctgagggcttgtagttctttaaactgtcgtgtcatactcgagtctgaggccgttgctgacttagaatccctgtgttaatttaagttttgacaagctggcttacactggcaatggtagtttctgtggttggctgggaaatcgagtgccgcatctcacagctatgcaaa

SEQ ID NO: 1308 - protein, 513 aa, Homo sapiens
INDCESNPCRNGGTCIDGVNSYKCICSDGWEGAYCETNINDCSQNPCHNGGTCRDLVNDFYCDCKNGWKGKTCHSRDSQCDEATCNNGGTCYDEGDAFKCMCPGGWEGTTCNIDCFWILREGGRVCSSFIARNSSCLPNPCHNGGTCVVNGESFTCVCKEGWEGPICAQNTNDCSPHPCYNSGTCVDGDNWYRCECAPGFAGPDCRININECQSSPCAFGATCVDEINGYRCVCPPGHSGAKCQEGHSECPSGQSCIPILDDQCFVHPCTGVGECRSSSLQPVKTKCTSDSYYQDNCANITFTFNKEMMSPSAEDIRDDGNPIKEITDKIIDLVSKRDGNSSLIAAVAEVRVQRRPLKNRTDFLVPLLSSVLTVAWICCLVTAFYWCLRKRRKPGSHTHSASEDNTTNNVREQLNQIKNPIEKHGANTVPIKDYENKNSKMSKIRTHNSEVEEDDMDKHQQKARFAKQPAYTLVDREEKPPNGTPTKHPNWTNKQDNRDLESAQSLNRMEYIV

SEQ ID NO: 1309 - DNA, 6901 bp, Homo sapiens
  source
  (1)..(6901)
  CDS (201)..(513)
  CDS (1633)..(1937)
  CDS (3480)..(3614)
  CDS (6546)..(6701)
gggcttcccctccagggtggcctccgagccctatctccctccctccgtgggtcatccccctgggccttatgctggtcacgagcctgtttgagctgagagcaccctcctgacccttgcattgggccctctgtgtcagtggcctcacccctgcagcatcctgcctggatgtgcccggccctgtacttccccatcctccccacatgcaggcagcagtctcccggcatgggcagcccggcccacccttctctcccgcccctgccatactcggggccccttctgctcctgtgtggccgccttctccaggctccccgaggcccacactgggctcttgccgtccctggctcgtgaaggcccagcgtgatcttgcttgggcccccccactgacctgccagcactgtggaaagggccagggcctctgccattgtgctgtcccattgctgcagccagggggacaacgcctgaaaggttttagttataaagtcattgatgcccatcgcaaaaaaatccaacacggtgccgcagcgtgcaaagcagaaaactgctgtttgctacggggaatcccagcattttctgcttgtctgtgttgggttgatgccagacacagatgcagatggtcactcacagatgcaggtggtcactcccggtcatgagtggtgggccttacaacccatccccagtctatgggtaaagtcaccatttccatttttcttacacgaggaaaacactgagatgaatgcccttctacctacatttttgtttccaaattctaataatgaccctcaggtggattcctggaaggggaatggccaggttggagagtatgtgcttttgaaagcaggtttctgtcaatattgcaggtaccctgcaggccggcatgcgggcttcctccccgtcaggatggtggagtggcctccccaccctccctgagcccctgacgggccggctgggctcccagcctttccttaaccagagtgaggccggccggcctgctgtggactgagtggcccctgtgtgtctcctgactctgttgggactcgctttcctccctgctgatctggggagcattcatctgtatcatgtattttcaatcacctgtgcccccatcacgccccacactcgtctgcctttaattcaactcacagtgtttctgagtgtccttggaagcaccctgggggctggcctgggctctgccctgcccagcgctggcatccagaagctcgtgtttgtgctcagttctccctgttgttcgtctgcccttcatcccactgacctgctcaccgggacctctgtgtgcttctctcgtcctccctgctgccggcctgcctgcctgcccccgagcctccactgtccccactgtccccccgtctccagtgcccagcagcacagacacctctgcccttctccaaagggttcctgggcatttttgtttattttttcttcaggtgaactttaggacattttttgtccagttcttttttttttttttttttaagcactttgcagattttaattggaactgcatcggaagactagtttctttgcagagcaccagaagcctggcgtgtcacctctccatgtcaggaatgtggtgccttcattcctggacatgttcatgccaccgctcacctccagggcccgccctgcctggctgccactcacctccagggcccaccctgccctgctgccactcacctccagggcccgcagtaactgactgccactcacctccagggcccgccctgcctggctgccactcacctccagggcccgcagtaactgactgccactcacctccagggcccgccctgcctggctgccactcacctccagggcccaccctgccctgctgccactcacctccagggcctgcagtaactggctgccactcacctccagggcccgccctgcccggctgccactcacctccagggcccgcagtaactgactgccactcacctccagggcccgccctgcctggctgccactcacctccagggcccaccctgcccgctgccactcacctccagggcccgtcctaacctgctgccactcacctccagggcctgccctgcctggctgcctctcacctcctgggcccaccctgcccgctgccactcacctccagggcctgcccgggcatacccagctgctattcacctccagggcctgccccgcctccaggcccccctcccccccaattgccactcacctccagggccctcccgggcatacccagctgctactcacctccagggcccgctctgcccagctgccactcaactccagggcctgccctgcctggctgctgctcattcaccgactctgtggtttcactgctcttctaatttatcaaacatttaaccgtgaaagactttcattctagacttttctgtctgtgcccagaggttctcttgatgatgattttctgaatgttttgagacgcccgtgacctggtctgtcccagagctcatgggagcccttccaggtatcttctcgagtttgtgttttgtgacacccattgtataggttcagcatccctaatcaaaacagccagaattcagctgggcgcagtggctcacacctgtgatcccagcactttgggaggctgaggtgggtggatcacctgaggccaggagctcgagaccagcctggccaacatggtgaaactctgtctctactaaaaatacaaaaattagctgggcatgatggcgcgtgcctgtaatcccagctactcgaaaggctgagacaggagaattgcttgaacccaggaggcagaggttgcagtgagctgagattgtgccattgcacgcctgggcaacagagcgagactccatctaaaaaaaaataacaaaaaatccagaatttgaaatactccaaaatctgacagtttttgagcaccggaaagacaacccggtggaaaatcctgtacctgaccttgtttgacgagtctcagaacacggtcaaaagtttcttcatgcacaaaattactccagaactcagggtgaggccctgggcagtagcaggcaacccctttggcttgcaaatgtttgtcaggtattatataaaatcaccttctggctgtgtgtgtacagtgcatatgagcataaatgcatttcgtgtttagacttgggttccatcctcaagacatctcattatggacatgtgaatattcccaaatccaaaactactggccccaggcattttggataagggaccctcactctgtactgagccagggggacacggcagctcccagaatggcccctcgagggtggcctgggtgctggctcctgcctggcaggggcgggcatgtgtgggagagatgggggcctggtggggggcttgtgcgtgccctgggaccccgtggctgccgggcgggtcatgggctggtgggagccgggctgcaggcttttccctgtggctgctgcttattctcccagcagcgcctgatctgcccgctcttcccgttcagctttcagattgcatcttctctgtctaaagagctctgtgccctggtcttcggggtcaacacgttctttgccaccatcgtcaagaccatcatcactttcattgtctcggacgtgcggggcctgggcctcccggtccgcaagcaggtgagcccatttcaggcctgcgtcctcggggatggaagctacttgtggggacattgttgaggcctcctggtgcccgcctgatgtggagcccactgtgggctgggggcacagggtgcgggcctggggcttccagtgggacacaccaggccagcgagagcaggaagtgagagagaccctagcggggctcagttgttgtgggcgggagcctccgtcaggccctgggcctcagtgggagcagctgagcctctgctcgccacggcggagctgtccttgtctccgctctctgcctgtggctgccggaacttggtgtccttgagccctggctggaggccacgtgacctttgtcctcttcaggaaggagagctgagcagagccactcagcagtgtcagtgcgcaggcctctgcgggtgccctcccctttcccacctctcgcgggcctctgctgcttctgagaagagctggaaaacacacatttaactcctgagggtcccagccaaggccgggtctccgagtgagctggaatcagccatggtgggcgtggtgtgagaggtccttccaggctcctcaggactgccccagcctgcagctagacagatgcccttggcgggtgggacaagggctttgtccacctggggcccaggtctcactgggcaggaggactgtcagggttagtcctgatcctctgagggtgcggagtctgttcagcttcagtgactccagagctcagggtaaggcccgggcaatagcaggcatccccttcggctcacaaatgcctgttaggtgaggatggctgttgctcactcatcgaaatgcattcttcagcccaagagtgtcattagggcctgtccacgctggcaggccacgtggccctgtgccacagagccctctgggtacaacacccccgacccaggtgtgaacactcagggcgggtgagtctccaaggcccaggggtgaacgcttagggtgggtgagcctccgaggcccaggtgtgaacactcagggcaggtgagcctccaaggcccaggcgtgaacactcagggtgatgagcctccaaggcccaggggtgaacgcttagggcaggtgagtctccgaggcccaggggtgaacactcagggcgggtgagcctccgaagcccaggggtgaacgttcagggcaggtgagtctccgaggcccgggggtgaacgctcaggacaggtgagcctccaaggcccaggggtgaacgctcagggtgggtgagcctctgaggcccaggtgtgaacactcagggcgggtgagcctccgaggcccaggtgtgaacactcagggcaggtgagcctccaaggcccaggcgtgaacactcagggtgatgagcctccaaggcccaggggtgaacgcttagggcaggtgagtctccgaggcccaggggtgaacactcagggcgggtgagcctccgaagcccaggggtgaacgttcagggcaggtgagtctccgaggcccgggggtgaacgctcaggacaggtgagcctccaaggcccaggggtgaacgctcagggtgggtgagcctctgaggcccaggtgtgaacactcagggcgggtgagcctccgaggcccaggtgtgaacactcagggcaggtgagcctccaaggcccaggcgtgaacactcagggtgatgagcctccaaggcccaggggtgaacgcttagggcaggtgagtctccgaggcccaggggtgaacgctcagggcgggtgagcctccgaagcccaggggtgaacgctcaggacaggtgagtctccaaggcccacgggtgaatgtgtccaggcccggcctgggtggacacagcctcctggtggccgggctggtctcaggtctgcagaaagggggcccagaaggcttctgttgaatgcatggccccagggcggggtgctggcagcagtccagctggctttggaggggctccagcacccgggaggaggtcctccccattcttggagccccgagttacctctgtccccagacagcagtggctgccagcatgtatgggcagggagtgcccgtcccagggagaccctcagggccctgtgtggccccagccaggctggaactggcttctgacctgcctctgggtgctgactgcccctgactaccgttgccgccccacctccatccctctgtgactgcctcttgttcagcccttggcagctggaggggcagatgcctgagggctctttagggactctgtgcgtgtgctcccctgtagctgccctgtggaggggacccctcacggtgggcttctaagggcccatgggggcttggtgcagggggtggagcagttcttccccagagagctggtcacgaggaagccctttcccttccttagctggtcctggtcctggtgtggccgtggaggctgtgggggagacagctctggggaggtggaggcaggttctggcctgtggttcctggctgcctcttgtcacatagaaaaaaaacacatggacttttctctggctggtttgatttctaggttaaaaagttaactagtggggcattttgctcatggctggacatcctgttgggtctagaggaggtggtgcgggctcatcttgcccccgtgcctgttactgggtgccgagtgtccactctctttcctccagcatggggagaacagctgggccaggagttcaggcttggtcgggggtagagtctggagacgggagggagccgtgatggagcatggggggacagacagggctagagcttgcctgggtttgcctgctttttaaattaagctttatatttgggtaatcttatattcacatgctgtttaataaataatacagggagatccatgtaccccgtacccagttttcacagtggtcacgtcttacagttctgtagcacatcacaaccagcatggcgacagtcaggatccagaacattctatccccacagggatccctcatgctgctctttatagccaaggcccaccctactcccagcctcacgtcctctttaacccctggcagccactaccctcttctccgcttgtatgagtttgtcatttcaggagtgttgtataaacacggctatgcattgtgtatcgtttagggattggctcttttcactcaacactgttctctgaacattcatccatgttgttactgtggctgtggctgattccttcttgctgctgagtgctgttccagggtgtaggtacagcacactttatttattcaccgttgaaagacttgtttccagtgtgaggtattaccaataaagctgctatggacattcttttataggttttt

SEQ ID NO: 1310 - protein, 302 aa, Homo sapiens
MQAAVSRHGQPGPPFSPAPAILGAPSAPVWPPSPGSPRPTLGSCRPWLVKAQRDLAWAPPLTCQHCGKGQGLCHCAVPLLQPGGQRLKGFSYKVIDAHRKKIQHGPALPGCHSPPGPTLPCCHSPPGPAVTDCHSPPGPALPGCHSPPGPAVTDCHSPPGPALPGCHSPPGPTLPCCHSPPGPAVTGCHSPPGPALPGCHSPPGPAIASSLSKELCALVFGVNTFFATIVKTIITFIVSDVRGLGLPVRKQGSLMLLFIAKAHPTPSLTSSLTPGSHYPLLRLYEFVISGVLYKHGYALCIV

SEQ ID NO: 1311 - DNA, 1697 bp, Homo sapiens
  source
  (1)..(1697)
  CDS (201)..(239)
  CDS (601)..(1497)
  modified_base (480)..(579): a, t, c, g, unknown or other
  modified_base (609)..(609): a, t, c, g, unknown or other
  modified_base (614)..(614): a, t, c, g, unknown or other
  modified_base (617)..(617): a, t, c, g, unknown or other
  modified_base (1181)..(1181): a, t, c, g, unknown or other
  modified_base (1199)..(1199): a, t, c, g, unknown or other
  modified_base (1208)..(1208): a, t, c, g, unknown or other
  modified_base (1288)..(1387): a, t, c, g, unknown or other
  modified_base (1419)..(1419): a, t, c, g, unknown or other
  modified_base (1421)..(1421): a, t, c, g, unknown or other
  modified_base (1440)..(1440): a, t, c, g, unknown or other
  modified_base (1450)..(1450): a, t, c, g, unknown or other
  modified_base (1453)..(1453): a, t, c, g, unknown or other
gtgctacctcccagaaataaccaccattaatatcttggtgcctaacattccagatttattgccttcctttcttccttcctccctccctccctccctccctctctcccttccttccttccttcctctctctctctctctttccttctttcattttctttttttttgacggagtctcgctctgtcacccaggctggagtgcaatggtgcgatctcagctcactgcagcctccacctcccgggttcaagcgattctcctgccttagcttcctaagtagctgagactacaggtatatgccaccgtgccctgctaatttttgtattttttgttggagacggggtttcatcatgttgcctaggctagtcttgaactcctggcctcaagtgacccgcctgcctcggcctcccagagttctgggattacaggcgtgagccaccgtgcctggcccagatatctttctatacatgtattcacacgcatannnnnnnnnnnnnnnnnnnnnnnnnnnnnnnnnnnnnnnnnnnnnnnnnnnnnnnnnnnnnnnnnnnnnnnnnnnnnnnnnnnnnnnnnnnnnnnnnnnngggtgacttgctgactcgcaggtcggactnctagnagnatcccccttcgccagcgtcaacaccattgtcgtggtgtcagtggatcgctactgggggcgcatccaccctatctcctacccgtccaagatgacccagcgccgcggttacctgctcctctatggcacctggattgtggccatcctgcagagcactcctccactctacggctggggccaggctgcctttgatgagcgcaatgctctctgctccatgatctggggggccagccccagctacactattctcagcgtggtgtccttcatcgtcattccactgattgtcatgattgcctgctactccgtggtgttctgtgcagcccggaggcagcatgctctgctgtacaatgtcaagagacacagcttggaagtgcgagtcaaggactgtgtggagaatgaggatgaagagggagcagagaagaaggaggagttccaggatgagagtgagtttcgccgccagcatgaaggtgaggtcaaggccaaggagggcagaatggaagccaaggacggcagcctgaaggccaaggaaggaagcacggggaccagtgagagtagtgtagaggccangggcagcgaggaggtcanagagagcancacggtggccagcgacggcagcatggagggtaaggaaggcagcaccaaaattgaggagaacagcatgaaggcagacaagnnnnnnnnnnnnnnnnnnnnnnnnnnnnnnnnnnnnnnnnnnnnnnnnnnnnnnnnnnnnnnnnnnnnnnnnnnnnnnnnnnnnnnnnnnnnnnnnnnnnaggttgacttgcatgcacgccgttcgactctnanagaatccccccagcttttntggccccagnagnaatgcacagttagaggaatgagacaatgggggacaatgttataaatactgatagaagttagctcaagtattatgggggtttaatccactctagagaaaatggagtaaaggaagaattctctgtgatggtggggtaaatgaaaagcttttaatgaacaggtgatagaacccagtgagagggggcctaactgggtcagccactagggggcatgtgagtacgggtctgcaactgggaaagaggctcc

SEQ ID NO: 1312 - protein, 311 aa, Homo sapiens
  MOD_RES (18)..(19): Variable amino acid
  MOD_RES (207)..(207): Variable amino acid
  MOD_RES (213)..(213): Variable amino acid
  MOD_RES (216)..(216): Variable amino acid
  MOD_RES (243)..(276): Variable amino acid
  MOD_RES (287)..(287): Variable amino acid
  MOD_RES (293)..(293): Variable amino acid
  MOD_RES (297)..(298): Variable amino acid
MVRSQLTAASTSRVGLLXXSPFASVNTIVVVSVDRYWGRIHPISYPSKMTQRRGYLLLYGTWIVAILQSTPPLYGWGQAAFDERNALCSMIWGASPSYTILSVVSFIVIPLIVMIACYSVVFCAARRQHALLYNVKRHSLEVRVKDCVENEDEEGAEKKEEFQDESEFRRQHEGEVKAKEGRMEAKDGSLKAKEGSTGTSESSVEAXGSEEVXESXTVASDGSMEGKEGSTKIEENSMKADKXXXXXXXXXXXXXXXXXXXXXXXXXXXXXXXXXXVDLHARRSTLXESPQLXWPQXXCTVRGMRQWGTML

SEQ ID NO: 1313 - DNA, 949 bp, Homo sapiens
  source
  (1)..(949)
  CDS (201)..(749)
  modified_base (58)..(157): a, t, c, g, unknown or other
  modified_base (189)..(189): a, t, c, g, unknown or other
  modified_base (867)..(949): a, t, c, g, unknown or other
ctgagcagagaaaagaacaggatatagacttctcactgtgaccacttcaagttagatnnnnnnnnnnnnnnnnnnnnnnnnnnnnnnnnnnnnnnnnnnnnnnnnnnnnnnnnnnnnnnnnnnnnnnnnnnnnnnnnnnnnnnnnnnnnnnnnnnnngcactgcgtacgaataccccctctgtggtggnaaaaaccccccctgcggtacccatccatcattactaatcaatttgtggccaaagctagtgtcttcattgtggtgcggaatgcgcttcttactgcacccattcctatcctcacttccctgctccattactgtggggaaaatgtcattgagaactgcatctgtgccaacttgtctgtgtccaggctctcctgtgataatttcacccttaacagaatctaccaatttgtggctggttggaccttgctgggctcagatttattcctcatcttcctctcttacaccttcattctaagagctgtgcttagattcaaagcagagggggcggcagtgaaggccctgagcacatgtggctcccacttcatcctcattcttttcttcagcaccatactgctggttgtggtgttgacaaacgtggccagaaagaaggtccccatggacatcctgatcctgctgaacgtccttcatcaccttattcctcctgcattgaaccctattgtgtatggggttcggaccaaagagataaaacagggaattcagaagttactgcagagagggaggtgaatatgtaaagcatttctaatacctcctgttcttcctcttcagtgattttacctaggcagcgaagtagagaaatgtcagttagtgagtgtttattgcatgcactgaggctcccttcatnnnnnnnnnnnnnnnnnnnnnnnnnnnnnnnnnnnnnnnnnnnnnnnnnnnnnnnnnnnnnnnnnnnnnnnnnnnnnnnnnnn

SEQ ID NO: 1314 - protein, 182 aa, Homo sapiens
LRYPSIITNQFVAKASVFIVVRNALLTAPIPILTSLLHYCGENVIENCICANLSVSRLSCDNFTLNRIYQFVAGWTLLGSDLFLIFLSYTFILRAVLRFKAEGAAVKALSTCGSHFILILFFSTILLVVVLTNVARKKVPMDILILLNVLHHLIPPALNPIVYGVRTKEIKQGIQKLLQRGR

SEQ ID NO: 1315 - DNA, 2678 bp, Homo sapiens
  source
  (1)..(2678)
  CDS (201)..(1189)
  CDS (2061)..(2478)
  modified_base (431)..(431): a, t, c, g, unknown or other
  modified_base (463)..(562): a, t, c, g, unknown or other
  modified_base (582)..(584): a, t, c, g, unknown or other
  modified_base (590)..(594): a, t, c, g, unknown or other
  modified_base (596)..(596): a, t, c, g, unknown or other
  modified_base (601)..(602): a, t, c, g, unknown or other
  modified_base (630)..(637): a, t, c, g, unknown or other
  modified_base (653)..(653): a, t, c, g, unknown or other
  modified_base (671)..(672): a, t, c, g, unknown or other
  modified_base (899)..(899): a, t, c, g, unknown or other
  modified_base (901)..(901): a, t, c, g, unknown or other
  modified_base (903)..(903): a, t, c, g, unknown or other
  modified_base (1012)..(1012): a, t, c, g, unknown or other
  modified_base (1033)..(1034): a, t, c, g, unknown or other
  modified_base (1047)..(1047): a, t, c, g, unknown or other
  modified_base (1050)..(1053): a, t, c, g, unknown or other
  modified_base (1057)..(1057): a, t, c, g, unknown or other
  modified_base (1070)..(1070): a, t, c, g, unknown or other
  modified_base (1076)..(1076): a, t, c, g, unknown or other
  modified_base (1078)..(1080): a, t, c, g, unknown or other
  modified_base (1082)..(1082): a, t, c, g, unknown or other
  modified_base (1142)..(1142): a, t, c, g, unknown or other
  modified_base (1144)..(1144): a, t, c, g, unknown or other
  modified_base (1147)..(1147): a, t, c, g, unknown or other
  modified_base (1155)..(1156): a, t, c, g, unknown or other
  modified_base (1168)..(1168): a, t, c, g, unknown or other
  modified_base (1445)..(1544): a, t, c, g, unknown or other
  modified_base (2301)..(2301): a, t, c, g, unknown or other
  modified_base (2340)..(2440): a, t, c, g, unknown or other
  modified_base (2623)..(2623): a, t, c, g, unknown or other
ttcccgactggaaagcgggcagtgagcgcaacgcaattaatgtgagttagctcactcattaggcaccccaggctttacactttatgcttccggctcgaatgttgtgtggaattgtgagcggataacaatttcacacaggaaacagctatgaccaaaataaaaattagagctcggtacccctgctggcgcacaacctcagcatgttagccttacgtgccggagcacagcgttttcatgcccagccgctgagcgccaatgacacgctgaaaaataaactcctcgccgccttaccgttcaagccaacgggcgcacaggcacgcgtagtggcggagatcgagcgcgatatggcgctggatgtgccgatgatgcgtctggtgcagggcgatgtaggttccggtaaaacgctggtcgccgccctcgccggtttcctntacaccccagcggcgagtcagcaactcagtcnnnnnnnnnnnnnnnnnnnnnnnnnnnnnnnnnnnnnnnnnnnnnnnnnnnnnnnnnnnnnnnnnnnnnnnnnnnnnnnnnnnnnnnnnnnnnnnnnnnnttttctcttctattatccannnaaaagnnnnngncaggnnaacacccccccaaacaacacgggagagnnnnnnnnagacacacccccaganaaacccacgcagacgagnnccccgccagaaaacggaggaggggaaggaaagagccacgggcagggaccaacaccggcagggcgccagccgcgcggcaaacgcggcccgagacgcgacgccgagaaaagacggagcagcgacaaagcagggagaggagacgagagggacgcaaaggagaccagagccggacagacgccaaacacacaccgcacccgcacgcgcggcccgcccggcgcgggggcgagncngnccccgcgccccgcgccccgcgcgccgcggccggggcgccggcccgccccgcccgcccccgccggccgggcggggggcggggggggcgccgcccccccgcgcggcgcggncgcccccgccgcgcgcccccnncgcccccccggcncgnnnnccgnggcgggggggcgngggggngnnngncgccccccgcccaggggggggggcccccctggcccctccgcccaggtgcttgccaacctncnagnctattttnncttggttctttncaccaacattgtcaccccattgtgtttgacgatttcatcccagccctccatctatattgaaaggaaaagcagctctgattctttttcttttcttttcttttctttttttaaagacagggtctcactttgttgcacaggctggagtgcactggcgagatcatagctcactgccacctcgaactcctgggctcaagggatccacctgcctcagcctcccaagtggctgcaaatacaggcattgtgtatctctaagccgacgggagtcagcactagtcgnnnnnnnnnnnnnnnnnnnnnnnnnnnnnnnnnnnnnnnnnnnnnnnnnnnnnnnnnnnnnnnnnnnnnnnnnnnnnnnnnnnnnnnnnnnnnnnnnnnncgtccccaagtctgggcaattgaaggaggtatttctccccattttacagatgcagaagttcaggaatattaaatggtttaggtgcggcccttgagtaggaaggagagcaaagacacagaggctgctactggggctcctggttctgacccttccgcatcccagcgtctccacagaggtaaggagaatcaaacaggctatcacctgggaaaggaagagtggatgcaagagggaggaaagtgatcaattcctcttctcaggtattattcattccaattttctcaatttgccacaagtgccagaaaatgccgcaacatgaaaagtgacaaccatagcttcttaggggactcccctaaagccttcatccttctgggtgtgtctgacaggccgtggctggaactccctctctttgtggtcctcctgctgtcctatgtgctggccatgttggggaacgtcgccatcatcctggcatcccgggtggatcctcaactccacagccccatgtacatcttccctcagtcacctgtccttcctggacctctgctacaccaccacgacagtccctcagatgctggtcaacatgggcagttcccagaagaccatcagctatggaggctgcactgtgcaatatgcagtcttccactggctgggatgcacggagtgcatcgtcctggccgccatggccctggaccgctacgtggccatctgcaagcccctgcactatgccgttctcatgcaccgtgctctgtgtcaggggatncctctagagccgagcctggatgtcagcaacgccatgtcnnnnnnnnnnnnnnnnnnnnnnnnnnnnnnnnnnnnnnnnnnnnnnnnnnnnnnnnnnnnnnnnnnnnnnnnnnnnnnnnnnnnnnnnnnnnnnnnnnnnnttttatttattgttggtgccaggcaacccatcggctgaaggaaaaaggcagtgatttcttttcccaagacccacgctaaaattgaggactttaaggctattttgcaaaggaagaacccaaaatttagagaatgtaagtaacttgtctcaaagttaacatataggacaaagaagactttaatanaatctataaagcagaaataacacagaccacacagatactggtaacaaataaaatt

SEQ ID NO: 1316 - protein, 468 aa, Homo sapiens
  MOD_RES (88)..(121): Variable amino acid
  MOD_RES (128)..(128): Variable amino acid
  MOD_RES (130)..(132): Variable amino acid
  MOD_RES (134)..(134): Variable amino acid
  MOD_RES (144)..(146): Variable amino acid
  MOD_RES (151)..(151): Variable amino acid
  MOD_RES (157)..(158): Variable amino acid
  MOD_RES (233)..(235): Variable amino acid
  MOD_RES (271)..(271): Variable amino acid
  MOD_RES (278)..(278): Variable amino acid
  MOD_RES (283)..(286): Variable amino acid
  MOD_RES (293)..(294): Variable amino acid
  MOD_RES (315)..(316): Variable amino acid
  MOD_RES (319)..(319): Variable amino acid
  MOD_RES (323)..(323): Variable amino acid
  MOD_RES (410)..(410): Variable amino acid
  MOD_RES (424)..(457): Variable amino acid
MLALRAGAQRFHAQPLSANDTLKNKLLAALPFKPTGAQARVVAEIERDMALDVPMMRLVQGDVGSGKTLVAALAGFLYTPAASQQLSXXXXXXXXXXXXXXXXXXXXXXXXXXXXXXXXXXFLFYYPXKXXXQXNTPPNNTGEXXXDTPPXKPTQTXXPPENGGGEGKSHGQGPTPAGRQPRGKRGPRRDAEKRRSSDKAGRGDERDAKETRAGQTPNTHRTRTRGPPGAGAXXXPRPAPRAPRPGRRPAPPAPAGRAGGGGGAAPPRGAXAPAARPXRPPGXXXXAGGRGGXXRPPPRGGGPPGPSAQVLANLXXYFXLVLXTNIVTPFHLSFLDLCYTTTTVPQMLVNMGSSQKTISYGGCTVQYAVFHWLGCTECIVLAAMALDRYVAICKPLHYAVLMHRALCQGXPLEPSLDVSNAMSXXXXXXXXXXXXXXXXXXXXXXXXXXXXXXXXXXLFIVGARQPIG

SEQ ID NO: 1317 - DNA, 1771 bp, Homo sapiens
  source
  (1)..(1771)
  CDS (201)..(283)
  CDS (689)..(1118)
  CDS (1278)..(1571)
  modified_base (1)..(9): a, t, c, g, unknown or other
  modified_base (22)..(22): a, t, c, g, unknown or other
  modified_base (58)..(58): a, t, c, g, unknown or other
  modified_base (100)..(100): a, t, c, g, unknown or other
  modified_base (741)..(741): a, t, c, g, unknown or other
  modified_base (744)..(744): a, t, c, g, unknown or other
  modified_base (746)..(746): a, t, c, g, unknown or other
  modified_base (749)..(749): a, t, c, g, unknown or other
  modified_base (752)..(752): a, t, c, g, unknown or other
  modified_base (771)..(771): a, t, c, g, unknown or other
  modified_base (784)..(883): a, t, c, g, unknown or other
  modified_base (1550)..(1550): a, t, c, g, unknown or other
  modified_base (1557)..(1557): a, t, c, g, unknown or other
  modified_base (1597)..(1696): a, t, c, g, unknown or other
nnnnnnnnncagggttactcanagtcaggcttggacccagcaagagttggatccagangatgcatgatgttttagcagcaatgatattcatgaagctttntgcttcactccttgttatggtttgagatcccacagcagaccctgagacaaagacctggaggcaggtggttaacttgggaggtggggtcaggggaagggagatggggaagggagaggagacagggcaggtgcttcccgagactggtgctctgttgggagctggagcacagtctcgaaaggacaggtgtgaaacgtccaagagctgacctgccagcagctgcctcctgcccctcaccacagagggtggctgaagcttttatgccctggctctcccagctgccctgcacgggctgctgctcaggctaaggaccgagaagtgctgatgcttgagggactcatggtcagtgaggacaggctgtgagctgagctctgagctcggggcgaaccaaagatgggagaggagcatcagtgccccccgccccatcaccacattagaatcctgcgggaactggctgggttctcgaaggcgttgttatcgccctgtgctcacacataaggaccctgagacccagggccactagggtgaggcgacagggcagggcctgatgcacctgtcgaaatccacttctagctcccaccctgcccccagagacatgcgccccagggccggcacacagcaagggactcggggcgagggggttnctntnagnacnagggacgggggttctgcancagcaagtagttnnnnnnnnnnnnnnnnnnnnnnnnnnnnnnnnnnnnnnnnnnnnnnnnnnnnnnnnnnnnnnnnnnnnnnnnnnnnnnnnnnnnnnnnnnnnnnnnnnnncaatgggggctgccaccaggactgctttgaagggggggatggctccttcctctgcggctgccgaccaggattccggatgctggatgacctggtgacctgtgcctctcgaaaccattgcagatccagcccatgtcgtgggggggccacgtgcgtcctgggaccccatgggaaaaactacacgtgccgctgcccccaagggtaccagctggactcgagtcagctggactgtgtggacgtggatgaatgccaggactccccctgtgcccaggagtgtgtcaacacccctgggggcttccgctgagaatgctgggttggctatgagccgggcggtcctggagagggggcctgtcaggatgtggatgagtgtgctctgggtcgctcgccttgcgcccagggctgcaccaacacagatggctcatttcactgctcctgtgaggagggctacgtcctggccggggaggacgggactcagtgccagaacgtggatgagtgtgtgggcccggggggccccctctgcgacagcttgtgcttcaacacacaagggtccttccactgtggctgcctgccaggctgggtgctggccccaaatggggtctcttgcaccatggggcctggtctctgggaccaccatctgggccccccgagaggaggacaaagggtttctttnagagtcngcagcgcggtttagtcaagtctagtcccttttccataacnnnnnnnnnnnnnnnnnnnnnnnnnnnnnnnnnnnnnnnnnnnnnnnnnnnnnnnnnnnnnnnnnnnnnnnnnnnnnnnnnnnnnnnnnnnnnnnnnnnnggttaggtcatcaaagctgggaagtgttcttgcaggggagctgccttgtgcccactgggagatggcaagccctga

SEQ ID NO: 1318 - protein, 268 aa, Homo sapiens
  MOD_RES (46)..(48): Variable amino acid
  MOD_RES (56)..(56): Variable amino acid
  MOD_RES (60)..(93): Variable amino acid
  MOD_RES (262)..(262): Variable amino acid
  MOD_RES (265)..(265): Variable amino acid
MGKGEETGQVLPETGALLGAGAQSRKDRDMRPRAGTQQGTRGEGVXXXTRDGGSAXASSXXXXXXXXXXXXXXXXXXXXXXXXXXXXXXXXXXNGGCHQDCFEGGDGSFLCGCRPGFRMLDDLVTCASRNHCRSSPCRGGATCVLGPHGKNYTCRCPQGYQLDSSQLDCVDGCTNTDGSFHCSCEEGYVLAGEDGTQCQNVDECVGPGGPLCDSLCFNTQGSFHCGCLPGWVLAPNGVSCTMGPGLWDHHLGPPRGGQRVSXRVXSAV

SEQ ID NO: 1319 - DNA, 1266 bp, Homo sapiens
  source
  (1)..(1266)
  CDS (201)..(305)
  CDS (637)..(851)
  CDS (898)..(1066)
  modified_base (178)..(178): a, t, c, g, unknown or other
gagggagcaaagttcagttttcagccaaagagtgtctttctctctcttgaaattctctcccgcaccctcttgtatccggtgtcgaaaacaactgccagaggttctttttcttggtccgaagaaaaaagactggccagactaaaaaggagggactttagggggaaagcagcttcctagncctgctgcggccagagggggtgatgtcaccgcttctgcaccgacgggcctgggggtggggcggccgagggggagccgcgccgcggctgcagctgccaagggagcgttccgagcccacgtcaggggaggtgtcgggataaatagggtcccgcaatggccgtggctggctgcgctccgagctgcggagtccgggactggagctgcccggcgggttcgcccccgaaggctgagagctgacgctgctcgtgccctgtgtgccagacggcggatccgcgaccggaccccgcgccccgctttgctgccgactggagtttgggggaagaaactctcctgcgccccagaggatttcttcctcggcgaagggacagcgaaagatgagggtggcaggaagagaagggcgctttctgtctgccggggtcgcagcgcgagagggcagtgccatgttcctctccatcctagtggcgctgtcctgtggctgcacctggcgctgggctgcggcggccctgcgaggcggtgcgcatccctatgtgccggcacatgccctggaacatcacgcggatgcccaaccacctgcaccacagcacgcaggagaacgccatcctggccatcgagcagtacgaggagctggtggacgtgaactgcagcgccgtgctcggcttcttcctctgtgccatgtacgcgcccatttgcaccctggagttcctgcacgaccctatctagccgtgcaagtcggtgtgccacgcgcgcgcacgactgcgagcccctcatgaagatgtactaccacagctggcccgaaagcctggcctgcgacgagctgcctgtctatgaccgtggcgtgtgcatctcgcctgaagccatcgtcacggacctcccggaggtgaggccgtaggaaggatggagggaggcgaggaggcgccggggctgtggctgccaatcgagaactgggcggccacacctaaggctgccaggggcgtctgaggcttgtaggaggtgggaaagaatgggggaaacattttcttcagaaaaagtctggtttctcccataggaattttaggagctagcggagagcactgcaccccataaagaaaa

SEQ ID NO: 1320 - protein, 162 aa, Homo sapiens
MSPLLHRRAWGWGGRGGAAPRLQLPRERSEPTSGEWRCPVAAPGAGLRRPCEAVRIPMCRHMPWNITRMPNHLHHSTQENAILAIEQYEELVDVNCSAVLGFFLCAIRASRCATRAHDCEPLMKMYYHSWPESLACDELPVYDRGVCISPEAIVTDLPEVRP

SEQ ID NO: 1321 - DNA, 32846 bp, Homo sapiens
  source
  (1)..(32846)
  CDS (201)..(316)
  CDS (3397)..(3842)
  CDS (3912)..(4015)
  CDS (10168)..(10673)
  CDS (14616)..(14753)
  CDS (20636)..(21405)
  CDS (22054)..(22181)
  CDS (22267)..(22617)
  CDS (24759)..(24933)
  CDS (25658)..(25761)
  CDS (26025)..(26141)
  CDS (26262)..(26745)
  CDS (29638)..(29760)
  CDS (29963)..(30082)
  CDS (31453)..(31581)
  CDS (31888)..(32113)
  CDS (32187)..(32646)
  modified_base (35)..(134): a, t, c, g, unknown or other
  modified_base (4055)..(4154): a, t, c, g, unknown or other
  modified_base (9937)..(10036): a, t, c, g, unknown or other
  modified_base (14510)..(14609): a, t, c, g, unknown or other
  modified_base (19198)..(19297): a, t, c, g, unknown or other
  modified_base (26392)..(26491): a, t, c, g, unknown or other
  modified_base (32259)..(32358): a, t, c, g, unknown or other
gagctgctgttccgcagccgcgagcgcctcttctnnnnnnnnnnnnnnnnnnnnnnnnnnnnnnnnnnnnnnnnnnnnnnnnnnnnnnnnnnnnnnnnnnnnnnnnnnnnnnnnnnnnnnnnnnnnnnnnnnnncggtgatctgcaagcggacctgtctcaagggccagtgtcgggacagttgtcagcagtggctccaacatgacgctcatcggagagaacggccacagcacagacacgctcacgggctccggcttccgcgtgggtgagggccgggggcacggctgggggcaggggaaggacaggcaccaggcccggtgggagagctagtggggtcttggccttagagactgggggctgagggtataaagggcagagatccgagggcctgggggaccaggggcctcagggaacttgggaggctggaactctgggggccagagttggagggctgcatggaggcctggactttgaagctttgcgttagggttggggcctaaggggtggggaaatgcagaggtcctggatgacactggcttcccagaaggtgctgagttctgagcaggagcacacagggtttttgaggaatgtgagccggggacaggaagcctcagagaagggctaaatattcccgcaagaagcagacttgctggaagaaacaagaaaagtctttacaaaatgtctaaagtagggcctgccagagtagacacctgcattccctgggaggaggagctaaggtcagggctggggatgggagccggctactggcaaggtctgagtagggagggtgttgaggcctaaaagtagggtgcaggcctgaaggtagggactagttcggggttctcagcctctccttttccaatgcctccccataagctcctaacatcctgcctcagaggccctcagggcccccctcatcctcccccaagcccctacaccctccccagttcagcttggagtccaccccctccccagcatctctctttaaagggccaggcctggggctcagtcatcctcctgctaggccccgtgggccaggctcggggaggtgtcccagcagtaattaccctcctggacagggtaattaggccaggcccaggatggcaccagcaaaacagcccctcttacacattcctatattcactctcccactcacagagctaaggaaccccactcatgtggctcaaatttgtcatgagatggggtgtgcgtgcgtgtgtctgtgcgcatattgcccctgtgtctggggtcatgccatgggcatggcgtggcacactgtgaagtacccgtctttgtgttgtcttgggtgtgtgtctctagtcgctgttagagagtatgtgggaatgtttttgtttttgtgtttttgagatggagttttgctcttgttacccaggctggagtgcaatggcgcaatctcagctcactgcaacctcccccttctgggttcaagtgattctcctgcctcagcctcccaagtagctgggattacaggcatgcgccaccacgcctggccaatttttttgtatttagtagagatggagtttcaccatgttggtcagcctggtctcaaactcctgatctcgagtgatctacctgcctcggcctcccaaagtgctgggattacaggtgtgagccactgcgcccggccaaatgtatgggaatgtttatgtgaacctgtgttggtgtcaggatgagtctctgtgtgtgtgtgacaagaggactgtgggtgtgagtgtacgtgtgtccatctcccaggctccctggccatcctgcccaggctgctgtctccatctgtgctgcccacatcccccaggctcggtgcccaggccacagtgggcgggtgtcattgggaggtcactctcaccgctatgagtgactcactggcagaaaggaaaaagagaatcctacctccccccgcccaggacacacccctctgctctgtgaggcctggccccaagaggccaggcaggatgggctgggctgggatgtgcttagcctgaccctgagggccatggatatgggctgtccctgtgaggcccttctggcatccaggagagcagcacccccgccctcctgccctcctgccctgggaagtgagggcagccatggggtgggcaggagaagggctggggctttgggatgagtcagagccccaaggctggtagtagcacaggttgaaggtgagtatgggacagaaacagacagaggtcccatcctctccctcagtcattctttcattcattcccccgaaccccctgtgggacccagagctgaggccagcctggccctgccttccagagcaccctctataaggaggcagacagacaagaacatagccaagcaggtgccaggcagagctggccagtgggtggtaaggcaggagagggagctcaggggggccggataggaggaaagcctccctcctggtggagacactgagctaggaaggatgagatctgcatatatagagaggggggggacctggggccctgttgtggagggaagggcatggatgaggccaggaggcaggaggcaggcacatttgcaagagggagatgggtcctggggtgtgcagtacacagggaaggagcagagggggatgggctgaaaaggttctggtccatggagtgagcttctgcctgaggcaggtttctctgggacactgagattgtggaccagcaggagaggctggaagccaaggaggggtctgggtggccaggcctgggccagggcaggagcagtggccctagggaggaggggaggcaggttcatgggacattagaggctgtaactgggcaggggagagcaggagggacggagccgtcggggctcagctgtggatgcctggtggccaggtgaagaggaggtggggaggcaggatgctgacttctgacagtatgtcctgggcagaggtgcctgagagagccctggaaaggctgggggctgtgtctgtgtcttgagatgtggacatctttggcagtggtgaggtgggcgccccaggatggtgaagagggagagggtggagagcaggcagagaggactgaggcctgaaggagggaagggtttatgggagaagaggaggaggcgccagggacggagccaatacctttggaaggctcaaggggaaagccagatcaccataattatttgctaccacttattaagcaccctttgtgtaccaggccctggggtaagcatttgtacagcccttacctcatctaacccacacatctctacagatgaggacgctggggcacagggaggggacgtgagttgctcagggtcgcacagctggcacatggcttagcgaggatttaaatcctggacttgagactccagaacccaacataggtgtaaggatgttggggaacctagagagggcagtttccctatgtaggatgtatctcaaaacctggcttcccaagaggacagagccagtgggtggcaaggaagtagggaggaggggaaagagacaggatgtgggtgagggcctgaccccactcttctccccagtggtgtgccctctcccctgcatgaatggcggccagtgctcctcgcgaaaccagtgcctgtgtcccccggacttcactgggcgcttctgccaggtgcccgcaggaggagccggtgggggtaccggcggctcaggccccggcctgagcaggacaggggccctgtccacaggggcgctgccgccactggctccggagggcgactctgtggccagcaagcacgccatctacgccgtccaggtgatcgctgaccctcctgggcccggggaggggcctcctgcccagcacgcagccttcctggtgcccctaggcccgggacagatctcagcagaaggtaccaggcaactggcaaacccgggaaggtcgccagtgggtgggcactagggtggccagggcagggcaggttcagccctggaggagctcagcgcggtgacccgcggcgcggtgcgggcagccctgaggccaccgcgcccgcccccagtgcaggccccgccccccgtggtgaatgtgcgcgtccatcacccgcccgaggcctcagtccaggtgnnnnnnnnnnnnnnnnnnnnnnnnnnnnnnnnnnnnnnnnnnnnnnnnnnnnnnnnnnnnnnnnnnnnnnnnnnnnnnnnnnnnnnnnnnnnnnnnnnnntttttttttttttttttttttttggttttcactgcaatgtgaatcaccttgacatttctgtgaaacaggaagtggctggatgatacaacaataaaaataatcacactcaacttggtgtgtgtgttttctttgggccaggcactgtgttaagagctctttatgaagtatttcgcttattccttaggacaacactggcagctaggtcttatcatcattcccaatttgcaaatgaggaggctgaggcctggagtagtgagagatgtatccccagtcacccagttgggagtggcagggctggggctcccggctggcagccagtgtacctcttgagcctgagctcttaccagtagatttctcccgtgctcaaaaggcggggaagagtggcagggcagaagggccccctgatttatcaagcgtgaaggtagtttcatctcatttccaatcccaactctcagtgtccatcgttttactacccacagtaagtggcacattagaggggtttaatagccactttcagtaaagtgtctttggagagaaatgctttagggcaaccttgtcccctccaggccttcatcacttccatccctcatctttaaagctgatgagcaaggccgggcgcagtggttcatgcctgtaatcccacactttgggaggccgaggcgggcagatcacctgaggccaggagttcgagatcagcctgaccaacatggtgaaacctcatctctactaaaaatacaaaaatcagttgggagtggtggtggtggctgcctgtaatcccagctactcaggaagccgtgacacaagaatcgattgaacccaggaagtggaggctgcagtgagctgagattgtgccactgcactccagcctggcaacagagtgagactctgtctcaaaaaaaaaataaaactgatgagtgtgacccccttcccttctacccacccaccccctcgccaagagccatttctttcttcagagcccagaagcttcccaaagacattcagaactcagagggacaacacatggaggcggcacagcctctgacacacagtcagccctcgtggcacggtggctctccaccagcagcccgtctctcaccaccctgcccatcttggcttgcagatccagacaatgatgaaaaggtctcacatatcctgagtgcttactatttggcaggcatctgctaagggcttcataaatatcagcccactgattccctgcttatttttatttttatttttatttttgagacagagtctcattctgtcgcccaggctggagtgcagtggcacgatctcggttcactgcaacctctacctcctgagtagctgggattacaggcgtgtaccaccacatccagccaatttttgtatttttggcagatggagtttcaccatgttggccaggctagtctcgaactcctgacctcaagtgatccacccacctcggcctcccaaagtgctgggattacaggtgtgagctaccacacccggacttccctgttaatttttttttttttttttggtgggggggaacggggtcttgctctgttgccaggctggagtgcagtggcgcaatctcggctcactgcaacctctgcttcctgggttcaagcaattctcctgcctcagcctcctgaggactaagacgcgcaccaccacgtctggctaatttttgcatttttagtagaaatggggtttcaccatgttggccaggatggtctcaatctcctgaccttgtgatccatccacctcggcctcccaaagtgctgaggaattatcacacccgtgggcccctgcaacctggcccagttttcccttttcacagggaaaattccccggccggggaaaaaaaaaaaaaaaaaaagagcatggtggcgcacacctgtaatcctggcactttgggaggccaaggctggaagatcacttgagcccaggaggtcaaggctgtagtgagccatgatcctgccactgactccagcctaggtcacaaggtgagaccctgtctcaaaaaacaaactaaacaaataaaaagaaagaaaggaacccaaatatttcttgagcacctactatgtgccaggcactgttgaggtgctagggatattgcatgaacaaaaacagacaaaaatttcctgtcctcgcagagcagacaggcaacaagccgatcaataagcagaatctcctatgtcttataaatgctatgaaaaactaaatcagggccaggcgtggtggctcacacctgtaatcccagcactttgggaggccaagtcgggcggatcacaaggtcaggagatcaagaccatcctgattaacatggtgaaaccccatgtctactaaaaatacacaaaaaaattagccgggtgtggtggtgggcgcctgtagtcccagctactcaggaggctgaggcaggagaatggcgtgaacccgggaggtggagcttgcagtgagccgagatcgcgccactgcactccagcctgggcgacagagcgagactccgtctcaatctcaaaaaataaaaaataaaaataaaaataaaaaaatcagagtagaaggaaggagttctgagggttgtgataataagtagggtggcaatgatagaaggctttctgaacagattttgaaagatggttatgggctgggaacagtggttcatgcctgtaatcccagcactttggaaggccgacacgggcgcatcacgaggtcaagagatcgagaccaccctggccaacatggtgaaaccccgtctctactaaaaaaaaaaaaattagctggacgtggtggcgcatgcctgtaatcccagctactcgggaggctgaggcaggagaatcgcttgaacccgggaggcggaggctgcggtgagccgagattgcgccactgcactcccgcctggcgacagagcaagactccgtctcaaaaaaaacaaaaaacaaaaaacaaaaaaaaactgggaaacctgctagacaaattctaaaagacctgtaacactaataagtatttgttgaatgaatgaaatccctcagaatgggctaaccaccatgctacctggatcgtttagggcagtgggatctctggtgctcaccaggcttccccagtgcccagccctggatacacgctagcctattagcgctagggaatgcctgggggcgggagggaggagagaaaactaaagtgggggcgtggcctaggcaggggtggctttgctgggcgggccttacctgtgacctgagtgggagcgatctctacggcgctgcgggaaggaggcaagtccggcaggaaccagcgcatggtcgggggcgagggacgggagatcagctctgcgggcggcagtgcactctggtcagagacgatattgactgaagcctccctttccacttcagtcttggcccggcgccccaccccagcttgactgtccccgagtacttaaactgtgaactccccgcccacccagtgatttagcccttgaggactcatccctacagtgcccagctcaccggggtagggccgggcaggagtcgtggtggcagttgggtggctctgctgcactgacctctcctcactcaccggctgcgggtgacagcagcatgagccctcctgtccctcgcctgcccacccctcccatctgggttctcatactcactgagtccgtggtcacccctaaaagggaagaagatggggccatgaagtgttggggcgggagaagggagtcagatctgggatcagcagctgagtatttgcagttagggtctctgggagttcaacaatcatgtctccaggtcaagggtcaggggttagattctggggttagggtgtgtttgcatagtagtcacatgatcaggttgaatggccttgggttacaggtcaggctgtagaaggcttaggaggttatagctcagggtcaaatatctgggtcaggggtcagagggtcaggtgggaggtcagtggatgggtcagggataaggaattgggggttagactgtgaggtcagatctgtggatcacgggtcaaggggtcaggcctaggggcttggcatgggtcagggatcagaaggggtcaggctagacctctctcttcctctgtgtcctcaggtggtggagcctggctagggctctccggaagctgctggggcttgggtggcccgtcagggtgcaggaaaagggaaaagtcactctcgccctgaatggtgagcgtctggtgggaggtgagaatgtggtatcccttcccagctgggcagatctccttgaacgcagctgcagtcaagacagcagacacaaaagtgagcatttcctggacaggtgcatggacctatgaacccctatccccgggtaaccctgactcaccggtgccatctgttgggcagcgctgacaccgcgcgccccaggccttgccgacactgcagcagcagagctggcgggtcaggcgggtggtcagtgggtgctggcactggtgctcagggctcaccaggcggaaacacaggctcttctcctccggtttgtctgctgcaggggccagtggggggcatgggcatctgagcctgcacattgcccacgtccctctgcccagctgctgcagaccttgcctctccggcccagacaacccttgatcccccatgtggtctctgaccccatatgaccctgaactcatgtgacccctgaaacttatgtgaccactgaccccattgactcccgattctagctatcctggacttcaccactcctactcatcaagcctatgttctgcatgactctgactctatgtaatccctgaccccatgtgactgctaatggcagatctcatgtgaccccggaccctgctgatccctgatcctattggctctgggccttgttcctcctgcagtcaacccttaaccccactctgatctcttgcgatctctgatccttgctcccacccatgccttgtgacctcccaggaacctgagccccaggtctcaccaatgcactgtgtacgggaggggcctaaactatggccaggtgggcagacacagcgataggagccagggttgttgaggcagtcaccatggcgacacacgcccggcattgcgcactcgttgatgtctgtggtaagtggaagtttggcccctctggtctggggccatggggtgacagcaggctgctccaagaacctcagggtcttgccccagccccacctcctctctcgcccaccttgggaccctccccacccccagtgatggctggcctgcccctccagcccacagaatctcctagctggccatacctggcagtgggtgctgttaagcctcttgtagccctggggacagtcagcgcccacttccccacgtacaggccctggcttctgcactcctgtgtctgcagagagaggatagcttggcaggggagggtgaggagggaactggggaggggcacagcagatgtagagaggaatctggtgacctggggactcccactgcagggatgggtggggtgggtggggaggggccaccagatagggaacgccccctgagcccaagcactcacactgcagctggggacacttgtggcacttgctctggccccaggcagtgccgatgctaccgcagcagtcttcctgcttggtgaggccggggagggggttgctgccacactaggggaaggagggggaggtggggtcacagagcaccccgccccggtgccgcctgttagggttgggccttttcctcttcccccgcccctcagttttctgctatccgagtgagttggggcagagcaaccctgagagaaggaaaggcagatcccgactgtgattcactnnnnnnnnnnnnnnnnnnnnnnnnnnnnnnnnnnnnnnnnnnnnnnnnnnnnnnnnnnnnnnnnnnnnnnnnnnnnnnnnnnnnnnnnnnnnnnnnnnnncgattactcactttgtttttaggggatttcagggccccctcccgccgatcggcggagtttggtgatgtcactctgggccgggtctggagcaaagccagggctactgggctgcggccgcccgccccgcgcagggaaaagcccgaccgggccttctgctccgcagaggccgggtggttgaactccgcgcgggtttcctaaccgctaaaggtgcctttcggtggtggctgtctcagaagcacgttaaaatgtcctacccaccccaatctagatgcggctgtgggggaatgggagcggccggacctcccagcctgacagtgcatcaagagctttgcggagcctacagcccggatgggacgactgaggccctcccgctggcgagctggccgagggctcgtccctctccagctaaagcgccagcttacgatacagccaaactgccggctctcatcggctgtgggagcaggaggcccccaggggtaaatcccggagcctcgtctctgaagcctggcgcttgtgtctcagaaggtgcgggacccacagggacacttgaatcagcaggctcacgaccccccacccccctgcccccgcctgtgtttgccctggacctccagctagggctgaccactaattctgtcatgtgaccccacagtgcaggtagctcccccaagaccaagcccaaggcgcgtccgtgtggaggctggggctgacgcacccccaccccaggcctcatccccaaaggaggatgctccactgcagggggcggagtcttctccagatggagaaagacttttttattttctctgaattcgtcttaaattaggaaatcatgtgggaattggaaaagattggaaattctgacttgtttcccaggctctgaagaaacaggaagagaaaagtgaaaatagagttagcaccccgcccactcatttcagtttctccagtggctggccctgattagaaaagtgtttacttttggcagggggcgggggaggccgacttcaggtgacagaatggattaattaaaatctttggttaatgatatacaattatcattgaaccttgcatggatcctcttcttaaaattcatgtatatttataacttttaaattaatacgataaacacccatgtacccattgcaaaactcaaggggccaccaccatccagaattctgtattgtattgtattgtattgtattgtattgtattgtattgtattgtatttatttatttatttattttttgagacacggtctgtctctgtcgcccaggctggagtgcagtggcacaatctctgctcactgcagcctctacctcctgggctcaagcaatcctcccacttcagcctcttgcatagctgggactacgggagcacaccaccatgcccggctaagtttttgtattttttgtaaagaagtggtttaaccttgttgtccaggctagtcttgaactcctgagctcaactttcctccccgcttggcctcacaaagtgctgggattacaggcgtgagccaccacgctgggccagaattctgtattttttaaattaattaattaattaatttattgtaaatagagatgggtctcactgtgttgcccaggctggtctcaaactcctgggctcaagcgatcctcccacctcagcctcccaaagtgggattacaggcatgagccaccacacctggcccagaattctgtattttaaatgaaaaaaaaagttatatctgcatgcctacacaatatatcttttggttttccttagttttgaacttttttttttttttttttgagacaaagtctcactctgtcgcgcaggctggaatgcagtggcattctgcttactgcaacctctgcctcctaggttcaagcgattctcctgcctcagcctcctgagtagctgggattaaaggggccaaccaccacgcccagctaatttttgtatttttttagtagagacggggtttcaccatgttggccaggctggtctcgaactcctgacctcaggtgattcgccagcctctgcctcccaaagtgctgagattacaggtgtgagccaccgcacccagccagttttgaacttttatgaagagggcatcatatgatttgttgtcctttgttacttgcttttttcactcaacctgttactatgattcatgtttcacagttaattcactttttcactgctgtatactattttgttgtgtaaatataccacagtttgtttattcatcctgaagataggcatttttatttttatttttttgagatggagttcctctcttgtggcccaggctggagtgcaatagcaccatctcggctcactgcaacctctgcctcccaggttcaagtgattctcctgccttagcctcctgagtagctaggattacaggtatgcatcaccatgcccggctaattttgtattttttttttcttttgagacagagtttcgctcttgttgtgtgcaatggcacaatctcggctcacagcaacctctgcctcccaggttcaagtgattctcctgcctcagccacctgagtagctgggattacaggtgcctgccaccatgcctggctaactttttgtatttttagtagagacggggtttcaccatgttggccaggctggtctcaaactcctgaccttaggtgatccacctgcctcagcctctgaaaatgttgggattacaggcatgaaccactgcatctgactaattttgtacttttagtagagacagggtttcaccatgttggccagggtggtctctaactcctgacctcaggtgatctgcccgtctcggcctcctaaagtgctattacaggcgtgagctaccgtgcccagccatgggcatttggacttctaattttttgctgccataagctttagagcactgagtaatatataaaaacagcaatcatgtagtttttaaaacttagtctggggttaaagaagtatgtaaacaactatgttttcttaaagatttataggagcattgtgactggaccaaggacaaagaagttcccaacctcctcagaccctcgctgctgcccagatgtctgccatggggtacttcttgaccacaccctccttctcttccctgcccttaacatagaaagagcctaagattgtactgacttaaaatggtactttagaacgctagtacaccgtcctctcagtcttgctggctttcagaataaatcagtaaacctactttttctcccaccaacgcccctatcagttgggatcctcttacctcggcctcccaggtagctgggactataagcactcaccaccacacacagctaattaaaaagaaaacaattttttgaggcagggtctcactctgtcgccatgctggaatgctgtggcatgactcgttgctcactgcagcctcaaactcctgggctcaagcaatcctcccaccttagcctcccaagtagctaggactaacagcgtgcaccaccacactcagctaatttcttttttttaatttttagtagacacaagatcttgctatgttgccaaggctggtctcgaacctctgagctcaggcgatccttctgtctcagcctcccaaagtgttaggattacaggcatgaactaccaaacccggctgagttttttaaaatcttaatgaatgcatggatttaaatatattagctgtgttttaatcaagtatagttattgaaattcaaattattcgtctttggttagggagaacttcttcaagttggttgttcttcagtccttttgacacaattccaatatatgagtcttggtggctcatacctgtaatcccagcactttggaaggctgaatggggaagactgattgaggccaggagtttaagaccagcctggtcaacatggcaagatccctatgtctattaaaaaaataattttaaaaaagcaattacagtagcctgtgatagcttctttgctgtttggtatgaaaagatatttcttttctttttccttttttttttttgagatggagtttcgctcttactgcccaggctggagtgcaatggtgcaatctcggctcactgcaacctctgcctcccgggtgcaagcaattctcctgcctcagcctcccaagtagctgggattatgggagtgtgccaccacgcccagctaatttttgtatttttagtagagatggggtttccatattggtcaggttggtctcgaactcctgacctcaggtgatccacctgccttggcctcccacagtgctgggattacaggcatgagccacagcgcctggcctgaaaagatatttctagactcatctagtaaattttctgccccagatctggaatcagacagctttccaaggagtcctgatttctcttagtaggaaatgatatttaaagactacagcttgagtacttcggatacttattgctactgagtcagtcattgtagatgttttcggtgaatagttagtactttttttttttttttttttttgggaaacnnnnnnnnnnnnnnnnnnnnnnnnnnnnnnnnnnnnnnnnnnnnnnnnnnnnnnnnnnnnnnnnnnnnnnnnnnnnnnnnnnnnnnnnnnnnnnnnnnnnttccagagggccctcacctgggaccgtctgggccggccgcggattcctccgggcggggcggggcggggaggcctgcgtagagcgagataccgaggctgagggagagaggtggccctgccgggtcacactgacgatggaggccgggtggagccggagcccaggccttccagctctttcccagcctcccttgcaaacgtgggggtctcagggccccaaagtaacttctcgttagtgctggtccaatcccctctgaggaaagggctaaagggtggggacagcctttggccagggctcacggaggtcccaggaggaagtctgtggggtccagaagaggagcagaaagaacaaagctagaacccagcttccctgccagccccctcggaatggcttcctggtgcccaccctgccacctcccccctttcctttcgtctggccgtgctggcggggctggctctgggcctcagacactctggaatcgccaaggtctgagctcagggcctggcccccttcccaggctaacagccgggaggacgggggcgctgtccgagggcccaggggctggagaggggcacagcagagccccagggcaggtgctggcagcggctgggggtgggggtcttcaggttggccatggctggagaggagcatagttccagaccaggcttgtccgctggtctggaaggaaaggctgcaacgtgcgggggcccaggccttactgtggggcctgccaggagaccccagggttccgtctctgactcacagaactcagcaggaggtggggacggctagggcacatccaggaaaagcgctgccaagtcagggcggcaccagaccctctcccggacagcacccggggcagcagtctaattggggagaggaggttcagggactcactttcaggcacacctgtccaaggaactctgtttttactttgagcgtaagttgatgtgggtagctttagggggacgcttagtaagtcccccttactaagcggtgcagggctgggagggacaatcacatgtccccagggatccctgctgccggaatccaggatggggtgtgaggggcaagcccctgcttcttggggccctggtccacacggaggcagggaataatgctaggtgccgaccacctgccaggcacagggctgagcattgtatactcattttttcctaacactcatctgaacctgtcctgactctgcctagagctggctgtggctcaccatggagcacagcacagtcaaacagtccagggttggattcttactgtctctaagccccagtttccttgcttgtgagatgggtatctattcactcaacatctatgttcaactactggtaataaaaaacaaaaaattaaaaaataaatgtaaaaaattcactcaacaaactgagactccaccacatcctaagctcttggccacaaatagaaccagtcctgccttcctggagctgctgtactaggagagctggatatgtgccagatcaattcacacagaactgtggctacaacagaggctggtaccgtgacagagaagggcagggaagcaggacaggagagggctgggacctgggagacaaagagagtcttccatcggaagctggaagatgagtaggagtgagtcacacctgtgggcatctgacctcaggggaggctgcagggggaggctatccagagaactgagggaaggccagtggaacaacagggtgtggtggagagggagagccgaaggtgtagtggtggtgggaggggccggccatggtgaggaatttgcttttattctcattgcagtgggactgtgtcagggcaagagcgggcactctgccttcatcccaggagagagatctcacttggccctgggagagatgtatttgggaggggagatgtaaagactgggtgaagtaggggtgctggagaggtaggtggcatgaatggcccccagattcctggcctgatctctggatgggcgaagaagaggggaggcagaggagctggaaacatggggcagggtccacagctctgttctggtcctgctgagtttgagatgcttgtgagtcatccaagtggaggtgcccgaacccgggagtctgcagctcagacaggatgtctggcctggagacagaggcttggggttatacagggggcatctacgacagcgggaaagggtgggcttactatggagagaagagagcccagggtgcccagggagatcactgttcccgggtcagggagaggaggcggagtcaggcagggagaggaggcggagtcaggcgaaagaccagaaagagcagctggagggagcagagaggaaaaccaggagtgtggtggggaagagccaggaggacggtgtggccctcggtgtctaaagctgctgccagtatgatggggggataacagcccttcttcaggggctgatgaggggactcagtgagaaggatcaatgaaagtgtccagcccagtaatgatgcccaactcaaatgatatccaaccaaattccttcagctctcagggcctccgcaggaaatagctgaaaccactggggctagcaacagagggacatcactccagtgcacattgctccactggcataaccagggagggtgcctgagaggtgtggcctgaagcagagcagcagcccctggccctctgcagtctgcagggagggcgctgggggaacaattatcaccctaatctcttcctagccacgggtctccagctgggccaaccgtgggctgaacccagaagaaagcctgtgggctgaggggcctgggggtacagcaggtggagcttagctttccagctcagcagggaggtcaggaatgcagaaggggtctgcagggcaagctgacaaagcccaacacacatggtctctttggcctgaacatcttttctaacctcatcactacatgtggcacctcatttgcctagaatctgccagcacactttttttttttttttttttttttgagacagggtctcactctgtgccagggctggagtgcagtgacatgatcttggctcactgcagcctcaacatcccttaagcagcctcgagggatcctcccacctaaaccccccctcccaccgccgcctcagtaggtggaaccataggtgcacaaccatgcttcgctaactttaggatttttggggtttttttggattcttttggagacaagctcttgctctgctggagtgcagtggtacgatctcggctccactctgcaaccttcatctcccgggttcaagcgattctcatacctcagcatccccaatcagctgggactacacgctcatgccaccacatctggctaaattcttttgtatttttagtgaagatggggtttcactatgttggccagactggactcaaactcctgacctcaagtgagccacctgccttggcctcccaaagtgctgggattacaggcgtgagctaccacgcccggctgccggcacacttttattcctccatgatgtacattctcctgtaagtccaaggagaccatgatcttcctgattacttcagatcattcctggcaataacaggtcttcccactgctactctgcatcatctggtccctcctcctcctggtgccggagtcacctttcaaaacctaattccaccatgactctcctccttaaaatacctccagtgatttcccttgctcacccgagcctgccaggtccactgttcctcagagtggctgagctcattcctctgtctggggatgctcttctgccaacttcatggtcctcatgtcagggttcctgcagatgcttttctctaaaacagccatcccttggccaggcgtggtggctcacgcctgtaatcccagcactttgggaggcctagatgggcagatcagttgaggtcaggagtttgagaccagcctggcgaacatggtgaaaacctatctctattaaaaatacaaaaattagctgggcttggtggcgggcgcctgtaatcccagctacttgggaggctgaggcaggagaatcacttgaacccgggaagcggaggctgcagtgagctgagatcacagcactgcactcctgcctcagtgatagagcaagactgtgtctcaaacataaataaaataaaaattaaaaaatttaaaaaaatgaaatagccatccctagccctctgggtcatatcacctgtgtttttccctggtattccacaaaatctgaagcattctttgtggatttgttgacttgcttattgtccagcttaccaccctctcagggagggacaaccttgtctccagatcccagaacaaggcttggcacagatagggtgccgaagtttgttgattgactgcacagagaggccacaagagtgcctgccatctaccatgcactttacactgtggggtcacgtcatcctcccagtgaccctgcaaagggaaaaccaagactctgaaagatgaaatgactagactcagctgggcgcggtggctcatgcatgtaattgcagcactttgggaggccgaggcaggcgaatcacgaggtcagaagatagagactatcctggctaatacggtgaaaccccatctctactaaaaaaaaaaaaaaaaaaaaaaaannnnnnnnnnnnnnnnnnnnnnnnnnnnnnnnnnnnnnnnnnnnnnnnnnnnnnnnnnnnnnnnnnnnnnnnnnnnnnnnnnnnnnnnnnnnnnnnnnnntgggctggggagccgactcttgcttggttctggaggccccagacgaagggtgtgtggagcccctcctccacccccctccggcccagccccgcatgatgttgctggatgctgcatgaagacccaccattagatgcctgtacccccagtggaggttccccagctccctgtcctcactgcctactccatccagggcttgcctgggtgtggcttccctcaagttctcacaccaccatttgcacctgcctctggcgtcacgtttccgcacttagcaggtccctggggctttgggtgtctcaatcttgcatcctgtgagaccttgaacctcagcccaacacccaccccccaaaacctacgcacacagacagcagtgggcaggtgcagccctgcttagggcctggagatgggcagacccaggctcacatcctagctctgacacggaattgcttcaggcaagagcatctcctctggacctcatctgaccatctgtcacatggggttcagacctccctgtctgcatcagtgagaccaggtaggcagaggtccctatgggtccctgtcattgtgactcctcttgcccccaagcctgggcacagtagcctgcaagaaggtgagttggcctgtccttcagggcagggtgactggggtcccatgacagctgctgtgaccccagcaccttcctcaggatgtgggggcctggcagagggctgggcccacagttggggctacttcctgtgctgaaggaagtcctcttgccattcctgctgccctgccgctgcctccctgggaacccatgtgtccttgtggtattgaggccttgaggtccagggcactgagatcagacctctctgggtgatcagctctccagggaccctgaaggaagtgggaggggcaaggaggaaggtctctggggacaggacgtcctccctttgttaagtgggcaggacccagacaccagtggcccctgggtttcccgtcccagccaatacaagtcatctgtccggttgggctaggtcctggtgggacccttactctgggcccaggccaaagctaaggtgtgtgggtggcgactgggggaccctggcagtcccagggctgcccaggctccaggaccctcaggaccaagacccaacagcccagcctctagccttgcccagctaagctggggagggggctggaaactttagccctaggcagacaaggaagtggcctggaaagcggaagcagctttgatggtctcggagggggccggaagccaacacgggtggtggaggaccaggctgggggcctgggttcctgttttctgcccaggcccctctgagcagccccctcctccttcagggcaggaactgctgccacaacctcaggctgggcaccaaacacccgtgcccgccaatgcggcccagcccccggagagtcaggcccacagagcatgcccatgtgggccggcggtgtggggagccctcggcggggcatggcccctgcgtccacagatgacctctttgcccgcaagctgcgccagccagcaaggcccccgctgacaccgcacaccttcgagccgaggccagtccggggcccactcctgcgcagcggcagcgatgcaggcgaggccaggccccccacgccagccagcccccgtgcccgtgcccacagccacgaagaggccagccgacctgcagccacttccacccggctcttcactgacccgctggcactgctggggctgccagcagaggaaccagagcctgccttcccaccagtgcttgagcctcgatggtttgcccactatgacgtgcaaagcctgctctttgattgggctccgaggtctcaggggatggggagccactcagaggccagctctgggaccctggcttcagccgaggaccaggctgccagctcggacctgctgcatggggcacctggctttgtgtgtgagctcgggggtgagggtgagctaggcctgggtggaccagcatccccacctgtgccccctgcactgcccaacgcggccgtgtccatcctggaggagccacagaaccgaacctcggcctacagcctggagcacgcagacctgggtgctggctactaccgcaaatacttctatggcaaaggtgaggaaaggcagttccagggagtggaggaggggggctgaagaagaggtccctgtcacctgcagtgcacacagtagggctcatgaactgtccatttcctgtaaagtccctggccctgggagggctcaagagctgagctggggtcctcctggacctactttcaaccaccttcttaaggctaatccctggctcctcacccccagccagggctggtccctctgcctccgtattggttcatcctccatctggttcaacctgccaggctggggagagattccctatgggcttttctgtggggtgaaaactcaggcctcaaatccctgcatccgtgaaccttgttcgcaccagcactgcggagagagggctccaggacatagaagggagaatgagggcgtggtgggtggagccaaggcaggatttaggcctgggagctggccgcgtgggtctaggtctgggtctgggtccacctctgggtcaggttgagatcaagatattgagctcggggctacagaggggcgggacttagtctagggtcaacatttggtggtgagatgaagcctagggcggggcttagtgatgcgcgtggtcgagcgggggcggggctgccagagggcgggaccaatcgttttcttcggcgcggtcccccagaacatcagaacttcttcgggatggacgagtcgctgggcccggtggcagtgagcctgcggcgggaggagaaggagggcagcggagggggcaccctgcacagctaccgcgtcatcgtgcggaccacgcaggtgggccgggatcgcgggatcaggacgtgggttgcctccccgacaccttgtatgcatcctgagtgcccttacaccccttcctcagctccggacactccgtggcaccatctcggaggacgcgctgccgccggggcccccacggggtctgtccccaaggaaacttctggagcacgtggcgccgcagctgagccccagctgcctgcgcctgggctcagcttcacccaaggtaccacggacgctgctcacactggatgagcaagtggtgagtggcgggccgcggagcccccagccatacagctggccccagtctgaacccagcctgcccagctcccaaacccctagccttgaccctgatcctgggctgggtggtgaccccagaagagctggcttttcagagacagggcatcagagttcatctggagccttgcgtctcaaagtgagctctgtagaccagcagtatccacatcatgtagaaatgcagattctggggccccaccccagaccatctgaatcagagtttgcactttatttatttatttatttatttatttattttgagatggagtctcgctctgtcacccaggctggagtgcaatggtggaatctcagctcactgcaacctctgccttccgggttcaagagattctcctgcctcagcctcctgagtagctgggattacaggtgcatgccaccacgcccagctaatttttgtatttgtagtagagatgggggttttaccatgttggccacgctggttttgaactcctgaccttgtgatctgcccacctcggcctcccaaagtgctgggattacaggcatgagccactgcccttggcccagagtctgcattttaaaaagatatttgcagccctagatgccctggtctgactcaccccactggtcctgcagttcccgcatcattcctggccaatttcccccacagcccctgctgggtttcctctaacatgtggtgctcacagcttcctggagcggctccttccatcccccactccatgctgaaagctgcccattggctgagtcttctcctctgtatcattcaacccatcagtcattcaacaaacatttcttagacctttttggtgccaggcctcagactggatgctggggacaggtctagaccaggtgctttgcttgagtagctcacagctgggtgggagaaagagacccacagagaactgctgaaacacaggagcagtactggaacactgaaagggaatgttgagggctgcctgggccacgacggtagtgatgagagcccttccttggccagggttttccagcatggagaacacaaaagggctcaggcccggataagcaggtgttttctggtcagaaggaataacttgtgcaaaggcttggagaatgagagcatggcacattaggcagtcagttcagcgtggctggggttgggattgtggggaggggcgggggagaagcttgcatttgttcccgtggacactggggagccatggagggatacggtgcagatctgagaggggcagctctctggctgcagcatggggactagactgtacggggcggggatgccaggctgaaggctattgcagttgcccaggctagacacagtggcagcgatagtggaggtgaagaggaggtgacagtccaggaaggactgggtagtcatgtggctgactggaaggggtgaagtgctaggatttcccagcttcttggcccccaggagtggtggtttaaggaggaggagcagggtgggggagtcacagcaaggtgagacattaggcagccggagaaaaaggcccggggtttggtaggccggtctgaatgggaggcggagatgggggtgtcatccttgctgcagccagggagggggaggagcatgggtggagaagaggcccaggcagaagagggcggggttcctggggccctaggcaaggtgagtttccagctatccccagtgccacctatggctgagagggtaccaggatgaggccacatctggggaccatatggggagtggggggtgcagggggttgggaggaatgaaatcgaagtggggactgtaagtgcagacaagtttagttgtagaaaagggaggtgaccgctggaggggagcctgtgctgtttggaggagttcagagcaccttgagctgggcatggttatccagttatccgcagagggaagagccgggaagagggcacagaaatgggagcatggggggcagaggtggtgcctggcctgcaggggctggggtgggggtgccttggattcaggggtgcagaggacagtccagccttgagataaggaggatgataatgtgtatgtttattggaagggtcctttctgtgaatcaccttctctactgccacatgggaaccagcctcctcccatcccttcctacctgtgcactcccaagcacgaggagcacaacagactgtactcacctgacaggcaagggcacaagtggctcagagagggctggtgctcagccccaggccagcgtcccatccattccctaagagctggtggggtggggctgcaggggactgagacctatgccttctgtctcccacccacagctgagcttccaacgcaaggtgggcatcctgtactgccgggcgggccagggctcggaggaggagatgtacaacaaccaggaggcgggaccggccttcatgcagtttctcaccttgctgggcgatgtggtgcggctcaaaggctttgagagttaccgggcccagctagacaccaaaagtgaggcccaggggcaggaggggtgggagcagatctgtgctgaaggggtgagcacaaattgccttgtcactcctttgtccgtacaatcctggggctggggactggagagttctttgggtgagctaaggatctgagtcagggctatgagggccaagctatgggctgaaaagaggggctgggactgtccctcaaggcccaagtaccctactgcctgagctggggctaaagtggtttgggggcactacccctccaccaaacacattccagcagctcagcctcgtggaagagaggtgcccctacctccctggtggaaggggccccaggacccctgggaggtgttgtactgagcaccccctgcctgcttttcactttcccagcatgccacacatgcttgggcctggagtgacacctgtcctcctaggacacctgaccctgccctccctctgagaccacttctcatttctgtcttcattctatttcaactctcccatcctgaccccccttcactctggcatggggctggagcctgtggagggagaggaggaggggcacccagggctgaggcccttgaatctcgctggctgggcattggctggtggcatgactggttgtccacctgctgtttggggcacagaggctcctgtgtacaggcaggaatggcaagttcaagccacttagattccccttgttttctccttctgtgtccctaacttcctggccacagcggattccacaggcacgcactccctctacaccacataccaggaccacgagatcatgttccacgtgtccacgatgctgccttacacccctaataaccagcagcaggtgtgagggggaccaacgtgggggtggggcttccgggaaccatggagggccctgcatggcccatgacgtttgagctttggccggagctctgttggccccaacagcccgcccctctggtggccccttcccaaagacagaaacaccctaggtcttcaccaggggcagtgggggagccattggtgccttggctttctcctgcctgaatgaggaggggtttggggcacagaagacctcatcacgagcccctactatccaacccctagctcctccggaagcgccacattggcaacgacattgtgaccatcgtgttccaggagcctggcagcaagcccttctgccccaccaccatccgctcgcacttccagcacgtgttcctagtggtgcgggcacacacaccctgcacgccacacaccacctacaggtgggcaccggagtggtcccaggtctcccgtgggcattggagtcctggcgcccctcactaacgccctccctccccgcagggtggccgtgagccgcacccaggacacccctgccttcgggccagcttctgcctgctggcggaggccccttcgcagccaacgccgacttcctgggccttcctgctggccaaagcgctgaatggtgagcaggnnnnnnnnnnnnnnnnnnnnnnnnnnnnnnnnnnnnnnnnnnnnnnnnnnnnnnnnnnnnnnnnnnnnnnnnnnnnnnnnnnnnnnnnnnnnnnnnnnnnggggcggggccttccgggagtagaggctgccctctcaaccccgcgttccagggaagagacccacacccccgcgaggtgcgcggtccgccttccggtggggcagagtccgaggctaggtctttccgccgcagacgtgaacgagtgcgccgagggcagcccctgctcgcctggctggtgcgagaacctcccgggctccttccgctgcacctgtgcccagggctacgcgcccgcgcccgacggccgcagttgcttgggtgagcgccagcacccccgccccgggcctccgccgccccctacgcgctgaagccggggagcgggtcacgctgtctgtaaacagtgggtggaaggtggctcattcatccccaggtgactctgctcactcattttctcaacgaactttgccaaggaaggcaccactagaatttccacgtaggaagggtctcggggtagagctcgaagctgcgtttgcaaagcatgttacttaaatttgaaggaaaaaagatatcaaagaatgagggcagacgatagtactcccccctgcactcctgtttattatacgccaagaggcggggctgggggctgggactcattgaaaactggagaaggaaagacagactgtagcatgcagtgctgggcctggatggagctgggctgcttcctggagacacagcgggatgggaggaaggaggcctgggtcatcttaaagaatcactaggaattgggcaagaaaggaggagaggaacagcatggcaggcacaggggttggcactggcagatcagaggtgagacagagggtggggtgttggggaactgtaaggaatgatcaggctatgggggctgaggctggccggggagggacaggtccccatcccttggagggccccctaagtcctgcctgggaggttgtgcttcacccagaaggtgttagagggcacctgcagcattttaagtgtaagagtgacaagatttgccatttgttttagaacgttccctgctgctgattgtggagggaggtctgttgcagagacttagggcggagacagtggtggacaggatgagtggtgggctcaggatggccatgagacgatgatattggagaaatattagacctcctgggttttttaactggatgtcaagtgaaagcgagggtgataacgacccctccccgtttccagtttgggtgagtgagggggtagtgctgctcactgggaatgggtcctcatgcgtgggcatgtttgggagggaaaatgctgagctccacattggacaaattgaatggattgtgcctgtgagcctctcagcaggagatgccagcatacccacctggaatgatggaccatggaccgggggagctatggagtcttgggtgggcctgcttagccaacccaaggtgggttgggtaagcagagcatctagcagagccttgtggacactgacagttcaggggcaggctgcggaaggcgttggaggagatggtgggggagggatggcaggggcgcctgaggggcaccatctgggaagctggggaggacatatttccagggaaggaggaggatgagccaagtgcagtagagaggttcttgtaaaataataactggtgagacaataagtcttaggacaagacttaggggtctgccccctaatcctacatggaaatcctagtgatgccttccttggcaagaaggtccctggtagccttggcagggtagcttttgggatatgatagggacagaggccagagatatgtgggcagaaagtgaagaagaacaagacctggggactcttgctcttccaaagtggggctttggtataggctgaggaggtgatgccaggagagtggaccaggagacgagggcagcagggtcaggagaggagggaggagagccagcggaagggacatctcttgctgtaacaggagcaggaggggaatggatgtagataacgatgttcagtgggttaagggggattacctttaattctctcaatacacagtgaagggcctgggttgagtaggggactcaggagaacagtggcggtttggaagtatcccagggcatggggctgcctaggggctttatggaagtcaaagctttagaggagtcagagagggaggtgccagccacacgaggctctgttggactgaggctgaagcctgtgggtatgttccagcatgctcagcttggtggctgctccagtcccactccgcacccaggatccacaggccacagctctgaccagagactgggcattgccagacagtgaggaggaaggagaggtgtttatggatcagggacgggagtcctagggatgataagccctgggctccagctgggaactatcagagtctgggggtgtcaggcaagctcggaggactgagagggaggccaccaagccctgtgagagagaaggtggaggtgaggacttgagaacagtggaaagaaggcagcctctgagggccccagggtggagcagatctgagtgatgaaaatccccttgggaccctgagagtgaggggaaggtcacggaagccgagagatccaggaatgtgaggtcagaggctgacctggttgtccacgcggatgttcgaaactcccaggatggagagaaaaacagagcaggaggaatgaggaaggtgggtgctgacagccacaggaggactgaggctgcaggaggccggcggcacctcagaggccgagctcaggcttggaggggtctgggatgtgggcaacaactggctccatcagagaggcctcaggaaagtgtgtcccgggggagggtcaagttcctttactgcatgagcagaagaaagtgggaagaacaaggatagggagtttatccccagaggaaaaagggagccatggcaggtgagggaagggtgggagcagcagtgaaagcggctggggcagggagagagggcgggggaggctggggaggctctttagcatcagacctggcctagggaccctggcagcacctgacctggtcgtcagggcactgtgtgccacccagaagcagggtgaggcctgtgcttctgagtgctgctggcctcagctctggtgctccaggccatgcgcagaagtgagaaaacagtagtagaaacccaagaccacccagcctggtcctctgacaccccctatgccctgcagatgtggacgagtgtgaggctggggacgtgtgtgacaatggcatctgcagcaacacgccaggatctttccagtgtcagtgcctctctggctaccatctgtccagggaccggagccactgcgagggtgagggatcttagagctggggtgctgacctgtccctccctaccccaggacccccaccccccagggtccagtcctaatccagatctcagttggggcataggggcgtgggactgacccagggctctgggagaaagctttggctgcctcaggctggggttggtgatcagcccctgagattctccaccccttccatcccctacagacattgatgagtgtgacttccctgcagcctgcattgggggtgactgcatcaataccaatggctcctacagatgtctttgcccccaggggcatcggctggtgggtggcaggaaatgccaaggtatgggggactggctgagggttcctgagggatgtggcagggagcagtaattccctagacacactgtggcctttctccatccatccatccacccatccaaccatccttcatccatccatccatccatctatccatccatccatccatccatccatccatccatccatccatccttctatccatccatccttccattcatccttccactcacccacccatccatctgctcagccttccagtctttcacctagaataacaatgatcacagtaaacatgacagttagtgctatcgtggtgcttactatgtgccaggcactctgttaagctctttacagatattaatgtattggtcttccccatcaactcacccatacacatgcattcatccaacaaaagtttaggctgagtgcagtggctcaggctgggggcggtggctcatgcctgtaatcccagcactttgggaggctgaggcgggcggatcatgaggttaggagttcaagaccagcctggccaatatggtgaaaccccatctctactaaaaatacaaaaattagccgggcgtgatggcgcacgcctgtagtcccagctactcgggaggctgaggcagaagaatcgtttgaagatgggaagcggaggttgcagtgagccgagatcacgcccctgtactccagacctgggcagagagtgagattccatctccaaaaaaaaaaaaaaaaagtttattgagcacctactattttccaggttctgtgctttgtactaggtaatcaacaatcacccagggctcccagctaggggaggccaacatgtaaactgattctgacagttcagggtcctgggtgccaagaaaggtatagactaatgattaattgcaatggggaggtgaatgttgaactggactgaaacgtaagtaggagttccctaggcatgggaaaggcaaggcacgagaagtcattccaggaccaaagagcagtaattgcaaagcatagagatctggaaggagctagttgtgtttacagaggaggggagggtgccctgagcacagagttggggagtggagggtggtctagagtaaggcgtgatgagacctaaaggtatcggaagctcaattgcatttgaggcctttccatttgggcttctgatacttttaggttttgtaaggttagtgggagccactgaaggtgttatgaaggacagcagctaatgtccacatgcacattcagacacatgcacagacacagcagacttcctgctgtacatactttgaaaccaaagtggaaattcaggttctgaacttgtgtgaggcccttgaggtgcagccccagggaaagaggggctgggtttccagctgcgctactcttgccccgcagacatagatgagtgcagccaggacccgagcctgtgccttccccatggggcctgcaagaaccttcagggctcctatgtgtgtgtctgcgatgagggcttcactcccacccaggaccagcacggttgtgagggtgagtgtcctcccagctcctccctcggactggacaactcccctgagctgcagctgggattcagagatgtgtcctggccccaccctcctaaatttggggaaccggaagaaatctcttttggctgggggagtctggtggggccagacgatgaagggtccagaacaccacgttgagaacagagccaactctcaggaggaggctaaggggagccagggaatgtggggggaaagacctgtggtgggtgggcagggtggacagggccaaggggggtctgtgcacaaccctgagctgccgtctgcccctcagaggtggagcagccccaccacaagaaggagtgctacctgaacttcgatgacacagtgttctgcgacagcgtattggccaccaacgtgacccagcaggagtgctgctgctctctgggggccggctggggcgaccactgcgaaatctacccctgcccagtctacagctcaggtcaggagccgggcaggccccttcccagatcttcagtttcttcatctggaagccaaatgtgggaaatggcgccccctggcagttgggaaataggcggcgggctgcagccctaagcccacgcgcgcgctcagtcctgcctcttccctccccacggccgccctgcccctgcagccgagttccacagcctctgcccagacggaaagnnnnnnnnnnnnnnnnnnnnnnnnnnnnnnnnnnnnnnnnnnnnnnnnnnnnnnnnnnnnnnnnnnnnnnnnnnnnnnnnnnnnnnnnnnnnnnnnnnnnctaacgctgaggaagccgacggctgagctgcgcagggaccccgaccggaggtccgcgacccgaggcccagagggaaaccagggagccaaggccctgcagcccaggctgcgcctccctcctcttggctttctcggtcccgcgacctcccgtgacccacgaagacctctcctggttcttctctcattcgtgaatgaccccatcatgctcatggctcagcagctccaagtcctcgtatccaacccagatctctctcccctgcgcaccagcccctggacatctccactctgacgtcctcgggcctctcaaactcatcctgttccaaatgacctcagccatccccagcctgcctctccttttccctgtcagccctggccctgccaccttccaagggctccagccggaaacctggccactaccgtagatgccgcctcttcccttagtaacttgcgtccagtccttccacgaggtcctggaaaatctgcccactt

SEQ ID NO: 1322 - protein, 1498 aa, Homo sapiens
  MOD_RES (1029)..(1062): Variable amino acid
  MOD_RES (1370)..(1403): Variable amino acid
MTLIGENGHSTDTLTGSGFRVGEGRGHGWGQGKDRHQARMYLKTWLPKRTEPVGGKEVGRRGKRQDVGEGLTPLFSPVVCPLPCMNGGQCSSRNQCLCPPDFTGRFCQVPAGGAGGGTGGSGPGLSRTGALSTGALPPLAPEGDSVASKHAIYAVQVIADPPGPGEGPPAQHAAFLVPLGPGQISAEGSALEELSAVTRGAVRAALRPPRPPPVQAPPPVVNGKARPGLLLRRGRVVELRAGFLTAKGAFRWWLSQKHVKMSYPPQSRCGCGGMGAAGPPSLTVHQELCGAYSPDGTTEALPLASWPRARPSPAKAPAYDTAKLPALIGCGSRRPPGVNPGASSLKPGACVSEGAGPTGTLESAGSRPPTPLPPPVFALDLQLGLTTNSVIGPSPGTVWAGRGFLRAGRGGEACVERDTEAEGERWPCRVTLTMEAGAGTAATTSGWAPNTRARQCGPAPGESGPQSMPMWAGGVGSPRRGMAPASTDDLFARKLRQPARPPLTPHTFEPRPVRGPLLRSGSDAGEARPPTPASPRARAHSHEEASRPAATSTRLFTDPLALLGLPAEEPEPAFPPVLEPRWFAHYDVQSLLFDWAPRSQGMGSHSEASSGTLASAEDQAASSDLLHGAPGFVCELGGEGELGLGGPASPPVPPALPNAAVSILEEPQNRTSAYSLEHADLGAGYYRKYFYGKEHQNFFGMDESLGPVAVSLRREEKEGSGGGTLHSYRVIVRTTQLRTLRGTISEDALPPGPPRGLSPRKLLEHVAPQLSPSCLRLGSASPKVPRTLLTLDEQVVSGGPRSPQPYSWPQSEPSLPSSQTPSLDPDPGLGGDPRRAGFSETGHQSSSGALRLKLSFQRKVGILYCRAGQGSEEEMYNNQEAGPAFMQFLTLLGDVVRLKGFESYRAQLDTKTDSTGTHSLYTTYQDHEIMFHVSTMLPYTPNNQQQLLRKRHIGNDIVTIVFQEPGSKPFCPTTIRSHFQHVFLVGGREPHPGHPCLRASFCLLAEAPSQPTPTSWAFLLAKALNGEQXXXXXXXXXXXXXXXXXXXXXXXXXXXXXXXXXXGRGLPGVEAALSTPRSREETHTPARCAVRLPVGQSPRLGLSAADVNECAEGSPCSPGWCENLPGSFRCTCAQGYAPAPDGRSCLDVDECEAGDVCDNGICSNTPGSFQCQCLSGYHLSRDRSHCEDIDECDFPAACIGGDCINTNGSYRCLCPQGHRLVGGRKCQDIDECSQDPSLCLPHGACKNLQGSYVCVCDEGFTPTQDQHGCEEVEQPHHKKECYLNFDDTVFCDSVLATNVTQQECCCSLGAGWGDHCEIYPCPVYSSGQEPGRPLPRSSVSSSGSQIPASSLPTAALPLQPSSTASAQTEXXXXXXXXXXXXXXXXXXXXXXXXXXXXXXXXXXLTLRKPTAELRRDPDRRSATRGPEGNQGAKALQPRLRLPPLGFLGPATSRDPRRPLLVLLSFVNDPIMLMAQQLQVLVSNPDLSPLRTSPWTSPL

SEQ ID NO: 1323 - DNA, 69770 bp, Homo sapiens
  source
  (1)..(69770)
  CDS (201)..(243)
  CDS (1391)..(1448)
  CDS (1832)..(1887)
  CDS (2409)..(2535)
  CDS (2659)..(2764)
  CDS (3019)..(3096)
  CDS (3204)..(3303)
  CDS (3393)..(3517)
  CDS (3667)..(3873)
  CDS (4576)..(5139)
  CDS (13091)..(13559)
  CDS (14259)..(14349)
  CDS (14460)..(14595)
  CDS (15296)..(15610)
  CDS (18261)..(18332)
  CDS (18554)..(19081)
  CDS (19113)..(19272)
  CDS (29841)..(30097)
  CDS (30219)..(30433)
  CDS (63500)..(63747)
  CDS (67833)..(67985)
  CDS (69521)..(69570)
  modified_base (10937)..(11036): a, t, c, g, unknown or other
  modified_base (30117)..(30216): a, t, c, g, unknown or other
  modified_base (39028)..(39127): a, t, c, g, unknown or other
  modified_base (54374)..(54473): a, t, c, g, unknown or other
acatcactggattgagaatttagtcaaaggtagtcaggactggagaccaggaaaccaggagggctataggccaggggagggctgatggtggcctgcaccaaggcagcagcagtgggattgagagaagtggacaggttggagaggtgttttggaggaggaatgaacagaactcagcacttgtatgagggtgggaagaaggaatggaggatgactccttgaattttggcttgagcagccagataggtagtgggtgtcatttctactgaaattgaggagtagggaagagaagcagatttggagcgggggtggggggagatagttcacttttggggttgtcaaggttgatggtaatggggaaatccagagtttggactggataaagccattgggagtcagtatctgggtggccagtgaagcccctgaaagactgtgacatgagaagagggggtcaggactagaacctgagaaatgcccttatgttagtagtaggcagagaaagatgttaccaaaaaaaggagacagagtaaccaaaaaggcaggaaaacctttgtgtcatgggaactttgggaagagagtattgttagaaggagggagcgatcagcagtcccacataccacaggagatcaagcaaaaccagaaccgaaaagaacccactagatttagaaacgaggaggctggtgaccttggggagcctggagaggttgggatccatggcccaggtggagagagaagcctttaagataaaggagaaggtaggatgcaggatgggaatgcaggaaaggaagagtttttttttggttttggtttggtttttttgagacaaagtcttgctccattgcccaggctggagtgcagtggcgcagtctcagctcactgcaagctctgcctcctgggttcaagcaattctcctacctcagcctcccgagtatctgggattacaggtgcgcaccaccgtgcctggctaatttttgtatttttagtagagacggggtttcaccatcttggccaggctggtcttgaacttctgacctcgtgatccatctgcctcggcctcccaaagtgctgggattacaggcatgacccaccatacccggcccagaccttgtctgttaaaaatgaaagaaaaaagtagagggcagagtggtgactacagcagtttggatgtcttgggtcaggaaaggaaggtgcacagaagaggcagggctctgagactggactcgggcagaggagctgctggggagcttgggtggaagaagctgctgttttctggtgtttcagcaggcccaggtgctggtgaggggccctcatttttgttcctgcagctggagccaacgatgctggcttcttggccctgtgttcagctcctgagccatgcttcttcttgttccagctgccagctccaaaactagctcaggcgatgcctcctcactcagcatcgaggagactaagtgagtactgtctcccttgtttctactttgtttttctaagagaggtggctctggggccagcacgggggaggctttctcacatgaaagtgtgctaatcagagttggaaagattgtttaaatcatcttagccaacagttgacttatagaagagaaaactaaaacctaagagtaaagtggcattcactggttagacgcagaccaggctggtgcccatgtttcctgctttggaggccagggcccttcccagtgtcctaggctgcctggggcagactttgtgtttgggaccactcactcccaccctgtttctcctcttgtctgtctggaaatgcacatggcaccctgtgtctttaatagcccctaacacttgtatctcttgttgtcagcaaactccgggcaaagttggggctgaaacccttggaggttaatgccatcaagaagggtgagtatggggctgaggatagggtttgggggaaagaggccatctgaaggggtctttgaagaaggtggggttagagggcaggttcagcactgtttagtggtcttacacatgcatatttgccggaaggcatgaggtccctccttgctggtataatggggatctggggctccgcctgctctctgagttggagctgtggccgtcgcatactcactctggctgtgagttgttagatggactggaagatgtgcacacttgctgcagactgcgctgtgcgggggtgggtttcttgtttttctttaaagcacgatttgaggggctttggaagccacagagggtcctgttgtgctgcatgggttggccaggagtgtggggacgaagtgggagcagggaggtgaaggattgttccttcctgtcctgaccccttctggccccctgagctggaagggggcagggtgagtggctccctcctctccccaccagccatgggcgggcatagcctcacgtctgggccccccttccagaggcgggcaccaaggaggagcccgtgacagctgatgtcatcaaccctatggccttgcgacagcgagaggagctgcgggagaagctggcggctgccaaggagaagcgcctgctgaaccaaaagctggggtgaggggtcctggccagggcaggcaagggaagggctggggaggccaccatccttggctgcctcttgagtggggtggggagcaggagctgggctccttgagcatcactttctcccctcttcaggaagataaagaccctaggagaggatgacccctggctggacgacactgcagcctggatcgagaggagccggcagctgcagaaggagaaggacctggcagagaagagggtgagcacctgggcagcatggggtggtcgcctagtgcttctggtggcctgacggcactgaggcgggggccaaccccagagaggtgagacggggcttggagaagggaagggccgtggtcggtagcatctactttggattctcagcagctttcctgcaaggcctgccctttttgcactccgcttggtagagccctgagtgttttctggtgatgctgagtggcctgaagtcctaggtcacccctccctgtcccgtaggccaagttactggaggagatggaccaagagtttggtgtcagcactctggtggaggaggagttcgggcagaggcggcaggtgaggctgcagcaggggtggtacaggggacactggtggccttgctaccggaatcccgaggttgggtgcgtggagggaggttcctgactcgccgattcttcccttaggacctgtacagtgcccgggacctgcagggcctcaccgtggagcatgccattgattccttccgagaaggggagacaatgattcttaccctcaaggacaaaggtaatgcgagctgggtgccctgggtgggggcacagcctctgctgagttgcggacaagtgtgaatggccactgctctgtgctgccctcaggcgtgctgcaggaggaggaggacgtgctggtgaacgtgaacctggtggataaggagcgggcagagaaaaatgtggagctgcggaagaagaagcctgactacctgccctatgccgaggacgagagcgtggacgacctggcgcaggcacggcctgggcaggctgggtggcgggggctgaggtggagaatgtcgggaatgggggctctgaggaggtggtggctcagtggcttttcaggagccagcctgggtcccaacctgtacctcttgccttgcagcaaaaacctcgctctatcctgtccaagtatgacgaagagcttgaaggggagcggccacattccttccgcttggagcagggcggcacggctgatggcctgcgggagcgggagctggaggagatccgggccaagctgcggctgcaggctcagtccctgagcacagtggggccccggctggcctccgaatacctcacgcctgaggagatggtgagccctcccgtgccttatactcggggtcaagattctccctccctctggggctcctgccctgcccgcaggcactgagaagacagggcgagtatttgtgttcacaaagcgcttggcctcgcgggtgagcactaaatggcaaccgggggaggcaccaggtgtggatgggtcagggctgctgagccagatgggccccagtctgtttcggctctgccatgctgccagctcgtgccttggataaaccatttaactgtgagcctggggcaccccatctggaatggcagtgacaggagccgcctcctgaggttgctgtgaggatgagtgacagcgtgggtgaggggtgactggagaggtgtgcgtggattctgtccacagggtgactgtgtgaacgtgaggtagacagctggcgcggtaggcgtcttcctcagtgggtaagagcaggactctggagccagactgcccagctctcccacctaggagctgggcaaccttggggaaggtacttaacctccctgtgccccagtttccctagctcaccagtggaattgagatagtaaccaccccacatgttgctcatgtgtgggaagcgctcaggacgctggctagcacagaggaacaccaaagaagtgttcaccctcgagggcttgtggcgacctgcctttctgtggcccccgctccatgtctcgcccctcttcccttaaggtgacctttaaaaagaccaagcggagggtgaagaaaatccgcaagaaggagaaggaggtagtagtgcgggcagatgacttgctgcctctcggggaccagactcaggatggggactttggttccaggtgggcttggacacggtggtggggcgagatggctgggctggggtggcctggggaccggtgctcaccagagaggcctccttccctcagactgcggggacggggtcgccgccgagtgtccgaagtggaggaggagaaggagcctgtgcctcagcccctgccgtcggacgacacccgagtggagaacatggacatcagtgatgagggtgagggcccggccagggggtgggaggggcagggacaggagccgcgggttggaggagatggtctgagcaggcatcccctgtgtttcccccagaggaaggtggagctccaccgcccggggtccccgcaggtgctggaggaggacgaggcggagctggagctgcagaagcagctggagaagggacgccggctgcgacagttacagcagctacagcagctgcgagacagtggcgagaaggtgaggctgggcatgggcagggtgactgcgtcagcagtcacctgtcctcacgagcacctgtgtcataggcgacagccacattcctgtctgaagcctcttttccatttgttttttgttttctgggtttgtttttttttttttttttgagacagagtttcgctctttcgcccaggctggaatgcagtggcgcagcctcagctcactgcaacctccgcctcccaggctcaagtgattcttattcctcagcctcctgagtagctgggattacaggcgcacgccaccagacccggctaatttttatatttttagtagagacggggtttcactatgttggccaggctggtctccaactcctgacctcatgatctgcctgcctctgcctccgaaaatgctaaaattacaggtgtgtgccaccgtgcccagccctctattctgtttaaagtcatgttttgcaaaaatttttagatgcctgctttagtaggggatcctttccttgcctctctcttctgtgcatgtttgttgaatgcctgctgtgagtagtgcattgttcttgggctgagaaggtcattggtgaacaggacagccatggggccctgggctcatggagctggctttctagagtgtgtgggggagagcgtggggagcagcagtgactgttaatgcaggaacggtaatttctgatggtggtgggagctgggcactcagtaaaccaagataacgtgccgggggttgggatcttagatgggagagtgcagggaagacctttccaaggtactagttcatctgagacttgagtcacacagaggagccagccttgcggggggttaggggtggcagcaggtggacaggctggcatttaggcagtagaccaaccagcaggtgtctcaggagaagtgaccttagagtgcctgagggccagggaggctggagcagagcagagagtgaggggtggcgtgagctgagatggagaggtagggggccaacgcagggggagccttgaccccatggtcgtcgctgccccagaggcacagtgggccgggcactgctcacatgttctgtgtttgttgattcattccatcctcccagcaacaccctatgaggaaggttctgtcatctccatcattccagaggccacacttttagccctaccccacacttctcacctaggaagaagccaagaaagcgtgtccaggagagggagcaagggagggaagcttctgatactactgggaggcaaagtggggacagttgcagtggattcaggacccggaggacaggggagttgaaaaagtgagggctgaacccgggacggaggccaggcttactgttgaagggctggagaggacgtatttgaggtttaagggcatatggtctctgttaggcaccttgaatgctgtgctgttatagggaaaacagccaagacagtctgtaagtgagtgggcgtggctgggttccagtaatactttatttctaagaacaggtgttgggacatagtttgcccggctaaaaaggaacagagaaatggagcaataggctgacagggctgttttatgactgaaatgaacataagggtttctagccccgtggatctcagcctgcctgcacattagactcacctaggaggttgtttttgttgttgttttaagaaacaaggtctcgctcggttgcccaggctggagtgcagtagtgcaatcatagttcactgcagccttgaactcctgggctcaagggatcctcctgcctcaggctctcaagtagctgagactacaggcgtgcgcctgtgggtctcagtgtgttgcccgggctggtctcaaattcctgagctcaaacgatcctctcgcctccacctcccaaagtgctggggttacaggcatgagccaccaggcctggtgtagcctagaaagtttttgttgttgtttgagacggagtctcgctctgtcaccaggctggagtgcagtggcgcgatctcggctcactgcaacctccatgtcccgggctcaagcaattctcctgcctcagcctcctgagtagctggaactacaggtgcatgccaccacgcccagctgatttttgtattttttagaagaaacagggtttcaccgtgttggtcaggctggtctcaaactcctcaccttgtgatccaccctcctcagcctcccaaagtgctggaattagaggcatgaaccaccacacccggccacctagaaggttttttaaacatatgagccacaccccacacactgtgcaggcaaaaaagtggaaagcctatcacagtgaacacctttgtcctctagagtcagtaattataaacattgttacagttcttttctttctcttctttttttcctgaccactgggagttgcagatatcatgacactgcatccttaacgacttcagtaggcatctggcgaaatcagggccttctcccgcatagccacactgccctaacaagcccataaatgctgtaaaacagcagctcgcatgccaacattttccagttatcccccaaaatgtctttttagttttttgttgtaagcagcatccaatcaagtttcccacccgcaaaggagccttttctgactaccggagattctagagtatgtgggagacacatttatgacggaagaagaaaaagatctcggcaggcggtgctggggcctagagtgcaagtggagggtgggcttgagtgaagccagctcgtgtcatcatttatttcaggagggaaggtggggagggcacagcagctgtgggtgaccttgtttaggggaagtcaaggcagcccatggccgattgttctggtgtttttccagtgaagaggtggcagaggtggtggtgcaaagagacgggagatgctgttctggagagtggagagcagatacacctgggagaagagcaggcctgccagtggcagtgtggatggtgggattcatgagctgaggagggggatggtgggattcatgagctgctgagggagggggatgtggattcatgagctgctgaggagggggatggtgggattcatgagctgaggagggggatggtgggattcatgagctgaggagggggatggtgggattcatgagctgaggagggggatggtgggattcatgagctgctgaggaggtggatggtgggattcaggagctgctgaggagggggatggtgggattcaggagctgaggagggggatggtgggattaatgccctgaagcagtggatggtgggattgaggattgggttttctagggaggagggacaaggcagttaagggtttcacaaaggagaggttctgttgatttccccctgagtctaaactgggtaatgagggacataacagagaatgatgggtgtgaggacagggcctggagtcgtgatgtggttgaagaattactggattgaagttaatacagtcaatgagctagaaagaaaggctggagagaacagaaaggatccttggaattgaggggttgttttgttttgtgatagtgtctcactttgtcacccaggctggggtgcagtgactctatctcagctcactgcaatttccacctcctaaaggtgctctgtccacatacagtcattgggggttagggcttcccgatatgaatttaggggttacacaattcctagataggacaatatattgtcaagatgtccatctcatgtagttcatttctaggttaaatgcaactccagtaaaaatcccaatagggattattttggaagctggaaaatgattctgaaattggataaagtaggggcattgtggcagtgtgggattgcataaggatagactaacagaacagagagaccagacagcggggccccgagacagaatcgtgtcccagtgggaagagtcgctcgtcagtgcagcgagtgggcgtgggacagtcagttatctatttggggaaaaaatgaaattgggtttatacctcacaccttgcagatagattaagaacttcaaagtaaaaacttcacatttcggaatcaaattaaggaaattacatttataactttttggtagaaaagattttttaagttgtcagcatagccaaggcaggagaattgcttgaggccaggaatttgagaccagcctggggcaacacagcaagaccaccccccctaccaaccccatctctaaaaatgtttttttaattagctgggcatggtagcatgtgtctgaagcctcagctacgccggaggctaaggcaggaggattgcttgaatctaggagttcgaggttatagtcagctatgatagactatagctgactatatcacagatagctatgatagcctgggtgatagaacaagatcctgtctcaaaaaaaaaaaaaaaccaagaaacccacaggttccatgggtgagtttcttcaagaaaccatgaagaaaaaagtgaacgtgtaactacatagaaattgagaacgtggccgggcgcgatggctcacgcctgtaatcccagcactttgggaggccaaggcgggcggatcacgaggtcaggagatgagaccatcctggtcaacacagtgaaaccctgtctctactaaaaaaaatacaaaaaaattaaccagacgtggtggcgggcacctgtagtcccagctactagggaggctgaggcaggagaatggtgtgaacccaggaggcggagcttgcagtgagccgagatcgcgccactgcactccagcctgggtgacagagcaagactccgtctcaaaaaaaaagaaattgagaacgtaagttttttgttttttgtttttttacaaaacataccatgaagaatataaaaaggcagaccaaaaagagaagatatttgcccatatataccaccaagaatgggttggtgtcaagagtatacaaacagacaaaacaaatcaacacaacaggaaaataggcgaaagatgtagataagacaggcagttcacagaagagaaagcctaactcaccaggaaaatacccggtgaatccagtttcaggagggatcacagaaaggtgaaccaaaacagtgaggcacctgccacctgccaacaattccgcagaaaggtccaagcctgacagtagcgagtaggagtaaaggacatggagcggccagagtcctcagccacgctactcacagccatgggcaggagtctaatcagatgagagggaatgtgtgcgtgcccggggcccaccccacacctctcccgagtgtgcccatgtgcaccaggagacattgtcagtgggcctgcagccgcagtacttgggacaaaaaaagtccatcctcagtgggctagagagccagatcaaggagcatccagctcacgggctgtgattccatagtggaaactgatgagctacagccgtgtgcatcagggttactctcaggggcacagatttttttacaaaacaaatcacagaagagtcatacagtgtgactcaggttatagaataattaatacacaacaaaataactgttcaggggcaggtccttatgtgctaaagccatgaagacaagccggtgagtcatgaccatggatggggaggggacactcaagtctgggcagggcattagtgatgctgccccagccccagggagagggacatgggtgtgtgtttagttaatgttttaaaaactatatcagccgctgggtgcggtggctcacacctgtaatatcagcactttgggaggcctaggcaggtggatcacaagatcaggagattgagaccatcctggctaacatggtgaaaccccctctctactaaaaaaaaaaaaaaaaaaaaaaaaaatttacccgaaattgggggggattgcctgtaacccnnnnnnnnnnnnnnnnnnnnnnnnnnnnnnnnnnnnnnnnnnnnnnnnnnnnnnnnnnnnnnnnnnnnnnnnnnnnnnnnnnnnnnnnnnnnnnnnnnnnttttttccaaaaaaaaaaaaaaaaaaaaaacatatcagccgggtgtggtggttcacacctatagtcccagcactttgggaggctgaggtgagtggatcacttgaagctggttttgggaccagcctgggcaacatggtgaaaccctgtctctactaaaaatacaaaaattagctggttgtggaggcatgcacctgtagtcccagctacttaggaggctgagggaggaggatcacttgaacctgggaggtggaggttgcagtgagcctatatcgccccattgcactccagcatgggtgatagagtgagatggtctcaataaataagtagcatatgatgcattagatatacctcgttttatgtttacaatgttcattaaaaaataagtgttcctggccaggcgcggtggctcacgtctgtaaccccaacactttgggaggccaaggcaggcaaatcacgaggtcaggagatggagaccatccaggctagtacggtgaaaccccatctctactgaaaaaaaatacaaaaaaattagctgggcgtggtggcgggcgcctgtagtcccagctactcgggaggctgaggcaggagaatggtgtgaacccaggaggcggagcttgcagtgagctgagatcgcgccactgcactccagcctgggcgacaaagtgagactctgtctcaaaaagaaataaaaattaaaagacaaacaaacaaacaaatgttcctggatgtcctggaaagacttgtcccggaagtcccgggagaacctttttttttttttttttggagacagggtattgctctgttgcccaggcttgagtgcagtggcaagatcacggctcaccatagcctcggcctccaggctcaagcaatccacccaccccagcctcccaagtagctgagactacaggcatacaccaccatgcctggtgatctttgtgttttttgtagagactgtgcttcaccctattgtcccggctggtttcggactcctgggctccagtgatctcagcctcggcctcccaaagtgctaggattatagatgtgagcaaccacccggcccctggaagaatttttttttttttttttttttcgagacggggtttcactcttgcccactcttttgagtgcagtggtgtgatcttggcagccttgatctcccaagctcaagcagtactcccacctcagcctccccagtagctgggactatgggcgtgtgtgaccacaatgtctaatttttatgttttttgtagagatgggatttgggtatgttgcccaggctggtctcgatctccggaactcaagcagtccacccgcctcagaagatttttttaaaaaaatgaatgtaatataaaatgaaagaggggtgcagaagtggacatagtgactcgaaccttcactgaggagtgaggactttgctgtctgggctgcagggttgagggagaagttttttaaagaggggagatggtaatcattgtgtgtggctgggcatctgcgacaggagggaaagcagagggtgctggtgcccgtgtgggggtcgctggattcagtgctggcagcatgagtgagttctcttcccatgtcacggaacctgctttcttggtgaagcaggaagcgagaagctgggctgtgggaagtcaaaagcgtgggccacctcaccaccctgcgggttctagaagtgctgtctagagtcctgaaaccggagtttgtcgggggaggggcaggtggcaggagggagcctggaggaaggagtttgaggctgaggtagtgtgtgaggggctttggagggggattggcacaggcctggtcaggaaggccctgtaggatgttgggtattcattcaaagggcatccaaacccattgatgggtttggagcagaagagtgaccccagtgaaagaggtgcagagtggagttaggcggcagatagcagctgggcctgcatgggctgtgggcgtggcctgtctggctgttgccagggaggacccttaggttcctgggtctcaatggcatcaccccagaaactgctgggtttgcccacagccgctccctcccccaggtggtggagattgtgaagaagctggagtctcgccagcggggctgggaggaggatgaggatcccgagcggaagggggccatcgtgttcaacgccacgtccgagttctgccgcaccttgggggagatccccacctacgggctggctggcaatcgcgaggagcaggaggagctcatggtgcgtctggggcggccccgccctctgcttccctcggctgggtgggctggctggggcctgggccgaccctggtcttttgtgccccaggactttgaacgggatgaggagcgctcagccaacggtggctccgaatctgacggggaggagaacatcggctggagcacggtgaacctggacgaggagaagcagcagcaggatgtgagggccgcgccgctggggggtgggcgtttgggggcgctcaagctggagatgagcaccgggctcggtgtccagagcctcagcctcctcatccagagtgggctctgcagacctcccagggcgatctgaggagtaaatgaggaaattaaatgttgtggagggctggtgcctggcaggtggtgaccagtgggtggggctgagaagagccggtatggcctgctaaccacccccgccacgtgtcccgtagttctctgcttcctccaccaccatcctggacgaggaaccgatcgtgaatagggggctggcagctgccctgctcctgtgtcagaacaaaggtagggagctcagggcagccatgacttgggtgggcttgggtgctgctgcaggtgcaggcagggccccctccggtcccctctgctgcccctttctctcagtcccaatgctggagccagctgtccggcccagagccactccttcccctccactgtggcatctgtccgtctgctctgcctttgaggctccacacctgcttggggaaggagaggggagttgaaactgttccagctgtggcacagagagccctggtgttaggaccccagctctgccatttccctggccagtgacccttggcaaggggctcatttctgcatctttgctttgcctgtagaacaggcctgatggctttccagaggcaaggaaagggaggtgcccccacagggcctgctctgccttctcaggcggccctggagctgtggctctcgaggggttgggagtctcacaacccctccatccctagggctgctggagaccacagtgcagaaggtggcccgggtgaaggcccccaacaagtcgctgccctcagccgtgtactgcatcgaggataagatgtgagtgtggtggggcctgtgcagggctgaggggcctgtgccagcttggagcttcgggaccacagcaggcggcagctcctcacactaaggcctcctctgtctcgggccagggccatcgatgacaagtacagccggagggaggaataccgaggcttcacacaggacttcaaggagaaggacggctacaaacccgacgttaagatcgaatacgtggatgagacgggccggaaactcacacccaaggaggtgagcagggccttttgcaggcggaggcccggcctgccacagggaggccaagcccagggccatgcaatgccccgggccatgcaatgccccagggtcctggctccaccagcctctggctgggggcctggtgaatgccacggatggggagggggccctcagggctgaggaaggctgtgcctcagtttgtctctagtgggcacagcagtctctttgcaagcctggcaggagggtcagacaggcactcgggacctctgccctcctgtcctcacctgcgtgagcccttcactggctttcctggcccgcagggccattccagcgtccaggcccttccagcactctcgtaggccgcccgaccctcctgccctaccactcagctgcccccttgctctctggggtttgtctccctccagccccagccccagccccagcgtccaggcccagcccctgcgtggcaggtctccaggttccccatgctctgcccccatggcagcgcatccactagccaagctggtctcccggcctctgctggggccctgcagggtgccagcgtctgtgctcttttcccatccccttcccactgcaccccaggcctggcattggggtcaatcaacacccgccctgttattatacaccttgtgggcacaggtggctccggccccacccagggccctgcatctcctctcatgccccgcgtccccaggctttccggcagctgtcgcaccgcttccatggcaagggctcaggcaagatgaagacagagcggcggatgaagaagctggacgaggaggcggtgggtgcccttggggatgtggggggccctgtgcctgccggggcaggggtggctggtgtgtggggcctgctgcagccctttctgagtggccccgacccctcagctcctgaagaagatgagctccagcgacacgcccctgggcaccgtggccctgctccaggagaagcagaaggctcagaagaccccctacatcgtgctcagcggcagcggcaagagcatgaacgcgtgagtggctcgaggctggtggggtagggtgtggtggggaggggtggcgtggcctgtgcccgcctctgcagcctcacgcccctgttcttctctgcaggaacaccatcaccaagtgacagcgccctcccgccccggccctgcctcaaccttcatattaaataaagctccctccttattttttcctccctggtcgtggtacagattccagggttggatctttggttgggtgtggcacagagtctggctcctgctaggtgagacctggccatcaaatgacacaaacaactaaacgatggaagagagagcgagcccgggtcctctaaggctccttccttctcccctggctgtcggtcacacctctgcagggccggctctctgatagaaagtggaaggcggttttagaaactcatcaccctgctctctcctggcctcgggggctgcacaggtcactgtcctgtaatgtctcccggtcagggcagcccaggactgcccagcctggtgggctggggattgggctttgggtagggcacaggtgccaccttctgtcctggctgtcctgtgccaccctggtctgtgtctagaggagtgaaactcccagggttgggctgggagtatttggtgcacgcggtatggggagggctgagctcagtgcctcctgggagacttgtcccgtgtacagtgacccagaaagatgagattccttggcctgaactctgtgatagagtgtgactgagctgctgggggacatgtgagcctcaaatccatagaaagacaaacggccaccttgggtgcccaggatactggtgcccggccccacgtacacccacatacttctcagatggctcccacattttaagattttaaaaatgaaaccaaaaaataaattgaagaaaactgtaaactttaaagaataatcagctgggcgcagtggctcatgcttgtaatcacagcactttaggaggctgaggcaggaggactgtttgagcccaggagtttgagaccaacctgagtaaggtggcaaaaccccatctctaccaaaaatacaaagattagccaggcgtggtggtgagcgcctgtagtcccagctacttgggatgctgaggtgggaggatcacttgaacctgggagacacaggctgcagtgggccctgattgagccaccacactgcagcctaggtgacagtcagaccctgtctcaaaaaaataaaaaaaatttaaaataatcttggggtgaggaaactgtagacaaggtgcaaaacccagtagcctgaaaatgcatggttggcattgatgctgtcgcttctgcacggctagagctgcggggctgagtcttagcctgaaaatgcacggttggcactgacaccattacttctgtgcagcgggagctgcggggctgagtctttgggtgcccttccttgagctctgtattctctatagtttgacatctgactcttgattctgttttcaccttggctgcttccttggcttcctcaggaagggtgtcctggggtgtctaggctgggactaggacttggggcagtcacagtctgtttctctcaaaagcctaggaggaggctgggaacagtggcacatgcctgtaatcccagcactctgggaggctgaggtggatggatcacttgaggccaggagttcaagaccagcctggccaacacggtaaaactccgtctttgactaaaaatacaaaaaaaaattgacatgtaggccgggtgcggtggctcacgcctgtaatcccagcactttgggaggccaaggcgggtggatcacgaggtcaggagatcgagaccattctggctaacacgttgaaaccccgtctctactaaaaatacaaaaaattagccgggcgtggtggcgggtgcctgtagtcccagctattcgggaggctgaggcaggagaatggcgtgaacctgggaagcggagcttgcagtgagctgagattgcgccattgcactccagcctggtcgacacagcgagactccatctcaaaaaaaaaaaacaaaaaacggcatgatggcaagtgcctgtaatcccacctactcagtagaatcgctggagcccagggggtggaggttacagtgagccgagatggtgccactgcactccagcctgggtgacagaatgagaccctgtttcaaaaaaaaggaagcctaggaggtgcttccagggttgggactgggcagtcaggtgtccctggcatggaccccaggccctggcctactgtccaagtcacaccttgacgtctgcaggaaatggcccattaggaggctgtcaaagctgctgtcacagctgaaaatgaccgcagcctgggctagagcccaggtggagccagggtagaaaagaccagcttcagctctgcagccgactaactttctggctctagtaactgggcagactacgtggtgaaccaggggcctcctcgttcgcgccatcttgcttcctctctgcatctctggctcttggtcctagcccagagacttcccttctctgccctggtgtactctgctctgctccccagctgtgtcctgcccatgtgcccagggctgggaggggttggggactaccaaatccctggaggcctgagcccccagagcagacagaacccaaggcggcttcccacctctgctgctcggtagccggacaccaacggtgcttcccctgccctcaggtacctgaggggcagcgatggctcaaaagctgccctgagggtcagtgagccctcaaccagggcctcagccaggtgggtggcactcagggaggacagggtgcttatgtttgccctctatgtttcccttcactgctgcctgacctgaggcaggtcaccaagtctctgtcttacctacaaaatgtgcgtgttgagggtggggggcgtgatctcaagacttctagggccaccctactgcatagttgaggactgatccttccacagcttcaacaaaaatgtaccgagcatctgcgagcgctgcctaagaacccagagcaaagccggacaggctgcctgggcccatggggcatgggccctaagagcaagcagccactgcgcaagggcacagccaggtgtgaaggatgggacgaggcccagctcctgccctcccagggcccatctctcctcgtgatgggccttccgggtgtggtgatgccaaccccagcccacagcccagcagtccagtgctgtgtggccttggctctgagcaagaccaggatggggtccccctcttgctctcggggcctgccctctcctgtgcgcaccccctgcccaggtcctccaggctcctccaagcctctgcctgtggccccaaacctgccccacccagccccaggcagggccctgcctcttcctccacaattcagagatgctctggagggtgcaggcaggccctgccagcatgggctccctgtggacctgggaaaaggtgcccttctgggcagtggacgcaggcctcaggagcacagcctggtgggcagattcgcccccattcatcctacagagtggtccctggcgcccctcagtgccaaacccacgattgccccggggctttagttccctgccctgccttccccagctggtcctgtcattgtcccttggcatcctcaagaagggctcagcccaggtgtacattgggcagtggactgaaggggacaaccagggtgaggacctggctttgctggtgtcgggtctctgcgtttcagtgccatgggtgggaagggcgggctggtcccaggaaagtggggattcagcagtaagttcccaggaggagcaggattaattggctggagttcccagagagacccaccagcagccacgtggacagtggagagcagggtggggctgaggaccctggcaatgcagaggttgctaaaaagatttttcgaaaccgtgatactgtttagaacccataggagaaaaatgatagctactaagattaaaaaaaaaaaaaaaaagctacagaacccataggaaaagttgcaagcgatacaaagtgtttccccttgaaccatttgacaatcggtggtcaaggggattccgtaccgccccaactaagtgtgtgtttcctgcaaacaagggcgttctcccacataaactaacgccacctaggacattgggaaaagtaccgttgatgcgtcacttccacctcattttagaccccaactgtcctaatgtctatttttttttctttgagtcgtagccttatttatttacaagcactggatgagtccctggccaccccccaggacagagcaaccctacgcagccccagcgcagttaaatacagttgggagctaggggactggagggaggaattaagggaaatacaggactagggacaaatactctgttaagtggtcacatacgggccagatcctgtagtctgcagagccacggctgtcaccacccccacaccaggacatgaaaggtagggagaagagcctgagggagccgaggcaggcccaggggtgcccacccgtcgtgccctagaacgtggaagggacaggaatggctctcagggagtgtatgggaaggacgaggccagaactgtcttcttacgggacccagttttaggaagaacacctggtttgcttttctgtaaacacagcggccttgagggagcggctgcccagcagaggctctgcctaccccagacccgagcacagcctagctccttcccacctctacccagaaaggatggcagctgctggctcccagctcccttgaagggaccaggcacagtctgtgagtcctcatggggctcaggagaagctctggacagggtggctgaccttcaggcaggcccgaaagagggcctggcccaaacacagcacagccagcaagatgacagacaccaggctgcatggaggcctccatgtcgccccgcatgcttccctgagccaaagcaggtagcagatatgtcacttccacggatatctgcacccatagatgacactttccaacagtgagggtgacatgtgaactctgtccatggaagagtattcctgcagtgcccacggatggccctgacacccacctgaggttctggaccccacagtgatgattcctttgcagtagggccgagggcaggtaacccgctgggaagtcactttgcagatgagacagctatgaggacttcagacatctttctccctcgggtgcattctggattggagcagctttgttgcaggtactgcattgactacaagctgatgagttctgccttccaccttgatgagcagtgggcactctcactccccaggctggtcagggtgagtagggggctgggtgtacctcatagaagggggtatgcctggggtggggcaggtttactggcttcactcaatggtacaaagggggtcagcatctctgggcccagccccactcccatcccaccctactaaatcattgccaagggaagcctctccatctgcggccaccactagcaggtcaccagcctagtaatatcctttttactttttttaagacaaggtctcactgtgtcgcccaggctggagtacagtggtacaaacatggctagctgcagccttgacctcctggctcaagtgatccacccacgtcagcttcctgagtagctgggaccacagctgcatgctatcatgtctggctaatttttttgcaaagacagggtcttgctatgttgcccaggctggtctcaaaattcctgggctcaagcaattctcctgcctcagcttcccgaagtgctgggattgcagtactagccacacccagccgatagtaggttttagcaaaaggattcagttcaggcaactgcacccattgcagttctggccatgagccaccacacccaaccagaattatttcaaaagattttaagatagaatattttgacctcacatccctagtaggatatctatttaaaaatttttaaattaacataatgaaatcttaaacacatttaatagtcttattgttagtaataataatgatgatattggctgggcatggtgactcgtgcatgtaatcacagcactttgggaggccgaggcaggaggattgcttgaggctaggagctggagaccagcctgggcaacattgcgagatccccatctctacaaaaaatttaaaaatcagccaggcatggtggcatgcacctgcagtcccagctactcaggaggttgaggcaggaggagttggagactgcagtgttctaggatcatgcattgcactccaggctggacgacagagcaagaccctgtctcagaaaaaaaccaaaaaatacaaagaaaagaaaactgaagctgtgtaacaggtacaatgggattcattattccattctatctacttttgagtatgtttgaaaatttccattatagaactttgtttaaaaagagagaacaagaacatgttggcttagcaacagaaaagcatacatatgttcagctaaagacatgaacaagaatgttcttaacagcactatttataacagccccaaactggaaacaacccaaatgtccattaacagaagaatgaataaatagccgggcatggttcttagtgcctgtaatcccagctactggggaggctaaggatcccttgaggccaggagttcaagaccagcctggtgacatagtgagacccacctctaaaaatattttttaaatttagctgggtgtggtggctcatgcctgtatctgtagtcccagctacccgggaggctgaggcaaaggattgcttgagcctgggaatttgaggctgcagtgagctatcctcacacttgtgaatggccactgcaccccagcctgggtgacagagtgagactctgtctctaaaaaaaaaatcaacaaagggtagacattcatataaccgaatgagtaacatggatgaacctcatggacatgaaattatacatactgtttgcttccatttaatacaaaatctggaaaaattcttttattctattagaagcagtatagaaggctgggtgcggtcactcatgcctgtaattccaacacttttggaggccaaggtgggaggattgcttgaagccaggagttctagagcagtctgggtaacaaagcaagaccctgtctctacaaaaaaattttaaaaattacctgggcatggtggtgtgtgccaatagtcccagctactcaggaggctgaggcacaagaatcactttaacctgggaggtggaggttgcagtgagccgagatggtgccattgcactccagcctgggtgactgagtgaggctctgtcaaaaaaaaaagcatcgttttaaataatgacataaatataaaaaatggccagcatggctgggcgcaatgtctcacgcctgtaatcccagcactttgggaggctgaggcgggcggatcccgaggtcaggacatcgagaccatcctggctaacacagtgaaaacccatccctactaaaactacaaaaaattagccgggtgtggtggcgggtgcctgtagtcccagctactcgggaggctgaggcaggagaatgccgtgaacccgggaggtggagcttgcagtgagccgagatcgcgccactgcactccagcctgggcgacagagcgagactccgtctccaaaagaaaaaaaaaaaaaaaaaaaaggccagcatgagaatgagtgaaagttcataaactcttcctatggtgactcacatatggcataaggaactagctcactggttttgccttctccttcctctcttctgtaaggttcttcatttcccaggcctgtaacttgctgtcttcccactacggtgccttctaataaagagcttccaaaactaaaaacaacgtaaatctttgctgcggttattttttgacgcatcaaaaaaggcaccaagcctagatgtttttaaagcttcaaaagtttattgaccggcaccatggctcacacctttaatcccagcacttttggaggccaaggtgggcggatcacctgaggtcaggagttcaagaccagcctggccaacatggcgaaaccctgtctctactaaaaatacaaaaattagccgggaatggtggcaggtacctgtaatcctagttactcaggaggctgaggcaggagaattgcttggggcctgggaggcggaggctacagtgaactgagatggtgccattgtattccagcctgggtgacagagtgagactccgtcaaaaaaaaaaaaaaaaggttattatctaaaggctttacctttagataatagatcattcaaatgctatttaaactactccagatcagagaaaaagatggtaagcgctcttaacatattttatgatattaataaaatactgatagccaaatcttctcattgtttctgaagtttgttttctagaagttccttctgtctgctggtgataaactcctatattctgttggtctgaatgtcttcaccatggtgtagggaggagacagccgtcgtggcccccaggctgtggtgagaatcaaagctgtcctgccttgggcatgtctccaaagcccaaacacactgggaagacggagttggccccactcagggtctccactcagatcaggctgggtcccacttccctctccctgagccccggacacatcgatgctgtcattgcatgctgattctccgagtccctgagccccgtaccccccggccttaaggagccttgccagtgtcctccccacctcgcccctgcccaacagacacagcacgccacctgctctgccttgggtcccaggcctttccctcctcaggcacctgttcaggggcagtgagagaagcaaaacagcccttctgtgccaatgcacaccccacctgggggaggaggcagacaggagggctcctcagaaacggctgatttgtcagccctggacaaagtgaaagggagaagcaagaagcaggacagatgggcaggtctcctgcggcccacccccccaaaaaaggaatgtgtgggccgggcgcagtgtctcacgcctgtaatcccagcactttgggaggctgaggcgggtggatcacctgaggtcaggagttcaagaccagcctgaccaacatggagaaaccccgtctctactaaaaatacaaaaaattaggcaggcgtggtggcaggtgcctgtaatcccggctactcaggaggctggggcaggagaatctcttgaacccaggagccagaggttccagtgagccgagatcacgaagcaaggaaggaagggagggcgcgaggaaggaaagatgtggccatagatcgtgagtaggatcgataagacagaactccattgtcgaaagctaaattatggcagacacaaagcggatgggagacccacatgaaagaaggcacttggagccttcagagaagaacgcagggaggcaaaacccccaaaggcctgaaagcttcagcagtcactagaaggggagctgaatacatgtgctgaggggccctggggagacgacccttccagaggctgcagttcttaggtcttaccagcccctccttgctgcccatctaccaggtccaaggctccctgaatcctcagacattaactacaggggtacctcatccttgtccagagcagggtttctgggggacacagccacagacacctccatgtgagtcctcctgcacctcaatttgggtgctttctaactgaaagaccagggcggccaggcgcggtggttcacgcctgtaatcccaaaactttgggaggccaaggcgggcagatcgcctgaggtcgggagttcaagaccagcctgaccaacatggagaaaccccatctctactaaaaatacaaaattagccaggcgtggtggtgcgtgcctgtaatcccagctacttgggaggctgaggcaggagaatcgcttgaatccagtaggcggaggttgcggtgagccaagatcgcgccagtgcactccagcctgggcaagaaaagtgaaactgggtcccccaaaaaacaaaaaaaccagggcagttccccaccaccctccaagcactgtactccagcttgtaaatgctgctggggaggaaggccacttctgatcatgccttggtgagtgaatccatctctgggggagtggaacttgtgttcgcagtggtctaccagcatcctaactgctgttggggcatgtggaccctttgattggaccaagaatgcagttcccttatgagactgtaactaggttagatgctttcgggttctgtagcccaaggcaaggtgctgacttgctggttttacgtgcttagggtgacctctgctggtggcttctctaaatgttggcagaatacacagccaggaactgccggtaccgtctcacatcagccagtagttggagccacattgctatcagaaggaaaagagtgctcttctcatacaagaattattaaaacaaagtgatgcccaatgctgttcaagaatgaacagcctggtctggttagtaacaaaggattctggtacttggcaactcattgtggattagcaagggttaaataacaaagtgggtattttagcgtcatgagaatctatcacaataactggaagaattgctgccagtactggcacctggtgtacagccctgggcactgctagttcttttttttttttttttggtttggagtcttgctcttgcccaggccggagtacagtggccgccatctcggctcactgcaacctctgcctcccctcctgggttcaagcgattctcctatctcagcctcccaagtagctgggatgacaggcgtgcaccaccacacccagctaatttttgtatttttttagtagagacagggtttcaccagttggccgggctggtctcgaactcctgatctcaggtgatccacctgccttggcctcccaaagtgctgggattacaagcgtgagctaccgcgcccagcctgtactgctaattcttcattcctcagtgtcaccagatgaggcatacggcatgcctccacacctcccacaggggcttttggattctcttgcaaatgtcaccagtggatcaaacacacgcacagcatgaactgctggtggtgtccgtggtgtcctgacttcttgcttcatcagtgattttctgagggcggctcccactgaggaaactgcccacacttctctgtgtgcttctcagacacaggtcagtagagatgtttgggccttgaatgaagacaaaacccacggttctgtggcccaagtcactttcctgggagacaactgggcaactactaaagacgaagcaccaggccgggcacggtggctcaccacctgtcatcccagcactgtgggaggccaaggcgggtggatcacctgagggcaggagttcgagaccagcctggccaacatggtgaaatcccatctctactaaaaatacaaaaaaaattagctgggtgtggtggtgcaggcctgtaatcccagctactcgggaggctgaggcaggagaattgcttgaaccctggatgcggaggttgcagtgggctgagatcgtacaattgcactccagcctgggcgacaagagcgagactccatctcaaaaagtaagtaagtaagtaaataaataaataaataaaaataaataaaaataaagcaaaccatgtaaaaagaaaaaaagtgcacatggaattcggacaatggttgccttgggtgggacagcagagaatgggctggtcagggtaggatgggaggtggagtatgttacttgggttattgttaaagtcctagcctttattttatggtggtgggtttgaagctgctcacattattaaaaataaccaaccaaatatttaattattcttgacttttaattttttattgaaagggagtctcactatgtcacccaggctggcctcaaactcctcaagggcttaagcaatcctttcccttcagcctttcaagtagctgggattacaggcatgtgccaccatgcccagccaaaatgtttaaatataggccagactcagtggcttacgcctgtaatcccagcattttgggaggccgaggcgggtggatcacctgaggtcaggagttcgagaccagcctggtcaacatgctgaaaccccgtctctactaaaatataaaaattagccaggcgtggtggtgggcgcctgtaatcccagctactcaggaggctgaggcagaagaatggcttgaacctgtgaggcacaggttgcagtgagctgagattgcaccactgcactccagcctgggtgacagagcaagactccatctcagaaacaaaacaaaacaaaacaaaacaaagaaaggaaaaagaaaaagaactacaggataaacccagagggattggtttgtttcccattggttatgagaaaaaaacaaaaacaaacaaaaacaaagggagtataagtgggaaatacggtaagagcagcaattaatgaaataccaatacaaagaatgacaacaaaaagctggtgcttagaaaagactaataatgaccttctgccaagattgaccagctataacagagagaaggcacaaataaacaatattacatgtaaaaagggggacataactttggatacagccaagattacaaacataaggcaatcatacaaataactttgcgccagtaagtttgaagccatagcaaacatgagaaaatatgggggctgggtgtggtggctcacgcctgtaaccccagcaatttgggaggctgcggtgggcagatcacctgagatcgggagtttgagaccagcctggccaacatggtgaaaccccatctctactaaaaatacaaaaattagccggccatggtggcacatacctgtaatcccagctattcgggaggctgaggcaggagaatcacttgaacccgggaggcggaggttgcagtgagccgagatggggccactgcactccagcctgggcgacagagcaagatcctgtctcaaaaataaataaataaataaataacatgaaaatatttttccttgaaaatatgactgaagaacagaacacctgagtaatctattaccactgacaatctaattccaaacctacctacccacccacccaaaaaatcgccaggcatggttggttttacagcaagctttaccaaaaattgtagaaatgcaaaattccaatcttatacaaactctcgtaatgaaaataaagggaaaacactttccaacttatttatatgaagctggtataaccttgatacaaaacaaagggtgggggcagtacggaaaaggaaaaccttaaaccatttcacctatacacctggatgccaaaataccagagaaccaaatccggcagtataataacaaatccattgtgactgtcttcttccaggaatgcaaggatatcttaacgtgagagaatgttatgatactccaccacatttacagattagaagaggaaaaccatgtggtgagctcagactgccatctgtgctccctggcacacacacaggggtggctgggtggcaaggggggaaagcgcactgggccacacggggaagccctggtggaaatgacctggctgtagaggttagtcctgaagtgacagaggtacagattctgaagggccacaaagtctcaagcataactgcaagagaagccagtaagtactattaggcagccagtcacagggactggccatgacatcgggacaaggggctcttacatcagatctcagctcactcagggagatctattcatacatggttggatcccaccattcagttggaagaacagaggtggaatccagcttcagagaatgacataggaaagtagcatgcagaatacaaggaccctacctccatcagtacccttagctacagcccacagaagctgaatggctggtaagagatgaagaagtggaaacgaaaaggttttagggggaaaaaaagatgttactaggtggatcacagtatcactgagagaatggagaagaacataagaccaagtttacagataaaacgccaaaacacacacacacaaagtggggaacagtcaaaggactatttagaagaaaacatatagccctgaatatattagaaaacaaattgaaattaaattagctaagcacacatctcaagaacccagaatgagcaaataaacccaaagaaacgaaggaaaagtccagtaaggaagacctcttgcaaagctagccaaataaaatacacaaaatataaacatattttgttgatttcacctgccctcaccccttgccccactttttctggtaatagaacctctctattccatgggaaacatataaaaattacttgtggctcatcctgccccaccccagtcctccacaccctcccaccccccggccctggccacagtgactgctcaagcacagcaagtgacctgaggaagatcaatcgcccttcacggaaatacagggatcctcaagagccccaaggggctctgtctacaaggactgtgtataaacttgagcgtcctggctgggcgcagtggctcatgcctgtaatcccagcactctgggaggccgacgcaggcggatcacgaggtcaggagatcgagaccatcctggctaacacggtgaaaccctgcctctactnnnnnnnnnnnnnnnnnnnnnnnnnnnnnnnnnnnnnnnnnnnnnnnnnnnnnnnnnnnnnnnnnnnnnnnnnnnnnnnnnnnnnnnnnnnnnnnnnnnnagggcccgacgagccctgtaggtggtgtggtgaccgccgagctgacttggcgtcccaaagcctccctggccgtgaccctagaccgcatcggcttcttcgtctaccaagcagggctaacagccctcacggaattgttttgggaaaacgatgaaaggagaaaatggatgcaagctttaagccacacaaaagctggttaccatggacagcgctggctcgagtctgtcggccacggaaacactgcatgcttgggccagtaatgatttaggacgagtattttattagattgggtactttacaagattcaagttcttaaactcaagatctggcatcgttcccttgcctgctaaccttcagtcccgaattaaacgcagacgtcttgacccgcagcccagctgctctccagcctcgctgctccctccgctcacagctccgcatcctctgccttcctcacaggcttccgtccgcacccccgtcctaccggctgacactgtccaactctccaagacccatctcaaatcctacctcccgcaaacccttcctaaatttcctcacctaggcctgctacagcgttcttattttccacatttcttttctggctctcggactactcagctgccaaagcgcatccattgctgtactccctctctgcctggcctacttcagtggaaaagcatgaggacgggctgcgctctgctcctcacacaatccccagcccagagcaccctgcttatttattgaacataacagtgcaggccggcctaggcttcccataggcaaggatgactttcagaatgttctagaaaaaaggatacttcagggggcccataactgcttgattcaaatctttcctttaaaaacataaaaacaacagttggacttctaaaacacacactgaagacatacgcgctgccacgtaagctctccacatgttcactttgccttcagggaaactgtgtgcacatcaacgtgccctgggaaaggctgcagggctgcactgcgggcagttcagatcctagagcacttgctctggcctgggagcgctgcaggcaactgaagccacacagaccctgctcctgcaagaacttttgtgtgtgtcccatggtgatgtcattagtttgcttattaattatatttatataaacttctggtcctgttttaaatgtctgagattgcaaggtcaactgttataaacctgtcatcacttccatctatgtatccaagactaggagaattctccaaatcaactgaaacataaaaatagatgttaaagttgattttaacccaaattttgtattgatcaaaacagcttcattgttctttataacaaagaattgttataaacttgaatttatgtaacaaaacaaaataaccaattttatattcgctttacatattggggttccacaaaaaaattttaatttggggggaaaaaagctgtatttcaaaacattaaaaaaaaaaaccaccatcatggaaatcttaggatgaaatggccttcttaatggagaaaggcaggagatagaccatccagcagagggctctgtgtaaaaacatttatttttactaatgtttagaatacaggaactaaagaaagaaaaaaaaaagacacctcaactccaaagcgacagtgagttagggcctgcccacggccaagggggaaggctactccagggtgtcctggcatggactgtccccccactacttaatgtcagtgccactaagcagaaaacttgaggaatcagggtgtgaagaccttaccagctgctagcgagcgtgcaagggaagaaagggatgtctatgtggcttccccatgagctgagagccaggatacacggggcaggtggcagaggctcccaattcagttaagagcaggaggctgaatgcccaggtccaggaagaacaaaaaggggattttggaggtaggcttttttgttgtgttaaaaaacaggcacattatccatctccttgtggcccccgagctgctggcctggccccctgatccttcccctctccccacaaaaccaaaaggagtaggaagggaggcagaagatgagaaattccaagggtggggaatgcttcagtcactggagaccgaccgtaagagtgagccaggagagcaatgggaataacaaggtgaagctactgttccccctggggtggggtggaatgggacagggcagaaccaggagggtgaccgagaacatcctgactccagaaaagaacactctgtagcaggaacacagggccgcagagagccactctggaggaaagaggtgaggctatgcggcacaggggcatgaaaagctccttgtggacgtggcctcagcttgctcgctcccagctccctggcctggcttgcctctagaggacaggaaaactctggagaccagaggggaggcagaacacagagaagtgagctgctctcccactctttctaggaggacactgtttgaaccctgtgatcaccaggggctgggcccaaggcaagcagagtgaatgcacttaatggagagcagagagaaactgggccacacgcacgcctaggggcagtgtgttgctcctttctccctgagggcctggggccagaggtggtcagagctgccacctcagcttgcagctgccaaaggcaggctggcacaaccaccccaaggttctctggatttgtgaaggagaggaggaagaagggaaagatgggtatgaaatatgaagtggaggagagaaacagccttagatatgtcggggagcaggtgggtggccacatcaagaggagttctggttctggtagatggaagctttctctttcaacaggtccagacacaggtggcagctccaacttcctgcagagaggcaaaatggggtcaggatgggtcccacacaatccccacctgcttgcaattcctctgctcttgataccccatctctatagcaggatcagctacaggtaggacgagggatgctctgcagcaggaaagttccatggtttcctgagctgggataaacctctaagtcttcaaatattatgaaatatcatcctctatggagatgaaagaaataatcatctagaggacttcagaatactgatgcccaggccctcttggccctattaaatcagaagttttgggagtaggaagagggcctgggaagacagaagtttgtcaagcacctcagttttaagacttgtgtagtttcactaaaaaacacaaaataattgtcccttatatgaaaaacaattgggtcattccttgtttattaatattgactatggctgaattcttctaattttttttgaataaaattagtccttaatgccttgaaatgataagcaaaattatacctatgcgcatttggacattattctagggcttttatcagctcttcagaaacaggtgactcaaaaatgtaagtcctttctaacccaaaggtcaatacggttggcaaagttttctgtaaagagccagagtgttaaatattttagggtgtgtgagccacatacagtctcatgcattttttttttaactccctttattttttttttttctgagacaagagtttccgctctgttgctcaggctggagtacagcagtgtgatctcagcttactctaacctcggcctcccagattcaagcaattctctggcctcagcctctatagtagctgagattacaagcgcacagcaccacgcccagctaatttctctatttttagtaaagaggtggggttttgccatgctgcccaggctggtcttgacctgggctcaagagatcccaaagtgctgggattacagatgcgagccacagtgcacagccagtttttatatttttaaggggattttcttcaggctagatgcagtggttcacacctgtaatcccagcactttgggaagctgaggtgggtggatcacttgagcccaggagttcgagaccagcctgggcaccatggcaaaaccccgtctctactaaaaatacaaaaattagccgggtgtggtggcatgcctgtagtcccaggtactcaggaggctgaggtgggaggattaccagattacctgagcccggggaagcagaggttgcagtgagctgagatcatgccactccactccaacatgggcaacagaacaagacactgtctcaaaaaaaaaaaaaaaaaagaaagaaagaaaaagaaaaagagaaaagaaaagaaaacaaaacagcttgcaagctatttaagctggctgtggctggatgtggtccataggttttagcttgtagcttgctgaccctgacctagaacatctgatacttctaggggttgcccctcagctgccttaacactacagtgaggacactcgggcctgcagctctccactacctcgatgtcccacagaactttaataggaaagccattctgtaacatagatcatctgtttgatggtttaaaaaaacaaaacaaaacaaaacataaacatgcgacttctccccaaagcagattcataaactgggcctgacagaagctgagtactcccctacagctgctaaaggactcttagacattgtcaggggcctcattctctagaggggtgacagcagtttgaccgatatgttacaagtcagcttacatcacacaatgaaacactttctcttgcctgtaatgctggcccacatcctttgtgcacagtaacagctcctgggcatttgtgttctgagtaagctactgaatttctgttggctttttttttttttccttggaaatggagtctcaccctgtcgcccaggctggagtgcagtggtgcgatctcagctcactgcaagctccgcctcccaggttcacgccattctcctgcctcagcctcccgaggagctgactacgggcgcccgccaccgaaccgggctaatttttgggtattttaagtaaagagcgggtttcaccatgttgcccaggttggtcacaaattcctgggctcaagtgatctgcttgcctcggcctccaaaagtgctgggattacaggcttgagccaccgcgcccggccttattatttgtttttaaattacacatgcgactacagacaaattataaaatacaacatgtagcttggtgcaaagaccttcagcagaaaaggatacagctcttgaatggaaacaatgtctctagctcctgcatggccactgtccttgcaggtactatgcctggctttcgataatcttttgctcagaaactgaaaaagaaaagatagtgaatacagtacttcatagtcaagtaatagcagaggtgttttcaaaagccttgagataataaaaggtattcaaaatataatcaaagatctaacattcctcaaagaattaagatacacacagactaaaaacaaagacatcccatgactgtctataacatataacaatcctaataataccaattatttggtgaagacttatcacctgctgggcatagttttaagtgctttatgtccattctcatttcttttttttttgagatggagtctcgctctgtcccaggctggagtgcagtggcgcaatctcagctcactgcaacctccacctcctcggttcaagcgattctccttcctcagctttccgagtacctgggattacaggcgcctgccaccatgcccaactaatttttgtatttttagtagagacagggtttcaccacgttggccaggctggtcttgaactcctgaccttgtgatctgcctgcctcggcctcccaaagttctgggattatgggcatgagccacggcgcccagccccatttaattcttataacaatcataaaaaatacagattattagacccaatgtcagaaaaggaaactgaggctcagggacatagtttgtccaagctcacactgggactggaatccaggcctgactcgaaagcccacactcctctcaatatatcacaatgcctcccctgtagagcagaaatggagaatcacattattagtttgctttcattttgttcttacctcatgctcaaaagagttcaggatctctgaggtaaggccaactttatgtgtgctggtgcagaaggctataagctcgcctaccattccctcctcattctgtccatactgaacacaaagctctaccactgtagaaaggaaaattggacaagtaaaaacttagttcatttctcgaagtttcacctagaaaagcaaaaataatcctggtttactccatcaatgtttattcagaatctattagtgccaggcactgttttgggcaatgagaaaacagaagcatccttgtccttacaaagctcaccactgaggggagacaaaagaggataagggcagaatcagggggaccaattaaagaatcatggaaaagcccaggtgagagatgatggtggcttggatcaaggtggtggcagtggagatggcgagaagtggctggactctggataggactttacatgctggaagtgaagccagtgggatctgctaactgaatgtaaggtatgagaaaaagaaagtcaaggatgatgctgatatttttagcctgtgcaacaggaagagtggcgtccctattaactgagatggggaaaagagccagaggaactactctgaggagagagaggagataccaggagcttagttttagacatgcagagtttgaggtgccatttagacatccaactggagacagcaggctgaacaaaccagcctgtagttcaggcaagggttgtgggcggaggtataaatttgggaaccatcagtaaatacatgggatataaagctatgagaccccaggtgagatcgccaagggagtgagcgtatctagaagggagaaaagatcccaggcttgagtcttggggcgccttagggcctctgaggatgaatcggcaaagcctgagaagcggtgacacaagcaaagctgaagaaaaactaggagtaagccggatgcagtggctcacgcctgtaatccagtattttgtgaggttgaggtgggcagactgtttgaacccagaagtttgagaccagcttgggcaacagggtgaaaccgtttctataaaaaatacaacaattaggtgggcttggtggcatgtgcctgtagttacagctacttgggggctgaggtggaaggattgcttgagccaaggaggttgaggctgcagtgagctgtgatttgcccattatactccagcctgggcaacagagcaagaccctgtctcagaaaaaaaagaaagaaaaactagtagtgtctaagaagctaaaagaaaaatgtgtttaaaaaaagaaaaaatgacaaacagtgtcaagtgccggtgctaattcaattcaagatgaggactgaaaattcatcactggttttagcatggtgaaggtcactggtgaccttgagtagagcagctttggtgaagtggtggcaacaaaagaacttactgaaatggatttaaggaggaaatatttaaagatggcaaggcccccccccttttttttttggagacagagttgcactctgttgccaggctggaatgcagtggcacgatctcggctcattgcaacctccacctccccgattcaagcgattctcctgtctcagcctcccaagtagctgggactacaggcatgcgccaccatgcccagctaatttttgtattttaagtagagaccgggtttcaccacgttggccaggatggtctccatctcttgaccttgtgatccgccctcctccgcctcccaaagtgctcggattacaggcgtgagccaccgcacccggccgacccttttgaggtctgctgtaattgggaaggagagaactggagtgggaagtagggtcaacagagtattttaaaggcaagattggaagcacatttctatactagtaggaaaaaaatcttgtagcaaggaaaatagaaaatatgtaagacaggagaattaccagtgatgtccttaattgcttcagaaggaatggggtttaggactcaagtggaggacttggattttgctaggaatacggaaagcttattcattataataggaaagaaggctaggtatatgccacagatatgggtcagtgagacataatggtggtagctgatcgaagttttctaatgcttctacatttttcagcaaataatagaaatttgtcagctgagagtgagggtgggacagaaggatgttacaggagaaggtggaaaacaatcatctggaagactcagagtaaagagaccaggggcctggcgcagtgtaatcccagcactttgggaggccagggtgggcggatcacctgaggtcaggagttgaagaccagcctggccaacatggtgaaaccttgtctctactgaaaatacaaaaagtagaacaggtgtggtggctcacacctataatcccagcactttgggaggccgaggtgggaggatcactggaggtcaggggttcgagatcagcctgcccaacatggcgaaaccccatctctactaaaaatacaaaaaattagccgggcgtggtggcgggagcctgtaatcccagctactcgggaggctgaggcaggagaaccgcttgaactcgggaggcagaggttgcagtgagccaagattgcaccattgcactccagcctgggcaatgagaaactccatctcaaaaaacaaaacaaacaacaacaaaaaaaacagggaaatacggttgactgtcaggaaacattaaggtgccactgaagttactgatgatccaaagtccacaattccaaagccattgccatgagatgaaagcaactggcatcttggcctgaagcctttacaaatctggttcacataactaatttctctcatgctgatttcatgcttaccacatacatttctgactatgatcaggnnnnnnnnnnnnnnnnnnnnnnnnnnnnnnnnnnnnnnnnnnnnnnnnnnnnnnnnnnnnnnnnnnnnnnnnnnnnnnnnnnnnnnnnnnnnnnnnnnnnttaaaaaaaaaaaaaaaaaaaaaaaatctaaagatttctgggatgtaccaatacaaatttcctggttttgaaaatatactatagttatgtaagatgttcccattggaggaaactgggtaaaggttaccagcctctctattatttttggaacttccagtgaatatgataatttcattccacgttcacattgaatgacagctcaagctcagctgacctgaaccggtttctcctgcagtgcctgtccacctgcaggcagggcctcctgatcacacccacctgtggtccacagcgccctctgcagctctcccaccactggaagcctcctggtccctagagggaggccagcttgaggaagccctgatttcatagactcatcttgcagcctcatctcctccccatgcctttatgagctgacagtttgaggggttttttgtttggttggtttttggtttggttttgtcttgttttgttttgttttgagatggggtctcacccaggctgcagtgcagtggtgctatcacagctcactgtagcctttacctcccaggctcaagcaatccctcctgcctcagcctcctgagtagctgggactacagacatgtgccaggatgtctgactaaaaaaaaaattttttttttcagacagagtttcactcttgttgcccaggctggagcacaatggcgtgatcttgtgctcactgcaacctctgcctcctgggttcaagcgattctcctgcctcagcctccggagacgctggaattacaggcacctgccaccatgcccagctaatttttgttatttttagtagagatggggttttgccatgttggccaggctggtcttgaactcctgacctcaggtaatccaacctcctcggcctcccaaagtgctaggattacaggcatgagccaccgcacccggctgactaaattttttaaaaatattttttagaggccgggcgtggtggctcacgcctgtaatcccagcactttcggaggccgaggtgggtggatcatgagatcaggagatcgagaccattctggccaacatggtgaaaccccatctctactaaaaatataaaaattagctggacgtggtggcacgtgcctgtaatcccagctacttgggaggctgaggcagaagaattgcttgaaccagagagtctgaggttgcagtgagccgagatcacaccactgcactccagcctggcgacagagtgagactctgtctcaaaaaaatatatattatttttagaggccgggcgcagtggctcacacctgtaatcccagcactctggaaggcacgaggtgggcaaatcacctgaggtcagaagttcatgaccagcctggccatggtgaaaccctgtctctactaaaaacacaaaaaattagccaggtgtggtggtgcagtggtgcgcgcctgtaatcccagctactcgggaggctgaggcaggagaatcgcttgaacccgggaggcggaggttgcagcgagccgagattgcaccattgcgctccagcctgagcaacaagagtgaaactccgtctcaaaaatatgtatatatatatatatatatttcttagagatggggtctccctatgttgcctaggctggtctcttaactcctggactcaaacgatcgatcctcccacctctgcttcccaaagtgctgagattaaaggtgtgagccactgtgcctggcaaataagctgacattttgcttgacacctcctgagccaaggacacagacacccgagagatgtccacaggctgcagaggtccagctcctgtgaccaggcagcagcctcagtggaagagcacatgttcctgggccctaccacaggctgatgtggagagtccctctgtttgaaaatgcccaactcaggccactcctgcccgggggtgactgtctcgcaataagatacagggccagaaggatccaggaacacaggaagagttcggcagggctcaacaggagaacagaaaagaactaaaagcagagacaccatgcaaacatgaggcacacatgcaacaggagacagagcaaactgcaggaaaaaagaagggccctgttagccacacaccggcctgtgggctacaagccctccagttacagagcatgggaaataaggccaggtcatgcctgtcctcacctttgagttagggccgagctgggcagagaatctgattgcccttccctccctcttcagttcctgcagatcacttggttcttttgtgttttttgctttttggtttttttttttttaagacggagtctcactctgttgcccaggctggactgcactggctcgatctcagctcactgcaatctctgcctcctgagttcaagcgattctcctgcctcagcctcccgagaagttgggattacaagtgtgtgccaccatacttggctaatttttgtatttttagtagagacagggtttcaccatgttggccaggctggtctcaaattcctgaccccaagtgatccacccacctcagcctcccaaagtgctggattacaggcatgagccaccgtacctggctggctttgggttcttgaagggaaaagaaaaagccccatggcagaccggacctgactgacgggcaggaaatcttaattccagacctgctttcacctcctcactgccggaacctggagccagggctggctgtctcagggcctctgcctaccattgccaggaactctctgttgccagtctgtatttggagaggctgaagggatgaaggtcctacctcactctggagccctccccacagggccccagcttgcacctcgtgcaccagctccttagggggcagtgtgcacccctggaaggactcccaaggtctgggacttgcgactcaggacagaccattccctgcagatcattcatctgccaatttaagaaatgggagagagacggaggcccgtctgcctcccctgccagctcctgctgattgctggtggctgcctcctgagttctggggtccctctcttgacagtggtaagagtgccaggaacggagcgcgtttgctgcacaccatttgccattggtgcatcgagcacactcccagctccaggattatgggaagacctttttggggtacagacttcccctccctgcaacaaagaggagctcttccatggcccccaccctgaggggcacaggaggtccacggcctggaaacttcctatttcctggggctggcccagggcttctagtctggccttccataaggcatgggccaggatgctggccctgggggcctctcagctcagccccacgtgcccctctgtggactctcagtctcacgtttgtcagggttctgccatttagaaatgatcagcccacctctagaccaagtgcctgcctggaatgtcctgtccaacttatccaccagctcatccttccgggcctaattaaggccccactccatctctgaagccaccccatgctcatgactctccctgacgcaggttcccgacacaccgggtgactcagctgcagtgtttttcacagtccgtgatgcgtcacagctatttataggtgtgcttaactccctgtgaggaagcacttcaacccccaaacgcaagttccagaaatatgctcataaagataaagatagagaaaagctctggaaaaatacacagtgctgttgcttcaggcagagtccgtgtgtgtgtgtgtgtgtgtgtgtgtgtgctttcactttttgcctcatacatctcattgtttataaaatttatcaatattacaaagttgtaaacaaggttatttaaaaacaacaaattggctgggcacggtggctcacgcctgtaatcccagcactttgggaggccgaggcaggcggatcacctgaggtcaggagtttgagaccaacctggccaacatagtgaaactccatctctactaaaaatacaaaaaattagccgggcatggtagcaggcgcctgtaatcccagctactcgggaggctgaagcaggagaatcgcctgaatctgggaggcggaggttggagtgagttgagatcatgccattgcactccagcttaggcaacaagagcgaaactctgtctcaaaaaaaaaaaaaattataaatttctacccaaagtcttgcacattcctttaatttattcataggtattttatagtttgtgttgccatgttagcagttacaaagtggctgggcacagtggctcacacctgtaatcccagcacttggggaggccgaggcgggtggatcacaaggtcagcagttcgagaccatcctggccaacatggtgaaatcccatctcttctaaaatacaaaaaattagccgggtgtggtggtgcacacctgtagtcccagctacttaggaggctgaggcaggggaattgcttgaacccaggaggcggaggttgcagtgagccgagattgcatcactgcactccagcatggtgacaaagcaagactgtttcaaaaaacaaaaaccaaaaaaacaaaaaacaaaaagagtgaggtcccctgagtcacatagcaagaccccatctctacacaaaatatttaaaaattagccaggcatggtggttcgtgcctgtggtctcagttacttgggaggctgaggcagaaggattgcttgagctcaggaggttgaggcttcagtgagccaggatggtgtcactgcattccagcctgggagagacagcgagaccctgtttttgttgttgtttttttcttttttaaagaaaataaacaccaaaacaataaaaagagtgaggtaggtaggactcatgtcccaaaatagttctccctttttagttttttaatttttaatttttaaagaaagtttcattctgttgcccaggctgggggggtggggtagtggcataatcgtagctcactgtaacctgaaactcctgtgttcaagggatcctcctgcctcatgctcctgagtagctaggactacaggcccacgtcaccatgcccagctaatttttatttttattttttgagatggagtctcactctgtcgcccaggctggagtgcaatggcgtgatctccactcactgcaacctccgtctcccaggttcaagtgattctcctgcctcagcttcccgagtagctgggattacaggcgcctgccaccacgcctggctaatttttgtatttttagtagagatggggtttcaccatgttggccaggctggtcttgaacttctgacctcaggcaatctgcctgcctcggcctcccaaagtgctgggattacaggtgtgagccaccgcgcccggccaattttttttaaatgtcttggcaagatggagtcttcctatgctgcctaggctgttcttgaaccattaaaatgatgtatttcaattatgtatatactatttatacatatattaggatatatctacatgtgtgtgatatgaatatatatacacattcacaagcacattataaatgtttgtatgtgtatatatacatacagtcatgtactgaataatgacatgtccatcaatgatggaccacatatgtgacagtggtcccatatactaccattttttttgttttgttttttgtttttgtgagacagggtctggttctgtcacctggggtggagtggaatggggcatctctgctcagtgcaacctctgcctcccgagctcaagcaatcctcccacctcagcctccccattagctgggaccacagggtgcatgccaccacacctggctaattattgtattttctagtagagacagggttttgccatgttggccaggctagtctcaaactcctgacctcaagtgatctgcccacctcggcctcccaaagtgctgggattacaggtgtgagccaccgtgactggccagtagtcaactttacaacaggcctaggatgggaggtgattgtccaaccaactttaactttactgtttgaattttaaaagaaaatacccatgtacttgggtattatttgtttgtttgtttttgagacggagtctgcctctgtcactcaggcgagagtgcagtggtgtgatctcggctcactgcaagatctctgcctcctgggttcaagcgattctccttcctcagcctcccaagtagctggaattacaggcgcccgccaccacacctggctaatttttgtatttttagtggagacagggtttcactgtgttggccgggctggtcttgaactcctgacctcaggtgatccaccccccctcagcctcccaaagtgctaggattgcaggtgtgagcgaccacacccagctgtacttgggtattattaaaaaaataataagtcacaggatggagccaggaagcctgaggcaggtgaacctatgaggcaaatgtcacgtgcaacaaagtgtaattggctctggcagccaaaaccaattggacatcttggtgagacagtctccaaatgtgtcacaggatataatttccaaagttataaacatgactgtctttaatgtatgtaccaaaggttacttcaggtgttaagaaactataatggtggaaacactagttcaaagggaactggagagactgaaatactcagaggcactgaaaaagcaatgctggaataagattgctgagttacatccaaaagtacctgctgcgctgcagggtaataagcccattatcttgggtcatcttttctacctgacagaagctagctatatcttatcaatctactcatcagagcccagcctcatcaatggtgaataagtcagagaggtgccatgcctagagaatcccaaaggtcatcctatggccaccttttgggactggtcttcattttgccttttcaaatttttttttttttttggagatggagtctcgctctgtcgcccaggctggagtgcagtggcgcgatctcggctcactgcaagctccgcctcccgggttcacgccattctcctgcctcagcctcctgagtagctgggactacaggcgcccgccaccacagccggctaatttttttgtatttttagtagagacggggtttcaccgtgttagccaggatggtctccatgtcctgacctcgtgatccgcccacctcggcctcccaaagtgctgggattacaggcttgagccaccgcgcccagctgctactcaatttctgtacaggaggtgtttatgtacagaaatccagctggaaggggacttgtggagatgcaaccaattcttggtgccaccactggtttcagtgaatagctttaataaatttggaccattattacagtaagttatcggagaagcagactgacccattcaggctccaaagtcaagtcccttcccagttcagaaggggaagggataggaaataaatgctcaaatctatcaaatttcaagagttgactgcagaagtttcacatcagataatctaccacttgagttttctggactggttggaagaaaataaatcattccttctgggtgcctgatctcggctcagcatctgctttcttctgggctgttgattttctgttgtaaatgtagctgataatgtgcaaacactaaaccctttaagttgaaatgttaggaaggcattctaaactgagccaaggcaaggtgctttactccctaatttggaagaatatgtaagtgataacataaagaacatagaactcagtattttccaagtaactaataaagtaattgttctgagtaaaagatctgggcaacttaccttcagggggctcagacatggacggggtgagacagtacatgtggtagccacgatcgcagtcatcacagaagagcaactggtcctgaagtaggcaagagggaagaggatggggactgaataactgatgtgcctcaggccactacaggacactgctatttccaagaggggtaggtagcaggtaagaacagatgtgagaatcttatgtgggaaaccatgctgcccctctccaccgcagatccagtcactgtcatttctcacttgggtcctttcagagctcctaattgatcaaatcacctccactttttttttttttttttttccctaaagcccaagctctatggtatatttttttgagacagggtattgctgtcactcaggctggagtgcagtggtgcaatcacggctcactgcagccttgacctcctgggcccaagtgatcctcctacctcagcctctcaagtagctgggactataggcacacaccaccacacctagctaatttttcaatgtttttggagagacaagatctccttacgttgcccaggctggtcctgaaatcccaggctcaagcaatcctcccacctcagcctcccaaagtgcttggattacaggtgtgagacgccgtgcccagtgactatttctttttgagacaaggtcttgctttgttgcccaggctagagtgcggtggtgtgatcatggctcactgcagcctcaaactcctgggttcaagcaatcctcccacctcagcctgccaagtagctgggactaacgtgtgtgccaccacacctggctaagtgtttattttttttgtggagacaggatctccctatgttgctcaggctggtcttgaattcctgggctcaagtgatcctcccgcctcagcctctcaagtgttaggattacaggcatgagcctccatccttgtccctacagtctaccctccacacggcacccaaagtcatctttttaaaatataagacaagggccaagcacggtggctcacacctgtaataccagcattttgggaggctgaggcaggtggatcacctgaggtcaggagttgaaaactagcttggccaacatggtgaaaccccgtctctactaaaaattagccaggcgtggtggcgggcgcctgtaatcccagctacctgggaggctgagacaggagaattgcttgaacctgggaggcagaggttgcagtgagccgagattgcgccattgtactccagcctggatgacaagagtaaaactccatcttgaaataaataaataaatataaaataaaatataagacaaggccagacatggtgggttcatgcctgtaatcccagcactttgagaggccaaggtgggaggactgcttgagctcaggagtttgagaccagctcagcaatatggcaagaccctgtctctaccaaaaatataaaaaagtagccagacatggtggtgtgcatctgtggtcccagctacccgggaggctgaggtgggaggattgtactgcttgagcctgaagggaaaggttttagtgagctaagatcgcgtcactgcactccagcctggatgacagagagactctgtctcacaataaataaattaatacataaagaataaataaatagctgggtgcagtggctcacgcctataatcccagcactttgggaggctgaggcaggcggatcaccggaggtcaggagttcgataccagcctggcaaacatggagaaaccccatctctactaaaaatacaaaattagccgggtgtggtggcacgtgtctgtaatcccagctacttgggaggctgaggcaggagaatcacttgaacccaggaggcagaggttgcagtgagctgagattgtgccactgtactccagcctgggcgacagagcaagactccatctcaaaaaaaaaaagtaaataaataaatacataaataaccatgtcacttcccgagtaaaacccttcaacagtgtcctgttgtacctagaataaaacccgaggccccagagatctggcagtgcttgcctctctcatctcattgcccaccatactctcccatgccctgtcatctggcttgtccaacataaggccttggcgctggctgctcctttcctgggattcctctacctccaaatcttgactggctccttggtatcaccaaaatttcaacaccagcatcaccctcccagaagagccatacctgaccatcaaaataaatcacttatgcaattattctctgccacagtactgatttcgtttttttcatggcacattatacaaatctcatttacatccttgcttattgttgttcctgtaagaatgtaaatctcatgaggcagggaccttgtttgtctttagcatctttagtgactagaacagtgtctgacataaaatcagcactcaatatatatctggcaacaaatcagagttctgactgagatgctagggaggggcgtgtggcatgtgggagggatcctgctccctttttaaaagaaagctcactttagagggaactgtgcaaacagcagtaaaagcccagaaggagccatgctgaggagggggcggggatacacacgtcattctcggaggtgccgcagatattgcaacatttgcactcgatgcactgccagcggtatgtcttcactgccgccatcatcacgggggtaaattggaggcaagatggatgccctgtagtgggggaagtgagtgagacagacagtcggaaatgcggggggaagagaggagctcctgcctgtggctacatcttctcttggttaggaaaagcgaggtgggctggttatgacagccctagaggccagcaagccaagagccccttggggactgggcaaagcagcagccttcacgggaagcagtacctgagcggccacagtcagaacaggacaccagctcctcgggttgtcccgtcttcttgttaatctttgagtcccccaggcagaagtcacagtagttgttgggcaaggccaatccatcaggaccctttttggctacagagagaaagagttttgatgacacccatgggggtccctgagccactcaacacccatgcaaggagtggttttcataaccaggccaacttctgcttgcccaccacttctgacacctcagcttacatttctgctcctcagacctctgggaaacaggagtgggtggttgagagtcttccttgtcctcgccctcctcctcagccaagtgggagtgggcatagtggtaactgaggcctggtcggttcttgtaacgttttccacaaactgagtgggaagaagattgcagagaaaggtgttaggatacaagagtgccatgtccccatccctgcaagctgtgggggctccacctgaggcagagggcaaccatcccttcccctagcagctccactctgggacaggccttgagtgacggccacttcccctcagccaggagcatcaggccgtggggctctctagcttctggggctcttttccctcctgaactccaaccccatggccaccactgctcttccatgttgacttttggggggcttagcccttgccccatcaccagttagttgctctgggatatactaacagtctgggacgctccaggtcaggaaagggaaggatattcctatatctttggggtggcaggaagggggaaaagtggataagactccaaacttttttacccctcagtaaatgtgggaggctcatgctaccccacacaccatggagcccatctcccctgaatgtgggtaaacaagcaggggatgggtttcttggggatagcctatcaatgaagccagttgggcagttggtccccaaagaaattcaagcacactcccatgtaattgccctgtccaggcctgccaatcagcaaggaaagcagatccccatgaggcattttgtcatcttgagaagtaataccaagaagggcaagggggccagcaggaaaggagtggggagagaggatggcaggaggaggtggtggggcagtggggaacatgagctgaccaccagctgcctggtctggggagggagcggaagggtctgattgtaatgggctcctgataatgcttctgaagccaccccatgcactgggccgagcagctctaggagcaggtttgtgggaaacaagcagtggtaaaggcagccttcaggactttgaggagtagagcacagcagaaattccactgctcctacccccatgccattccagagattttaaagctagcatcccaggaaatgagaaaggcaggaggaacaagggaagagggaaaaagggaaaggaaaaccacaagtctgaaaagttgagagagctacctctctggggcgctttcgaggtatgcttttgtttgaaactatctgaaagacagaaagaaaagtcatgagaagaaggccttgatacacttgagacaggagcagcagcagcaggaaagcagagcaaacgagagagaaaccccagcggcgatggtgctcccagggtggagggacagaagtggggcaaggcagacagaaagaaaaagagacagacgttgaaaaactcagtgtcagacccctggggccctggcttaactgaggccaggagacctgcaggccatctgttgagaggccaaccctgcctgctgtggcccccacaagcaaccctaccccagaggatggcagaaatctttcccagagcatgcaggtcccacccgtcatatagcagggacccaggcctcccaggggtctcagacggaagcagtcagcaggcaggacaagagcccaggtttgttttaatactctgggcaaaaacacaaccctccctcctctcatatccagagcaggagctgggtccaaggcaaggtctacccacccacttgtgaggcactcactgtcacaggcatagggcttatcccggtcctccaggatggaagcatccagcttcttacgggcactgcccacacccttaccctgccaagaagagcaaagagacacccttattttggtagctgggcctgaggagttagactcttttggaagtggccgctaatctcacttgaaataaaataaggaattccctaggccaccctgtcccaagatgcaggcagcacgctggcccctcaccttggatttcccctttccccgacgcttgggagtatcttcttcatagtcttcatcatcgaggtcatccaggaagtcatctggttctaggatccgctgagtggacaggagggttagcatgggtagaaatatgtgcatccaaaagctcccctatgatgagactggccaaggccacccagaacctcctctgtgacgtggtcccacccacaccagcctcattcctcaccaacgcctttcaagcatgctataatcctgctcctgctcccttccatactttgggatatctttcccctgtgcttcacgttatttccttagcctgaaatgctttccccaccatgccacatggccaaatcaaatagcatgcttccaaaaggttgccctgatgccacaagcagccatgccctctcctgcctctgattggccaccctgggagcacattattggtggttctgtcctgacactcgcctcctagtttaaattaaaatgttgtttgcttatttgtgtgaccttgtgggaagcttttttttttttttttttttttgagacagagtttcgctcttgttgcccaggctggagtgcaatggcgcaatactggcttaccgcaacctccgcttcctgggttcaagcgatcctcctgcctcagcctcctgagtagctggaattacaggtgcatgccaccacgcccggctaatttttgaatttttagtagagacgggtttcaccatgttggccaggctggtctcgaactcctgacctcaagtgattcacccacctcagccttccaaaggattgggattacaggcatgagccaccgcacccacccagcagacttttaaatattgttaatagttcagattttggagccagactgaaattaagtccctgcgctatagtttgtaatccatatgactttgaacaagttacataatcttttttttttttttaaatctcaccaaccagaagcagcaagttacacaatcttgaatcagttttcttttctgagaatggaaatagaacttactcattgttatgataatatatttcaaaagcatctagaagagtgacacggagtaagcaagtcacaatgttgagtcagacttgggatccaaaagtttttcagaattgttcaaatgcatctcctccctggagccaggaagattggagaagctggtgcatcagagccccacccttcttccggccttgtatccagctagtctcctgggctcttagcaaactgaacccagggcttttccacttccaggcctttctttgacctgttgcttctgcttggcccctacctggagtactgtttttctttcacctgttgagagtctgcccattcttggagacaaagggccctacttccggcgtctaccacaggcctgcatatgcttgtgctgaggtatctcaccacagatcctgcttccaccagtcggacgcagcggaccatggggtgtaggggtggggctcttccataaagaatgaaatcacgtcctttgcagcaagtggatgcagctggagttcattatcctgagttaatgcagaaacaaactcaaataccacatgttctcacttatatagtaagtgggagctaaacaataggtatacatggccataaagatggaaatgacagacactgtggactccaagagtgggaacagagcgggaggggcaagggttgaaaaactacatattgggtaccatgttcactatttgggtgctgggttcaccagaagccaaaaccccagcattatgcaatatatccgtaaaacaaacctgcacatggaccccctgaatctataatgaaaaaaaaagaaaaaggctggggagggtgtctcacacctgtaatcccagcactttgggaggctgaggatggaggatcacttgagcccaggagttcaagatcagcctgggtcatgtagtgagactccatctctattttttttttttattgatcattcttgggtgtttctcgcagagggggatttggcagggtcataggacactagtggagggaaggtcagcagacaaacaagtgaacaaaggtctctggttttcctaggcagagtgtttgtgtccctgggtacttgagattagggagcggtgatgactcttaacgagcatgctgccttcaagcatctgtttaacaaagcacatcttgcaccgcccttaatccatttaaccctgagtggacacagcacatgtttcagagagcacagggttgggggtaaggtcacagatcaacaggatcccaaggcagaagaatttttcttagtacagaacaaaatgaaaagtctcccatgtctacttctttctacacagacacggcaaccatccgatttctcaatcttttccccaccttgcccccttttctattccacaaaaccgccatcgtcatcatggcccgttctcaatgagctgttgggtacacctcccagacggggtggtggccgggcagaggggctcctcacttctcnnnnnnnnnnnnnnnnnnnnnnnnnnnnnnnnnnnnnnnnnnnnnnnnnnnnnnnnnnnnnnnnnnnnnnnnnnnnnnnnnnnnnnnnnnnnnnnnnnnnttccaaaaaaaaaaaaaaaaatctcagtggcacaatcttggctcactgcaacctctacatccctgactcaagcaatcctcccacctcagcctctctgggactataggcacacgccaccatgcccagctaatttttgatttttttttttatagagacagggtctcactatgttgcccaggctggccttgagcattccttgcgttctggcctcctgaagtgttgggattacaggcgcgaaccaccatgcctggctgagattcattcatgtccttttgtggtaatagttcttacattgctgtttaatccatattactgctgatgggcatttgggttatttccagtttggagctattacacataatgctgttacgggctgggcgtggtgtttcacgcctgtaatcccagcactttgggaggctgaggctggcagatcacttgaggccaggagttcgagacaagccaggccaacatggtgaaacccagtctctacaaaaaatacaaaagttagccgggcgtggtggtggtgcctgtaatcccatctacttgggaggctaaggcatgagaatcgcttgaacccaggaggtggagtttgcagtgagccaagatggctccacatgtactccagcctgggtgacagagcaagaccctgtctcaaaaaaaaaaaaagaaagaaagaaagacatgttacgtcgccgaacaacaggtactctctctatatagaaaacagtatatatagtgtttctctgacagacaggaatcacggagtaggaattttacatgcacattcttggaatctcaactctgcgctctggctgatttagagcttttaagacccaagggaataatgcttccaccagggggcgcagtaagtttctctaaatcacgatcagatcgtccgtcagtaggccatatttcgctccacatgccactgggcaagaaaataaaaagcgggtcccactgttggctggggcgatcaattccaattgtaaagcttaagattgctattacccagtgggggcagggagaaaaatccgaggaactcccctgggatggctcttaatattttattcgggtaggtaaggggagataggctcctgattagatacttgattccaaccttccctctgaagacaaattaaaaaaagaagaggaagtgaaaaaaaaatcttaaaagcattgaaaagctaatagtacagtgaagaattattgtgccaacattgaggaagctaaaacccagagaggtaagttcagcttttgaagcagtttttgtcctggaggcatttactgatctggaagatataaccatgaagttaaactgttgtttggcagtctttgtggggagggacgaaaataaaaacccagagcttgctcaaagtaggaagtcagataccccactactgacacgtatgtgctgtaagatacaaatcaatttccatggacttatagttcagaatcctattatctgtttggtccaggaaagggggagaggaaagctcagccttgaacttggattaaggtggacccattttttttttctttttttttttttctgagacggagtctctgtcgcacaggctgagtgcagtggcacgatctcggctcactgaagcctctgcctcccaggttcaagcaattctcctgcctcagcctcctgagtagctgggactacaggcacgagcaaccatgcccagctaattttttatatttttagtagagacggggtttcaccatgttagccaggatggtctcgaactcctgacctcatgatccaccagccttggcctcccaaaatgctgggattacaggcgtgagccacccctcctggcccaagatggacccatttttgaaatgttcccagttacctgacaaaagcagcatatttggtaccaagtaacatccttcctgaaggaatgtactgtaatcctaggcctcaaattatttctttttgttgttgttgttgtttgttttttgagatggagtctcgctctgtcgcccaggctggagtgcagtggcgtgatctcggctcactgaaacctctgcctcccaggttcaagcgattctcctgcttcagcctcccgagtagctgggattacaggtgcccaccaccacgcccagctaatttttgtatttttagtagagatggggttttgctgtgttggtcaggttggtctcgaactcctgatctcaggtgatccgcccacctcggcctcccaaagtgctgatattacaggtgtgagccactgcgcctggcctgtagcttctccatatattattgctcttcttgctgtggtctctcctgttgcccagtctggaatgcagtggtacgatcttgggctcactgcagactcgacctcctgagctcaagcgatccttccatctcagcctcccaagcagctgaagctacatacatgtaccacaacacccagctgaattaaaaaaagaaaattgtgtttttgataacagagtcttgctctgttatcaggctggagtgcagtggtgcaatcttggctcactgcaacctctgcctcctgggatccttgccacctcagcctccagagaagctgggaccactgttgcacacccatgctcagctatttttttttttttggtatttttagtagaggcggggtcttgctatgttgcccaggctgtctcgaactcctaaactcaaacagtctgcttgcctcggccttccagagtgttaggattacaggcgtgagccactgcactcagttagtatatttttaatagatttttttttttgagaaggagttttgctcttgttgtccaggctagagtgcaatagcatgatctcagctcactgcaacctctgcctcccagattctcctgcctcagcttcccgagtagctgggatcacaggcacgtgccaccacgcctggctaatttttgtattattagtagggacggggtttcaccatgttgcgccaggccagtctcaaactcctgatctcaggtgatccactcgccgtggcctcccaaagtgttgggattacaggtgtgagccattctcctggcctttaatagattttaattcttcattcttctttatttccctctgctcctgtacatagggtgtattggtagtaattaactttacgatacgttcatacggttgccaaaatgttgagatggatgataaggggattgccggagggatggacatcatcccagaaacgctagacttgggagtggatatgattaatagccagaccttgacttgtctcccctcgggagagatgaaattttttttttttttttttgagacggagtcttgctctattgcctgggctggagtgcagtggcatgatctctgctcactgcaacctctgcatcccaggtccaagcgattctcctgcctcagcctcctgagtagctgggattataggcacccaccaccacgccccggctaatttttgtatttttaatagacacggggtttcaccatcttggccaggctggtcttgaattcctgacctgacctcaggtgatccacccacctcggcctcccaaagtgttggaattacaggcgtgagccaccgtgcccggccgagtgaatgtatttttgacagaaagagggatagactcactatactacataggccagatatgttgttgctgttttttgaagacagagaataggatatagatgactgttgggcatgtaaaacagtgcaccgcaggggcatttgtcattttgttgattgtccaacaacttctctgcctattttggggaattcctttgtaggtgtttttgtgccgtatagtgtctagataagccgaagtgggaaggtccttctctctaccttagctactttgttttttttgggggggagggagggtttgggtttttttgtttttttttgagacggagtctcgctcttgtcacccaggctggagtgcagtggtgtgatcttggcttactgcaacctccacctcccaggttcaagtgattctcctgcttcagcctcccaagtagctgggattacaggcacgcagccaccacacctggctgatttttgtatttttagtagagagggggtttcaccatgttagccaggctggtctcgaactcctgacctcaggtgatccacccacctcgacctcccaaagtgctcagattacaggcatgagccaccgtgctcggcagctaccttgtttgaaggcggtatcctgagctgctaatccaatgcttcagttctgttgcctagttccctttctccaccccaacagggcagaccagccccgagtggtttcccagggccctgtggctggtgcctgatgcagggtgagttgagagcactttggggacccaggacaagaatctcctccttccatggctactccggcctcagctcaggtccagggtgagttgctgtcttccactgggtgaagctctaaggatggtgtccttttttcttgtcttcccctccccagagagcaggagataaaccactgaagtgctgaggggccccacaggtaagaaggtgctggcccttcagttccccgaccctctgtcttcacaaacgttaccagggcctgaagctgaacccctgtagggacagagagatgcagtcaaatacaggctgttggggtcccacagacctgggtttaaatcccattcctgatagtatatcaaatctccagtctccatatgatgacaaaaaattcaagtgaaaaacaaaaagttagccgggagtagtggctcacgcctgtaatcccagcactttgggaggccaagatggatggatcacctgaggtcaggagttcaagaccagcctggccaacatcatgaaaccctgtctctactaaaaatgtaaaaaattagccaggcatggtggcagttacctgtaatcccaactactggggaggctgaggcagaagaatcgcttgaacccaggaggcggaggttgcagtgagtggagattgcaccatagcgctccagcctgggcaacaagagcgaaactctgtctcaaaaaaagaaaaaaaagggaaacaaaaacataaagtttggtgggaatgtaaattggtatagacacaatggaaaacaatatggcagttcctcaaaaaattaaaaatgtgatccggccattccacttctgggtatttacccaaacgaactgaaagcaaggtcttgaacagatatttgtgcacccttgtttatagcagcactattcaccatagctaaacggtacatccagcctgagtgtccatggacgaacaaatggatacacaaagtgtagtatatacatgtatacaatggaatattattcagccttaaaaaggaaggccattgggacatatgttacaacatggatgaaccttgaggacatgatgctaacaatgaggtacttagagtagtcagatttatagagacagaaagtagcatggtggttgcagggactagggggtggggagaatgggagctaatgtttgatggagacacagcttccgtttggaaacatgaaaacaattctggagatggatggtggtgattgttgcaaaataacgtaaatgtagttaatgccactgaaatgtatacttaaaatggtaaattttatattatatatattttaccacaataaaaaaaaaaatgcgggctgagtgcagtggctcatacctgtaattccagcattttgggaggccgaggagggaggatcacttgagcccaggagtttgagaccagctagggcaacatggcaaaacctcatctctacaaaaaataaaaataaaaggctgggcacgatggctcacgcctgtaatcccagcactttgggaggccgaggcaggaggatcaggtcaggaaatcgagaccatcctggctaacatggtgaaaacccatctataccaaaactacaaaaattagccgagcacggtggcatgtgcctgtaatcccagctactcgggaggctgagggaggagaatctcttgaacccaggaggtggaggttgcagtgagcgtgccactgtactccaccctgggcgacagagccagactcagtatcaaaaaaaaaataataataaaataaggccgggcacagtggctcacgtccataatcccagcactttgggaggccaaggtgggcagatcacctgaggtgaggagttcgagaccaacaagacaaaatcctgtctctactaaaaatacaaaaattggcctacaaaaattagctgggcaccgggtgcggtggctcacacctgtaatcccagcactttgggaggccaaggcaggaggatcacaacatggccaagatggtgaaaccccgtctctactaaaatacaaaaaattaactgggcgtggtggtgcatgcctgtagtctcaactactcgggaggctgaggcaggggaatcgcttgaacccgggaggcggagattgcagtgagctcagatcgtgccactgcactccagcctggcaccagagcaagactccatctcaaaacaaaaacaaaaataattagccgggcatggtggcaggcacctgtaatcccagctactcgggaggctgaggcaggagaatcgcttgaaacaaagagatgggggtttccattaacccaggtttcacccccgcaatccaacctgggcaaaaaagcaaaaatttttttccaaaaaaaaaaaaaaaaaaggccaatgtgtgagtctcactgagctaagatcaaggtgaggaggtgagggcagggctgtgttccttctggagcctctagggtagatagggtagaacctgtttccttgtattttccagcttctgaagcagttccttggtttggggcctctgcctccatcttcaaaggcagcaacacatcatttctctggcccttcagtcatcacatctctctcttttttttttgagacggagtctcgctgtgtcactccagctagagtgcaatggcacaatctcgactcactgcaacctctgtctcccaggttcaagcgattttcctgcctcagccccccaagtagctgggactacaggcacgtgtcaccacacccagctaattttttgtatttttagtagagacggggtttcaccgtgttagccaggatggtcttgaactcctgaccttgtgatccacccgtctcagcctcccaaagtgctgggattacaggcgtgagtcgtgagccaccacgcccggcctatcacatctctttctctgtctcctgcttctacttttaaaaacccttgttattacactggcccacccagatacttcagcataagctattttaaagtcagctgatttgcaaccataatttcattggcaattttcttttttttcttttttttttttttgagacggagtctcgctctgtcgcccaggctggagtgcagtagcgcgatctcggctcactacaagctctgcctcccaggttcccgccattctcctgcctcagcctcccgagtagctgggactacaggcgcccgctacagcgcccgctaccgcgcccggctaccacgcccggctaattttttgtgtttttagtagagacggggtttcaccgtgttagccaggatggtcttgatctcctgacctcatgatccacccgcctcggcctcccaaagtgctgggattacaggcgtcagccaccgcgcctggcccccaccttcttttaaagtaatccagacacatggtaaaaaatttcaaacacagctgggtgtggtggttcatgcctgtagtcccaacaatttgggaggctcaggcaggaggattgcttgaactggcctgggcaacgtggcgaaactgtctctatcaaaaactccaaaattagctgggtgtggtggcgcacacctgtggtcccagctactcaggaggcggatgcaagaggatcacttgagcctgggaggttgaggctgcagcgagctgtgatggcaccacagcacttagactgggcgacagagtgagactctgtctccaaaaaaataaaaaaaaaaattcaaacaggttgagtgtggacatgacaaatcgttctctgagccctcctactcctgacccctagcccttggacacccgtccccagaggcaactactattactagaaacattctaaggggcaatttgaaggggcctcgagtcctcaggaggaaagtggaccttcaagggaagaagctgccaggaatcaggagtgagtatgccttttccccctattcgctgggaatcaggagtgatggtgccttctcctttttccccttgtgccacccttgtgccctgttctgtggtaggaggcaggtggtgggagggcagggtccccaccctgttgaacagggccaagcctgcctgacggaggcaggtgtacccctcatccacccctgaaaggcacttcctctgaagcaggagcggggctaggggtgcctctacccagcagcttttctcactctttgggtggggcctgctgactcagcacgaaaatgctcagcccaaaatgcttcagcccctgggaagatctgggagcgatgggagtgagcagagaagatggggcttggtagggtcctgctggctgctgggcagaagcctgggatctcagggagcagtgtgcaggggccagggtcagcaaggttatgggcagcagctgtccctgagacctcccaggggcccctttgcctgggcagctgcagggcctcagctgtcaggcaggctctgggtggggaggagcctagagccccgggaagaggcggggcaggatggaggaattcagagccagcggcagtccagctgggtctgagggcaggccagccccctaggcccctgggcatttccagggctgacccacgaaagcagcagtaggcatggtcgcttggggactgaagacccagaatgaccaatgacggtgacagaaggtcccaaatgcctgaatgcagctgggagtcttgccatgaacaaccatgggtgtcttctggtctctttagccagaaatccagcacctctctgttgccatccctcttccctcccctgcccccaggccagtcccacccttttgccttgttgatcagtgatgctaagtgcaagtgctggccagagtcctctccatggtgcggatgttgcccatccatctctcggccaccctcccagcacccagttctgtggcttttgactgcagtgactcccacatctacccctccaacgcccatgtctcactggagtgctgcttccagtattccaatggcccacttggtgcccctcttcctcccgacctgccccaacagacccaggcccctcccctgagcccctctcccctcaaaccacccctttgctacatgctaccaggtactgaggctgcacctgggactcctcttaagttggtccttgttgggtggtcagggtgaggcacagggggtgggaggcaaacccttccaagattctctggggcagaaagaatcaggtccaaatgccttagcaagacttcacaatctggctctgaagcaccattccgggcccatcactgcctcccttccctttccctcttttcttttacccctctctcgccctctgtccctcctccctccctctctttgccttgtcttccttcgtaaatctaaagcccctccccattcctaggaacatacccaagagaactgaaaacaggtgttcacacaaagcttgcacacaagcgtccactattcataatagtccacaaggggaaaaacccgacagtggatgcactgataaaataccgtatagccatacagtgggatcttagccataaaaaagaatggcggactgatacatgctgctgcagggacaaaccttgaaaacatcatgctaagtgaaacaaacctgacaggccgggtgcagtggcttacgcctgtaatcccaacactctgggaagccgaggtgggcggatcacttgaggtcagtggttcgagaccagcctgggcaacatggtgaaaccctgtctctactaaaaatacaaaaatcagttggcacggtggcgggtgcctgtaatcccagctacacaggaggctgaggcaggagaatcgtttgaacccggaaggtggaggttgcagtgagcagagatcgtgccactgcactccagcctgagtgacagagtgagactctgtctcagaaacaaacaaaaaaacaaacaaacaaaacctgacagaaaagagcatgggccaggcacggtgtctcatgcctgtaatcccaacactttgggaggccgaggcgagtggatcacctgaggtcaggagttctagacacacctgtaatctcagctactcaggaggctgaaccctgaggtcaggagtttgagaccagcctggccaatatggcaaaaccctgtctttactaaaaatataaaaatcagccaggtgtggtggcaggcacctgtaatcccagctactcaggaggctgaggcaggataatccatcgaacccgggaggcagaggttgcagtgagccgagattgcgctactgcactccagcctgggtgacaagagcaaaactctgtctcaaaaaaaaagaggatgtattgtatgattccatttatacaaaatgcccaaaataggcaaatctacagaaaagaaattagattaatgattgccaggggatgggattagactgctaatgggtgcagggtttcctttggggtgatgaaaatactctggaattagatggtggcgaggcctgcacaacaccatgaacatactaaaaaccactgaatcatacactttaaaatgggcatggtggctcacgcctgtaatcccagcactctaggatgctgaggcgggtggatcacttgaggtcaggagtttgagaccagtctggccaagatggcgaaaccccgtctctactgaaaatacaaaaattagctgggcgtggtggcaggcgcctgtaatctcagctactcgggaggttgaggcaggagaatcgcttgaacctgggaggtggaggttgcagtgagccgagatcgcgccactgcactccagcccggacgacagagtgagactctgtcggggtggggttggtggagtgagaaatcagcgcagatggctactcccagcagtagtgaagcagcaaggccaggttgagctgggccgggtgccctgaggtcaaaggaaaggaaaccccaagccccagtggctgcagaaggcagagctggatggaggatccgcgccatggccctgccggcccccaaccttgggtgcccctcgaggccctaattccctcgctgcattcttggcacccacttgggttcccaggaacagcaactaggagtggcttctgttccctcagcagctctccctctccctctcagagactggaaccctaaagggaagccacgaggcgggtaagggagggcggctccttctgccagggcagaggcagggcaagggcatgggcatgggaggcaaatcctggcaagagctcgggactatttcttcaggaccgtctagttggtgtctcaagggcaggggccatgaccagatcagggagaggccaccaaagggggctgaggcagacgggcctgacctcctgggcaccctcccaccctccgtcactgacacgcccccagagcctgcttgagaatacctgggatgacagatgcctggggaaactggtgacacagctgaagtggggtctagggacggtcagccagcagtcacttggcaccttcctgacaagagcaaaaaggaactgtctggtggcagaggcacgcctgccagacctgtctgctctggtgttagcatcccgctttctctttgtctgactcttaaatgcctgctccggccctcccggccctcccagatcatttccaacagtcacacgactggtatccaggcaaccattgcctgggctcccaaaattccacatccggaggctgacaagtcatggtgcccccgtggaacacagctggctgcttcatgtgtggaggagctgggggagaacggaaaaatccactccccacgcagggatgagtttctaattcttggcctcagaggaggtgcctataaaactaatgaaataaaacagctgctccttgtgtttaaaggaagaccttttactgtaccctggtcaggtctggggctcgattccatttcaccgtcagaaaggtgagaggcaaaagttggccactgttaggtcatctatttatctcggagtcaaggcatagacaccagcagcttgctgcccccttgcccacttccctgccctgacagctggggtttgccggtcttggctctggcatgtgaggcaggacagcctgccagcttagggcaggaagccactccacgtctggccagtgacagcttttccccagatgccaggacataggggcatgggacgtgctgtgaaccctggaaggcctgaccctgtctgagtgttctgggctgcaggcaagccctggctactgcgcgacttggcaaagcagctgccaccaggactccagctttggaacagcccagcgaggcggccccctccagatggagaggtcaggctgggaccacagcatgcatgtgaggaactgcgcagggaggcccaggcatgcagccagttgcttgctctgcagcccagctctagggcccacccagtgcacctctgcagcatagaggtcactggggcctttgggggatgaggagtggggctgagagttacccactggacaggactggggctggatagaaacccagtgtgactgacactctgccttctctggacataggtcaaataggcaacattctttgtctactaccaggataaagaaaatagaagaaaggggccgggcgcggtggctcacgcctgtaatcccagcactttgggaggctgaggcggacagatcacaaggtcaggagatcgagaccatcctggctaacatggtgaaaccccatctccactaaaaatacaaaaaattagccaggcgtggtggtgggtgcctgtagtcccagctactcaggaggctgaggcaggagaatggcatgaacccgggcggcagagcttgcagtgagccgagatctcaccactgcactccagcctgggcgacagatcgagactccgtctaaaaacaaaataaataaataaaagaaaatagaagaaaggtcaaactcagaagtcacactcagaatttaatttctccaaaagttgtttctgtgtttgattcatgtagaacatcacaaagccttctcgccttttctgagtgggcgggatccacagctggcttacttctggacacggagcatggactgagaagcaagagcttccttccaggagaggcaccactcagaggcaggcccggctgcacaagtcctccctgctgggcctggtcactgcagctgcccctccctggctggctcctctctcctttcccacccaactgtttcaccttgctcaaaggctatgtcttggctcttggctaagactttaagggcccacacagcagagaacagcagaggacagaagcctcagatcctgacgacctgcacagcaatgcatgggctctgcctctctgccccgtccgctgccggcctcctaaggtagagtcgggcgaaggtgcctcccacctgccctttggtaaggcgcccagggttcacacagacacagccgaggacatcctggggaggagaggagaggtgacaggtttggagagcctcaactaactgggaaccaatgtgaaaaagaagtgccatcacatggctggaccccaaagagggtttagaaaatggaaacgaaggcaaccaaatcaccagacacattttcagtcactttttttttttttttttttgagatggagtctcgctctgttgcccaggctggagtgcagtggtgagatctcagctcactgcagcctcgacctcccgggttccagcgattctcctgcctcaggctcccaggtagcttggattacaggcacccacaccaccatgcctggctaatttttgtatttttagtagagatggggttttaccatgttggccaggctggtctcagactcctgacctcaggtgatccacccacctcggcctcccaaagtgctgggattacaattgtcaaccactgcgcccggcctcagtcacatatgttaacttgtcactagaaagctttgaattccttttaagtctttcaaacagaagaatgaggtgacttggcagaatgacaatcagctcctaaacttggagacaaacctgatctagctgtttactgctttctcatgtgaaaaacttttttttaacctcttgagattgaactaactcttgtttggcaagagggggactggtctaggcagattccttgtaagggacctaactccaaggcaggcagggctaaagggtggcagagatcaaaatgacccaatagcttcttcaaggtattcccagctgagcccacttggaggtcatatcagaatttgggaggcagaggacaggcaagtgtacatatgaaatcttccccaggtcacctctatgtggcctggtgaaagccctcatttgagggccttcctagtcatctgggctctcgttctcttggggagggaggagaggacactgtttactcaagcattttactgacagagttgtttgttttctggtcccaccacctccccaaagaaacaaggccacagggcagggtgctagaggccccatccccatcagctgacccatgaggggtgagtgccgggtggtctagaagggaaagtcaaagactgggttctggtgtttctgggaaaaagcagagttcaaacctaccttcacgaagtacctcagctctgacgggatgatgaggacatctggggtgacaggcagctgtgcgtaaacatagaacgactcatagtcaatggccatgtcttcttggggcgggtagagtgggtagtagctacagagacagagagaaattgtcagcactagctgaccggggggcccccttctcagacagagtccccctaggtactggctttcgtgctgctggcatccacagaccgactttttctctgtgtgtgtggggcagaatgcaggcttgtcatcacagggtaaagttccctgctggtagcctggtgaaggctcttacagtcatgcttgtcatagctccatgaccccaaggcactctctccacagtcaggggtcccagcggcaagctcacctcctctgggtcaagatgtgcttgagtattcggctgaatctgtctgaagttccggaagaactgggaaagaaaagaaagcatgaaaacagaactctgtttttcagcccatttctcttcagggaggactggagaatttaataaaccagagagaaggtaaatgtccaaggcacagcaacaagaggaggatgcctctggggaagtttaaagacccacccacaaggagct

SEQ ID NO: 1324 - protein, 1385 aa, Homo sapiens [sequence omitted]

SEQ ID NO: 1325 - DNA, 13582 bp, Homo sapiens
  source
  (1)..(13582)
  CDS (201)..(311)
  CDS (1074)..(1398)
  CDS (1897)..(2019)
  CDS (2318)..(2434)
  CDS (2579)..(2866)
  CDS (3926)..(4045)
  CDS (4134)..(4260)
  CDS (4436)..(4694)
  CDS (5476)..(5616)
  CDS (7261)..(7446)
  CDS (8463)..(8722)
  CDS (8796)..(9162)
  CDS (11182)..(11604)
  CDS (11686)..(11929)
  CDS (13228)..(13382)
  modified_base (56)..(155): a, t, c, g, unknown or other
aggccagccccaacccgggactggagcaccaaggtgttgccgcaaagcgagggccnnnnnnnnnnnnnnnnnnnnnnnnnnnnnnnnnnnnnnnnnnnnnnnnnnnnnnnnnnnnnnnnnnnnnnnnnnnnnnnnnnnnnnnnnnnnnnnnnnnncgggcagaggcccctgacccgtgtccaccatctcgcagccccaggatgctcccctgcgcctcctgcctacccgggtctctactgctctgggcgctgctactgttgctcttgggatcagcttctcctcaggattctgaagagcccgacagctacacggtggggacagtgagggccgctggcctgggacaggaagggtagggaggaagagaccgggacccagggtgactgctgccggggaagtcttcctcccctggctggtggagagctgggggccattgtttggagcaggccggagggtggccaggctcaggccctagtcttggcctggccagttggaggagatcttagggtgaccactggccacttctggttcccttccaggaatgcacagatggctatgagtgggacccagacagccagcactgccggggtgtgtgtgcctgggggaccaaacacccccaggaacccggaaagggattgatagctgctttccaagggacagccccacctccaagaactgccgtgggagcccagcagcccgttctatgcccagctctgctacacagaggccagctctggctctctggaggccagttgagctaggggtggcctcatcctctcccagaaacccaggaaaccttgtccctacccctcagaggagctggatcctgtacgccttctctgaaccactctcctgtcccagctctttgtctcatcacaacctgggagggtagcgtccccaggggtgggtaaggaggccccccatcttgggctgagctagggctagggccgtggggagggatagagacccacttgcaggccgagaatgagggcaacagtgggaacagctgccccatctccagccttggccaaccctggggaggggtcctgagcaggcagacttagcttgttgagcagagtgggaaggctttgctggggccacacatctcagagaaggccgagctgggttcctgcctccgctccctccagggccagcccaggagactggctgtgcccagcaggcccctctctgcagatgtcaacgagtgtctgaccatccctgaggcctgcaagggggaaatgaagtgcatcaaccactacgggggctacttgtgcctgccccgctccgctgccgtcatcaacgacctacacggcgagggacccccgccaccagtgcctcccgctcaacaccccaacccctgcccaccaggctatgagcccgacgatcaggacagctgtgtgggtgagtggggactgctctggtgcctggcttccagtcctctcaccaggcgtcttaaactcagacctcatgttcctccccagctcaaaagggccactggtgatgtccacaccctcatccagacactcatgttgtttaggacctgccgcaggtggccccagcttgtgtgccactgctccagccagctccgggcccctcccctcggttgctgcagagacactgcaggaagtctgccttccagtgtctgtcccctgggagccacaggccttggaggaaggacagtccaggaatcagtgttgctggggatgtttggacaggaccttatttcctgtgcaacccccaacatgtggttttagaggttaggggtgcctttcctgatggctccaggctggtgaactcttacgcgtgctgttgagagaaccgaatacaagtgttggaactatctgtcatgttgggtggtgtgcgggatcccaggcaggggctgagtggtgtctctcgcagatgtggacgagtgtgcccaggccctgcacgactgtcgccccagccaggactgccataacttgcctggctcctatcagtgcacctgccctgatggttaccgcaagatcgggcccgagtgtgtgggtgagtccaggaagcagcttctgtagtcccggctttgtgtccctggtctggcccttgccctagcacctgacccccattcaagccaggcttcacccccggcccctgccacctcaccctccgtcatcagacacagaggactgtagcggggagtgtttgggaggtgtcctggctgaccctgcctaattcagctcctcggacacaggattatgggtggtgaagccttgagtcccagccggctcgagcccacctgccctctgccctctgccctccgccctccttctcctgcctctatccctagacatagacgagtgccgctaccgctactgccagcaccgctgcgtgaacctgcctggctccttccgctgccagtgcgagccgggcttccagctggggcctaacaaccgctcctgtgttggtgaggctgggctgggccaggctcctgggtcctgggcagggaggtgtgaggtgggggcgctcccttcttgaccagcccaggtagagtggaggctctgggctcctcctccgctttcatccctcctgtttttcctggcacccccagatgtgaacgagtgtgacatgggggccccatgcgagcagcgctgcttcaactcctatgggaccttcctgtgtcgctgccaccagggctatgagctgcatcgggatggcttctcctgcagtggtgagagctccatccctgctgtgtactcctctgtggacccccaggccctagctatgccgtgcctcctgccacacagttctccatttgaggcctccgcctcctgtcactgtgcacccagctgcctcctgggtactcgaccccggctggctgtggagcactcccaggctagtgggggaggcacaaggagaggcagctacgtccttactgaagcctactggtgagactgaggatgtgggtgccacctgtcccacatatcaggctcacctgcatttacctgcatttgaattttgcactaggacaagtcactcctctctgagcctgtttcttcttctataaaatgggttgtcttgaggattaggtgagagtgtgatagatgggctccagcaagtctcaagctgcagtgctttaaagtgaatgaactgccacttaatgagaacctgccctcgtagtgtattccctgacacacttggcctccttcctctcaagaatcctaggaggtatgattttctccttcctctacaaaatgaggacattcatatctccctccacgtttgttgggaggattacataaaaataatcacaaagtcctgggtaaatggtgactttcatgattcagctaagagaggttaagtgacccgcccaagctcatacagccaggatgagatggggccagggctggatcccagacttcttacaccctgtaaactggcatgtaccccctatgttatgctttgctgcgggatgaggcctcactgctacctggcagcatgaggggaacaagagaaaggaaatgttctgcctgtgaagctcacagttagttggaggtgaccactgggtgctcaggttgactgtgggttgcaggaattgggcgttacagcacaagccagacccataagactcatctagtctaacacactcattttactgattgggaaaatgagattcccctagatcagctggtgggattcacacccaagcctctagattcccagtaacttatttagtgtttcttccagttctgggcagagagaagtctgtgagctgcggcagcctgggcaaactttctttgaaccctccatctcccggctgaacttgtggcttgtctcatccccctctgtcttcctacattcagtctaacatggggctgggccttcttgggaaatgtttgtgggactgaatggtgaggaatgcccttgacccggggtccccatccccatgcttcctcagatattgatgagtgtagctactccagctacctctgtcagtaccgctgcatcaacgagccaggccgtttctcctgccactgcccacagggttaccagctgctggccacacgcctctgccaaggtacaggttgcccgggtgggatgggcaggacggtgtcaggagctggcagcctgacgcccccgattccagcccctctcccctggcacagacattgatgagtgtgagtctggtgcgcaccagtgctccgaggcccaaacctgtgtcaacttccatgggggctaccgctgcgtggacaccaaccgctgcgtggagccctacatccaggtctctgagaagtgagtcaattcgatgccaggcccccacagaaactacgtctcccagggggctttggggctgactggcatctattcagaccagcgagtgcccctgagggatgatgggaatcatagtccttcatgaaaaccagtcacaggggtagaagggtccttttgggattccctccctttgtagggtaggagaaattggggggacgggcaaggagctcatttgtgtcccccacctcggggtctctagccgctgtctctgcccggcctccaaccctctatgtcgagagcagccttcatccattgtgcaccgctacatgaccatcacctcggagcggagcgtgcccgctgacgtgttccagatccaggcgacctccgtctaccccggtgcctacaatgcctttcagatccgtgctggaaactcgcagggggacttttacattagggtaaggtttctgcaaccctcaactgacatgcacaatctaaaactgaactccaggacgccttaagggggaactcggccaggctgctatgccccacccctcccccaaagccccgcccccggaggcggggtttctgcaggaagacgggggtactctaaatgcaattctaacggttaaatgcaattctaacgaagcactcggacacgggagtttgagtcctggtactggttttccatattgatctcagtttcttcacccacaaaccaagggaatggcgtgtgcagggccctggggtcagaaagtccactccttgctagtggatctgttaggtgggagggggccaggggcggctcacagtgagctgctcacagtgactggcagccgcatgcatgggtctcagcaggagaaggggtttgtctagtaccagcccttctctttctttttgaaattgaatgctctgaagggagtctgctcactttgggtcaccaaaggtcccaccagtcccaagagccacatgtggccttgaatcgtcagttagcctgggtcagacagagcaggctggagagggtgagaagagccccagcaggagatttctgagggcaggagcctgggtggggaggagagacatcgagggtgtcaaagagctgcatgagaggctggggtggcagcctggccagggctgttcctctgcctcacggccacggggcagggaggtgacgctggggcaggggcctagcacacaggctgacacaatatatatgtccccccacccactgccctgcagcaaatcaacaacgtcagcgccatgctggtcctcgcccggccggtgacgggcccccgggagtactgtgctggacctggagatggtcacatgaattccctcatgagctaccgggccagctctgtactgaggctcaccgtctttgtaggggcctacaccttctgaggagcaggagggagccaccctccctgcagctaccctagctgaggagcctgttgtgaggggcagaatgagaaaggcaataaagggagaaagaaagtcctggtggctgaggtgggcgggtcacactgcaggaagcctcaggctggggcagggtggcacttgggggggcaggccaagttcacctaaatgggggtctctatatgttcaggcccaggggcccccattgacaggagctgggagctctgcaccacgagcttcagtcaccccgagaggagaggaggtaacgaggagggcggactccaggccccggcccagagatttggacttggctggcttgcaggggtcctaagaaactccactctggacagcgccaggaggccctgggttccattcctaactctgcctcaaactgtacatttggataagccctagtagttccctgggcctgtttttctataaaacgaggcaactggactgttagtggttttcaatcttttcttttaggaagttttatttatttttattatttttattttcccaatgagccctctgcactcctaaggaaattttatttgatgaggaccaactggtgacataaaatagattccaagctgcaatgccccactgactccatctccctgaccagggaattccaggtgctaagcagctttgtttaaaaaccactggaccagatggtatccctggttcctgcgtatttcacaaggtccccagggctaggcatcttctacatgacacatatggctgcaaacacttagattctaattgtaccccaaaagatgttgttaaaaggctggctagcctgggttgggggacagacgggggctgggggctgtttcacggcataagctcaggtcaaggggccgtagctgcagtagagctgggataaggtcctgctcagagcaggccccagattcctgcaggaagagaggcagcgagggtcacgccctgggcctagggcagccccagtccctgccactccctccaggttccgtctcttgccctcacctctgtagacgcccacacttaatggtgctcagcagtgtctcttgttccttgggggtggcacaggcatcataggcggccaggaggctggggggcaggggtttgagtttctgaggctgacagtggcccactctgggccagcaccatgaggggccaggcagaggggtcagcatgggatggaagagttgggacactgccccacttcctgagcttggcactcaaggccccatgccagccgggctgtcctccctccctgtgggaactctggggcaaaaccagcaaaggctccaaaccttcaccctcactccccttaatggcccaaccccttctccaggaagcctcttctccaccaggtgggacgtctccctccctcctgtggcctccactacctgggacactatgtgggcctgctggcttcctccccacttgacctccacgagcaccctgggatctgtctatctctggtctgcagagcccacacaaggccaggccccctccacgaagcatggattaaggtgaattccatgcatggagggcaggggctgaggacacctaagggccctttagggcctacctggcaggggtgctgtatcgatccaccagggctgctgccttctccccactcactccgcgcacctgcatcagctgccgggcaaacacttctcgcaccgactgggcctgggttcgggaaagggctggatcagtgggggtctgggccaggccatgtctgagaagctaggcagagacagtaccttattcttgatggctcctgcgttgaagtcactgaaggtgaggagtgagcagagagggtttggagaggtcatggcccctgattcagggttcccaggggttccccaggggcggctgcgtagggtgtggccctgagggaagaagggactgaggccaggctggagctcgaaggaacaactccagccagcccctgcccagtcctcagccttggggggccagcctgagaaatggggatctcacccaccttgcttcttttggggatgcacagggcccaggcaaggtgaattccttgtgggctctgtcccgacactgggaaaggggcctctgctcacctggtagagtctctgcaggccccgcgtcaagagggccaggtaggcggctgactccttaatgtctgctgtgcgcttcacaaaaaagccatcaatgacctggggaagaggacccaagagagggaaggtggctcctggcctagaccatgaaccatggaccacaggggcccctgcctgcctgcctggccctgccctcccagctcacctgagtgttggtgacagcctgcagcagtgtgctctcaggaaggctgaggttgtggacggaaccatgctcttccaccaggtatacccggcgctccagaccacagcgcttcagccggaactagggaagtgtacagagtggacagggagggtcaggctggatgaccacatgcctgggcatccatgatgtcacactcaaaatggtgccgggaccctgttcccaccagttagcctctgcatcctccctagcctctccacctgcctcacaggggcctccgcagctttgctcatgctgacactcttgtctagaaagccttttctccatctctcaacactgcccatccttcaagcctcccctgggccggcacatggcctctgtgactaggggtccacccagcagcaagtaccaaggtacagcctctgtatttccactcctggaggtttatgccttgtttatccaagactgcaggggctgggtacccaagaggtctttaaaatgctcctgacctcagcccaagaatgcaggtacctggcttcctactgtgcgcctggatgggcctgtgggggtctgatcctggagcagccacagggtgggtgtggctggattccaaagggctctgcctcaaggaggctgccagaagtgcccctggattgctctgggctgaaaacggggcttcggagcaggcagggaagcctggcaaagccagcaaaattaccttctgctcccggaagcggccgtcgatgatgctgctgcaaaggtcatccagtcgcttgcgctccacaatgtgatccagtaccaactccccagggtttgctgctgacaagccagccgttagcttgcgatcccctacccaccaggccctgcccctggtgccagcctgtccacggcccttcacctgggtctctaggattggtctcctgggccacccacacaaaatctccaacgtgcagcttgcgcaccgtgtgggtcacgtgcagccgctgtagctctcggagcagctccggcctgtgcccgcccctggagtggcaaggagggaagcctagatcagagcagggcagtgcctaccccccagcctcctctgatcatctccctcgtttctccccacctcactcacccccgggtctcgccaatgtccacacacaacagcaccctgtactctccaggcctcagctccagtggctgctgctggacccctgcttcactggcactaagtggggggtgttggtatgtgaggccagaaccccttgtgccagggcagttgccccacacccatgccacccgacacccaccacccacccacagtagggaggcagccacagttcagctgcaggtgatgggttggggcggggctttggcctcatttcccatcccctcctccctgttttccccactcctctgccctcctcctcacagctctgctgaagctgctcctggcactgctgtctcctccccagggggctccttgggcccgatgcccacattcagcaagctcaggccttctgactcggccaacttctgggccagctccaggccctctggggtcaatgagtacctgggaggcagaggggacaacacagctctaccttcttcactcattcctggcaggctttcctgcctgcccccagctgggctggcctcaccacccccttggcgccctgcacaaatgaccccagtggctcctgctcctcctggtcttcttggctcttagagcagttccttgggcctgctcagcgccattctcaggtctgcaagaagtgtgtctcagacaatttccttcctcctgtcttcactaatgctgtttcctcctcctcggaatacttatcctgcatctctacccgccaaatcctaaaacgtgtcaaatgctatctcctctgaaaaggctttctcctcctccaataaccaccgcaccctcccacccccgctgctgcggtttcacaccctccaggtattccaacagtgggggctcctgaggaaaggcccaccccccccaatctcaacagcatcagctctgggagttgttgggtgactctaaggccctactaagaagttcactcatgctctcctgtatctcctgcagttggccccacctggctggctggtgtgtcctgaggaccaggttcctgtgaaggagggagcggagggctggccagggtcgagcactcccaggggctacctgtggatcagaaaagagaccctcagagagcacctggtaccaccacaagtccatgttccctgtgtccccagccatgggccacacatgggcccactgcaagaaaaggcagtctttggtgggccccagagccacttgggcctgtcctccctgatccctgtgctcaccctgggggacttctgagcacacctctgcagcagctcctccttggttaagaagtggtgaccattaggattctgaaaccaaggtagaaaagacagggtaggctcagtgccagggcccctcctcatcccgctcaggtggctgggataatctttgcctgccctgcctgggccaggcccctcggggaacctcccaccccactgccatggttccgcctcccggtgtagcccagtgctcaccaggtgctcccggtagagcaccagcagtatcactcgggctcctgagtgccgagctggccagtagctgccagagcctcccgctttgggctgggcaggaacctgaaaggtacagaggagttctgaacatgaaagccagccagtcatctttgaataagtccccagcaggctttgtggccctgggtaagtcactcagttgtctctcagtttccttctctgtaaaatgggccaggtgatgggatgatccgctgcaaatctgggataaaacagcaggcagtttcggggcagtgggtgggggtgtctgcccagcctggcctcacttctaccatgcgctgcaggacaggtgtaattagacaggaaaactcaataatggtgaccccgtaactaactgagctgggatccttaagtagcttgatcatggaattctctcattggctgttaccaatatttctattcacaggttaaaatactaagtcgaaaagaggataagtcatttgctcaaggccaggcatcactggtgagatttggactcaggcttgccaaatcccccaagccagaaaatcatactcccgcactcccactttgccttccactccccttgccccttcctcactggcatggaagagtcctggacttccgcaagtcgcccctgcggggctggactgttctctccagatggtgagtccggggcatggtcacctgcgggagagaaaagagttaactccacactccacgaatccggcagctgcgaggatctgggatgcaacctactcagatggttacgtgagaccggtgagggaggctcagggagcgccagccactagccctaggccgaacggcaactgggacaggagtggggagcttaaaagccaagggctcccaggagagtacggaggctccacctgggggaggtgggggatcaccgacccctttccgaggcgctcaccgcccgatgttcggtgccgctgcagccgctcgtccagcatccggcagagcccgtctccgaagtgctgtagggatcttagcttccttcccgctgcgcagcggcagtgggtaccgtcggagggaacgcagcgccctggcccgggcaggggtagggtacctggtcagggcaggcctgacctggccagcagcttttcccatcgggccacgccaggacccaccttctgaaatacgaagcgcgtgcggcgcctgctgcgggtcgcctcgtcccgccactcggtcagccagcgaacgaagagcgggttgggacaggcaggcagcgggcgcttccggcccaggcggaccggggccgccatgagcccgagggcgggtcctccggcgctccacgcccgcgggactgggacgccgccagttctggagtcgggattcgaacacctggcccagggcggggcgggggaagagggagaccgagggcaggaccgttgagatcacggggccccaaacacagggggcactaacgagaggagagcctgcggccgccctcccacccctgcgctgctctaagtggttggtcaggggcgctgtctctaacgatcttttcccttggctccactccagccagcctttgagacgcgccctttcccagcccccggagcctggaccggctccttcctgtcaccccagattcgagagcggggtctttgtgtaggcgagaggaaggcggacagcgccccctgtgacggggaggactggctgggcggcgcttaacggactaacctgagcttggcggctctaaggtctcttaagattgtcagcttcagcctcaagcttgaaggaggctggagatggagactggtcttgaaaagagtccaggagaggcgggggctaggagacaaacgggtgcaaacgtattggtgggagggacacccagaaatgggtgccggggatgaggacacaaaggtaaggcaggaggagctgcaggacccttggaggaaatggtgatcctcatccccgggatacagggcaaagagtgtgtggtggagaggaagtcggggacgtgccgagaaggcccaaaatagaactcggaatgtcgggggtcagaggcctagaggaaggaggactgtaagtaagaggtgcttgggcatcctggcagttggggaggcctgagatgggcacgcggttgggtttgggagcggaggagcaggctgcgggttaagaagcccagacacaggtagaggggagaacacttcgtcatttttgtggctaatcggaagtgggagaccctcagggaggttgaagatggaaaccctacaaagggcttcaacctgagaagcctgaaagacacgtatagctgagttggacacaggcgacccgccagggtttgaagcagcacccggcctctagctgctatgccggaagtcgcaacacgcaggtctccagcctgcgaggaagggagaggtgggcgccagagctccagtcccgcccctcaggactgtgcctagcccacggcgcagtagccccagccaagctaaattggaccaatgggctccggctcccgcctcccgcccgccgcggccttataaggagcctcaagccggctgtcgggctggccccgccccctcgagtctcttgtcctaataaggacatctagggcatcccgcggctgggggcgggcgagagcgcgtctccagggtaactgcgaagcccccctctctctccccgttgctcttggaaactctaaggctcagaaaagggggcgctagcctcatattcatgtagggtcgctcgcgggaggcggggtcaagctgctgtctccacctggagcgccgggagtccgggcgggggcggtgctgtggaatgtccccgactacaacccccggtatgctctgcaaggtaccccactcccaggcatcgctctccgtttacacccttaattccgtttataggattagggcccccagttccctttctgggtttgcctctgacttgtttgcgacccagtcttttcctgcagagtgtgaggctgtggtcactgttctagaacaacaaaatcatcccggagtcccccgctcgtttctttttttttttaaggcatatactaccacagaacttgtctcagttttgcggatgttag

SEQ ID NO: 1326 - protein, 1081 aa, Homo sapiens [sequence omitted]

SEQ ID NO: 1327 - DNA, 946 bp, Homo sapiens
  source
  (1)..(946)
  CDS (201)..(746)
agaactgctgcatggtgacagagttcatccttttgggaatcccacacacagaggggctggagatgacactttttgtcttattcttgcccttctatgcctgcactctactgggaaatgtgtctatccttgttgctgttatgtcttctgctcgccttcacacacctatgtatttcttcctgggaaacttgtctgtgtttgacatgggtttctcctcagtgacttgtcccaaaatgctgctctaccttatggggctgagccgactcatctcctacaaagactgtgtctgccagcttttcttcttccatttcctcgggagcattgagtgcttcttgtttacggtgatggcctatgaccgcttcactgccatctgttatcctctgcgatacacagtcatcatgaacccaaggatctgtgtggccctggctgtgggcacatggctgttagggtgcattcattccagtatcttgacctccctcaccttcaccttgccatactgtggtcccaatgaagtggatcacttcttctgtgacattccagcactgttgcccttggcctgtgctgacacatccttagcccagagggtgagcttcaccaacgttggcctcatatctcttgtctgctttctgctaattcttttatcctacactagaatcacaatatctatcttaagcattcgtacaactgagggccgtcgccgtgccttctccacctgcagtgctcacctcattgccatcctctgtgcctatgggcccatcatcactgtctacctgcagcccacacccaaccccatgctgggaaccgtggtacaaattctcatgaatctggtaggaccaatgctgaaccctttgatctataccttgaggaataaggaagtaaaaacagccctgaaaacaatattgcacaggacaggccatgttcctgagagttagtaagagcagataaatgg

SEQ ID NO: 1328 - protein, 182 aa, Homo sapiens
MGFSSVTCPKMLLYLMGLSRLISYKDCVCQLFFFHFLGSIECFLFTVMAYDRFTAICYPLRYTVIMNPRICVALAVGTWLLGCIHSSILTSLTFTLPYCGPNEVDHFFCDIPALLPLACADTSLAQRVSFTNVGLISLVCFLLILLSYTRITISILSIRTTEGRRRAFSTCSAHLIAILCAY

SEQ ID NO: 1329 - DNA, 1843 bp, Homo sapiens
  source
  (1)..(1843)
  CDS (201)..(652)
  CDS (920)..(1393)
  CDS (1514)..(1643)
  modified_base (361)..(460): a, t, c, g, unknown or other
tttatgtgtcttttaagtcattattttatgaactggtcttattctaactggatcattttgttactttctttggatgggccattctaataagcgtagttcctgactgcgaactatgcagataagaagttctagacacaatatgaaaatccaggtgcatacttgcactaaataggcatgctcctcctttttactaaatctaaatggctcagtctcaggtcttggggaaggctgcatggccggggaccaggcggtgtgccgctcgggcagttagtgggccgggcgagcctgcggggctggaggggacgcggggctgggaggctggggagctgggggctgactccgggcgggcggggcggggcannnnnnnnnnnnnnnnnnnnnnnnnnnnnnnnnnnnnnnnnnnnnnnnnnnnnnnnnnnnnnnnnnnnnnnnnnnnnnnnnnnnnnnnnnnnnnnnnnnnaggcccccagcgcccagccgcgtcccggctgcgtcccgccgcgtcccgccccgccccgccccgcagagccgccgccagtagtgggagacgtgcgctgagaggcgggggctgcgctcggcggaacagcagccctcgggcggagagcggggccggggtccgagagcaggtgatgccaagagctgagcgggactcgtgagcgcgcggttcagcacctaccagggcgtcccgtaaaaaacctcgccttcgcctgtctctgggaaccataggtaagctttgggctttcgaggtgcagttctaggtagagctccgtgctgggaggtgggaagggggcttgaccctggggactcaggcagtctggggacagttccaccaggggccggtgcctagaattggtgagggaggcacctcaggggctgggggagaaggagcgagcgctcttcgcccctctctggcacccagcggcgcgcctgctggccggaaaggcagcgagaagtccgttctccctgtcctgcccccggcgacttgcggcccgggtgggagtccgcaggctccgggtccccagcgccgctggccagggcgcgggcaaagtttgcctctccgcgtccagccggttctttcgctcccgcagcgccgcaggtgccgcctgtcctcgccttcctgctgcaatcgccccaccatggactccccgatccagatcttccgcggggagccgggccctacctgcgccccgagcgcctgcctgccccccaacagcagcgcctggtttcccggctgggccgagcccgacagcaacggcagcgccggctcggaggacgcgcagctggagcccgcgcacatctccccggccatcccggtcatcatcacggcggtctactccgtagtgttcgtcgtgggcttggtgggcaactcgctggtcatgttcgtgatcatccggtgagcgcggggacagcgcagcgctgggggctgggcggggcagggagtgagggtcaggccccgccactggagcagcagtgggggcagccagccaggtggtggggactctgttccgtgaaggatcctggaaatgctacagggtggcttcctagaagaggtgaaggattttctgggagtttttggtggagtgctgagaggttcacacaggcgaatccgagcggccaggggcgtctggaagatttcagagtaaccccccgaccccaccctagggcccagtgtttctgctgaaaactctatgcgcagggcaaggtgccagggtgctgacaacagggtcaggggttcctggtaaaggaactaatccatttgcctgcgccagtttggagcactttgttatgccctttgcaaatatttcttaagataaatttcaagcccacccaatgcactgaagat

SEQ ID NO: 1330 - protein, 351 aa, Homo sapiens
  MOD_RES (54)..(87): Variable amino acid
MAQSQVLGKAAWPGTRRCAARAVSGPGEPAGLEGTRGWEAGELGADSGRAGRGXXXXXXXXXXXXXXXXXXXXXXXXXXXXXXXXXXGPQRPAASRLRPAASRPAPPRRAAASSGRRALRGGGCARRNSSPRAESGAGVREQVMPRAERDSGAPAGRKGSEKSVLPVLPPATCGPGGSPQAPGPQRRWPGRGQSLPLRVQPVLSLPQRRRCRLSSPSCCNRPTMDSPIQIFRGEPGPTCAPSACLPPNSSAWFPGWAEPDSNGSAGSEDAQLEPAHISPAIPVIITAVYSVVFVVGLVGNSLVMFVIIRILEMLQGGFLEEVKDFLGVFGGVLRGSHRRIRAARGVWKISE

SEQ ID NO: 1331 - DNA, 10102 bp, Homo sapiens
  source
  (1)..(10102)
  CDS (201)..(227)
  CDS (467)..(692)
  CDS (5061)..(5177)
  CDS (9577)..(9902)
  modified_base (729)..(730): a, t, c, g, unknown or other
  modified_base (733)..(733): a, t, c, g, unknown or other
  modified_base (740)..(741): a, t, c, g, unknown or other
  modified_base (743)..(743): a, t, c, g, unknown or other
  modified_base (746)..(746): a, t, c, g, unknown or other
gcaccctgcgtaagtgcttgtccctgtgccccaagtcttctcctccagcagtgtgtgttgccagccctcagtccctggtccgaggggcagacggggggccccagttcctcgtgtctcacctgcacttctcctctcagccctctgctccttcggctgtgggagtggcatctgcatcgctcccaatgtctgctcctgccaggatggagagcaaggggccacctgcccaggtaactggggatgggaaggggctgatgggaacagatgaatgagcattgaggttatgtcctgggcagtgggcacttgagatgtgtcctggtgtctcagcttcagacaactccattaggtagacattttgtgcccattttatagatgaagaaactgagacacagaagttattgtcttgcccggggtcacacagctggtaaatggcagagctggatttaaacccaggcctgtttgccttcagagctaccctcccaacagaattcaggaggaccctggtgaagtggggatggttgggactgccacggggtgcatgctcactggtgtgatgcctgctctagaaacccatggaccatgtggggagtacggctgtgaccttacctgcaaccatggaggctgtcaggaggtggcccgagtgtgccccgtgggcttctcgatgacggagacagctgttggcatcaggtgtacaggtgagacgcctgggagtggtgggggagggggaggggnncancgggaannanatntcctccccctcctgccaggatggtctccagtgtattgcaaggctaagctgagccaagataggctctgatgtttgagagtgggcagagagacatgagaacaaaagaaatgtgtcacttctgttattttacaattatttattgagcacttcttaggggcaggaactgagctagggactggggttatgggagccacagttggtccctgttagggagttttttttttttttttttttgagacgaagtttcactcttttgcccaggctggagtgaagtagcatggtctcagctcactgcagcctccacctcctgggttcaaatgattctcctgcctcagcctcctcagtagctgggattacaggcgggtgccaccacacccagctaatttttgtatttttagtagagacagggttttgccatgttggccagggtggtctcgaactcctgacctcaggtgatccacccacctcggactcccaaagtgttaggattacaggcgtgagccaccgcacccagccccattagggagtttctgaatatgaggaaggaagacaagtaacaggacaagaacagctccattgtcatggggaccttcactgggaagggcaaggtgccagggcccacagaggggcatggaacccagagttgggagggttggccaggggaggctccttgggaaaatgacatttaaaagatgagggacgctaaactcaataattagtttgtgaatgtattatttgcttgtgatttttaaaacatttctacggacaaaatctgttaccttccccagaaacagtcactgtgaccagtttcttgtcaatctttccagagcgacaaaagcctttttggagttttaacttcgtaaaagtaatatttctccccctgaatagaaaagcaagagatagttcattgtagaacatttggaaagtaagaggagaaagatgaaaataagcattctctggaagtccccacccggagatatttgttactaaaatgaagttttttttcctgcccttttccctgggtgtgtctgtgtttgtgagtgtgtgtatgtgtgtgtatgtatgttaagcatgcagcatatatgtatgctttataaaactgggattatatcttatctgtagcttttattatttttcccatctaactttatgttgtaggcatcactaacaattccttgcaacataattttttttttcgctaggcttggtggctcacgcctgtaatcccagcactttgggaggccgaggcgggtggatcacttgaggtcaggagttcaagaccagcctggccaacatggtgaaaccctgtctctactaaaaacacaaaaactagctggtgtagtggtacatgcctgtaatcccggctactcaggaggccgaggcaggagaattgcatgaacccagcaggtggaggttgcagtgagccgagatcacaccactgcactccagcctagcgacagagcaagactgtctcaaaaaaacaaaaagaaaaaaaatttttttttagcagttacatatgtggttgctgtaattgaaataactatttgtctgttgtcccttatttaagaggtttgcagtgtttcaccagtataaataatgctgccatagggccgggcacggtggctcaccgctgtaatctcagtactttgggaggccgaggtgggtggatcacgaggtcaggggttcgagaccagccatgaccaacatggtgaaaccccgtctctactaaaaatacaaaaattaggtgggtgtggtggcgggtgcctgtaatcccagctactcaggaggctgaggcagaagaattgcttgaacccgggaggcggaggttgcagtgagccaagttcgcgccactgcactccagcctgagtgacagagcgagattccgtctcaaaaaaaaaaaaaaaaacgcgccataaagaggcttcctgtcagcttctctgattatttcccagaaggacgctgttgggtccaagggtctcaataaaggggtcttggagctcattgcttgttgcagcatctcctccagataggaaaaccaatggaagcaattgatctgctcctgaatgcctttcaccttgggacattttctgcacgtatttctcattgcagaggcaaacggaaccaaggaaaagccagagaacaatgtcaaagcacttgcaggacagggtggcactgactgtagccacgagacatcccagtggaatggggttagtcagagtgggcttcttagcggtgttgagcatggtcttgacggtccagctgttgggaagagtgggtagctgctgggtagaaggctaagtaggggataaggagagtgggggtgtcccatgggcttgggggccacagtggcgaggctcactacacagtgagtgcagattgagtagactgagctgagcccgtaggtcctcagaagctgctgcggatctttggcagggaagggatggcatgaagcatgatttggggaaatctgtctcccagctcctatcatccctcagatcagaacatctcactaggctcaccttcgtaaagtactacttggatttagtcactgcaacttagtctcatcttttttttttttttttttttttttgagacagagtctcactctgttgctaggctggagtgcagtggtgcgatctcggctcactgcaacctctgacttcctggttcagcgattcttatgcctcagcctcccaagtagctgggattacaggcacgtgccagcatgcccagctaatttttgtatttttttttagtagagacggggtttcaccatgttggccaggataatctcaatctcctgacctcgtgatccacccacctcggcctcccagagtgctgggattacaggcgtgagccactgcgcctggccttagtctcctcttaatccatatcttcagtcctgtctcctgctgcctcaaaaggaacccaagcttcagctactctgggcctcagtacagtttgcaaggagcccagctgctgcctggaagcacctcagaccctttctccacctgggcagtccttctcccgatactcctggtcctctcagccagtcgctcttccagggcatgcctgcctgggccagtctgtcactggtggggcatatatcatcccagcaggcactgttctcccctgggtgtgtgtcttggctcctgtgttatcagaccgtgaacatctggagtcagcgctgtgtcttagttagtcacatttgcgtcctcaacagcacccctctgggtctgctgcacgcagttggtgctctatgaacctttaagagaatgactctgttgattatttaatcaacctccctgtccactgccctctgcccgtttgagggccctttggggttgccctgagggccagggccattggaaacgtttggtctcagccgtcttctctcgtcatctgatcttcatgggttaaagggggccccagtcccttggcctcttccttcctggggtttcctcatagccagtgaccttcctggtgtctgctcttttttcctggggtgcaggtggggattccatgctgctgagggcaggcttggtgtgggctcagggtccttgtggggttgatttgttcctgagtcacagtcatgtcagagagggccgtgcaagggagatttcttttcttttctttttttttctttcttgagatggagtctcgctctgtcgcccaggctggagtgcagtggtgcgatcttggctcactgcaagctccgcctcccaggtttacgccattctcctgcctcagcctcccaagtagctgggactacaggtgcccgccaccgcgcccagctaattttttgtatttttagtagagacggggtttcaccatgttagccaggatggtcttgatctcctgacctcgtgatctgcccgcctcagcctcccaatgagctgggattacaggcgtgagccaccgcgcccggccttcttttttttcctgagatggagttttgctcttgtcgcccaggctggagtgcaatggcgcaatctcggctcaccgcaacctccgcctcctgggttcaagcgattctcctgcctcagcctcccgagtagctgggattacaggcatgcaccaccatgcctggctaattttgtatttttagtagagacggggtttctccatgttggtcaggctggtcttgaactccgacctctggtgatccatgggcctcggcctcccaaagtgctgggattacaggcgtgagccaccatgcccggcctgcaagggtgctttcttcccagacactgacaaatgtgtaagttcctcttgcgaggaccactgtgtaaacacgtgctttctgtctttccagacattgacgaatgtgtaacctcctcctgcgagggccactgtgtgaacacagaaggtgggtttgtgtgcgagtgtgggccgggcatgcagctgtctgccgaccgccacagctgccaaggtgagctgcagagaaggaatggctgctctgggaggggtaatggggatgccacattgaacactcagccctgccatgcccagtgcagtgtgctctgtgtgccactgcattgaaccttcaccaccggcttcggagggagatgctattatggttcctgtctgactgatgtggagactgaggcttgcccaaggccaagtcgttagtaagaggtggagtcagagtttgaatcccagcacatctaacagttagaaccgactgctgctggcctggtgggttgactcacatctgtaatccttgcactttgggaggtcaaggcgggaggatcacctcaggtcaggagtttgagaccagcctggccaacatggtgaaacctcgtctctactaaaaatacaaaaattagccaggcgtggtggcgagcacctgtaatcccagctactcgggaggctgaggcaggaaaactgcttgaacccagcaggtggaggttgcagtgagccgaaattgcaccactgcactccagcctggacgacagagtgagacttcatctcagaaaacaaagtacctgctgctgctgttgcaggataaagggatggtgatggaggagaggccgtgaggagagccagggcagagtgggccgaccaacctggggaaggaggccactgagatgagggagggccgggagagactcaggccatgagtcccgaggagccatgggaggggcataccgggatggggtcattcactgactacattcatcagtttcacctgccccactgctggcccaggctctggagctaccctggggagtaggatcccccaagtctgatggggagcagaagaacaagcttaggatgagggataagtgttgggaaaacccagggaagagaaggaatcctacctcttcagtttgcaggatgagagatcttacaattattactcattcttttaaaatgccttttatttacacattatggaaagaatctcacaaggccgataattgtgacctccccctgaatcttacattattattttctttatgtttgacattttcataaattatgagaaaaaatttaaaagccatggtgctagcccaggccctctttcccactgctgccctctgctctccctggagaatagcctgcgcgtcttagtctgcttgggcggccatgataaaattccacaggctgggggcttctaccactgacattgattctcatagttctggaggctgcaaagtccaagattaaggcactggctaattcagtttctggtgagggctcttcctggctttcagaaagcagtcttcttgctgtgtcctcacttggagagagagctctctggtatctcttcttcttcttttttttttttgacatggaggaggacagaggacactccctctgttgcccaggagtgcattgttgcaatctcagttcactgcaacctccgcctcctgggttcaagcgatcctccaaccctcccaagtagctagggttacaggtgtgcgccaccacgactggctaatttttgtatttttagtagagatgaggtttcaccatgttggccaggctggtcttgaactcctgacctcaaatgatctgcccgccttggcctcctgaagtgctgggattacaggcgtgagccacccagctaggcctctcatgtctcttcttaaaaggacactaatcccatcaagagggcacaccctcatgacctcatgtaaccctaattatcttcttatctacttatcttacctgcatatcttccaaatgccattacattggcggttagggcttcaacacgatttttgaggggacagagtttagtccatagcactcaggcattggtctgctgtgtgccctccttgcccctccccatgatgtgtacgtacgtacatgggcacttacagagataggatagttgctgaactctcaggtcctgggtcctgggctaagcactttacacgcattttctcctttcgccctcacaattacccagtgaagttggtattatctatctccattttattgaaaggaacactgaggcttaaggaaattgttacttgcttaagatcccattagagctaaggtttttttcttctttctttctttgttttttttttgtagagatgaggtcttgctgtgttgcccaggctggtctcaaattcctggccttaagctatccttcccgctttggcccccaaagggctgggattccaggcatgagccactgcacccagccagagttgggatttgaacctagtcattcctttgcttgttccccttacccctgcccaacgttggtcttgaagatgtttccacatcagggtaaatagacttgccttgttccttttaactgctgactctgcagtgcaaatatttcatagtttactaactcttctcttattgatgaacatggagattatttccagtttttcacaatttcaaacagcactagggaacttttacagaggaggttccactgaagctgagttttgaagtatgagtaggagttttccagccagacaagagggaaaggcattcgaggcagacagagaacatgggcaaaagtggagcaccaaaagagcgtggtgcatttggaagatggcaagaatttaagccagtggccaggtgcagtggctcacgcctgtaatggaggccaaggcaggtggatcgcctgaggtcaggagtttgagaccagcctgaccaacatggtgaaaccccatctctactaaaaatacagaattacccaggcatggtggtgcatgcctgtaatcccaactacttgggaggctgaggcaggagaactgcttgaacccaggagatggagaccgcagtgagctgagatcgcgccattgtactccagcctgggcaaaaagagcaaaactctgtctcaaaaaacaacaacaacaacaaaaaagaatttaagccagagtgaaggtcaggggcaaggaaggaggtgggcaaggcaaccaggactgtgttcaaaggcatcgtgagctatggggcggcattgctgtcttaccctaagatgaggtctgtggcctgtgggagcagcggagaggttttgagcagaagggccctgattagaaatgccctttggtcagaacatcctggaggctgtgcagaggatggcttgaaggaacctaggtagagatagacacactggaggctctggctattctccagactagagatgaatgtggccgggctaaggggtagcagtgaggatgagagacgtgggctggtccagagagtatttaggactggatgtgggcagtgcagaagaggggcagctaaggtggttccccacagccctgtgtgtataggagatggagatgagggaggaagaggggaccatatatttccaaggttctgttggggaaatgaaccccagtcttgtcccttttcctgccagacactgacgaatgcctagggactccctgtcagcagagatgtaaaaacagcattggcagctacaagtgttcctgtcgaactggcttccaccttcatggcaaccggcactcctgtgtaggtaaggcggggaggaccctgtggtctgcacacttaggctgccaatcaggaggatggacagggagcccagggacccgggaaggttaacaattagactttctggtcctctggagcttgaaggggcttgagcctttggctcagagcctgcctgtccctggggttggtgtggctctgcatgaagaccctgtcttggacttttcctggccatttgccactttcatcctgttatgtttctcttccgctcctctcccagatacaccccaaggattcctctctgctcacccattttcttggctgcctttgctccccttggtaaataaagcacgttatgtcttggttcctctggtttagaaggagaccctgttttctcagcccattagcagaaatttccagaaagggattggcatgtttggtttgagcttggctcatgggtttaaggtggggtcccatgggcctgaaaaaagaccttgttctagcggagttaggtatttgtcccgaagccttccttcagcagcccagtgagttttgagacttttttcggaaagaaaaacgggagggtggaaggtttggagatgagcttctcattggggcttacccctaccacgcagcaattaattaccgctgcatagtgctggggctgagtctctgatactcgcattaaatacctgctcgatgtgtgaacctattaacaagacaagcactagatttcagccccgctcccagctgtctgagtcacatcccgcacctcggggcaggcatggaccctgtaagaacatggcagagaaactccccaagtgttttgagctaagggatgggcggaagaagggctccgtagcccaaacaaagcagctgtccgcagcgaggctctcccgcagatgtaaacgagtgtcggaggccattggagaggcgagtctgtcaccattcctgccacaacaccgtgggcagcttcctatgcacatgccgacctggcttcaggctccgagctgaccgcgtgtcctgtgaaggtgagcgccaggcccctccatcccggcggctggccacgccccctcagtgcctgccccagctacgcccccccatagcctggcccctccccgtcacgccctcccggcgcccagccacgccctctcagctcctggccccgccctaccccggccccgcccacctggcgctaggctccctttctgctctgcccttgttttgagttcatcttgtttgttactttcaacactccactttcttcctcgctttctttttccacttctttatccattcttccttcttcttttcactgtttccccagcccttctgtttttttcccaaatgataaaaggataaaacccaacaggagtccgagtatcctgggctacagggacagccatttccgtggttcgccctgccaaa

SEQ ID NO: 1332 - protein, 231 aa, Homo sapiens [sequence omitted]

SEQ ID NO: 1333 - DNA, 13240 bp, Homo sapiens
  source
  (1)..(13240)
  CDS (201)..(261)
  CDS (1594)..(2145)
  CDS (2900)..(3044)
  CDS (3937)..(4080)
  CDS (7221)..(7364)
  CDS (7667)..(7833)
  CDS (10614)..(10746)
  CDS (12968)..(13040)
aagggaagcaattggttcaggcaggggctgaggcactgaggcacagccagatgtggatgggcagctggggaggagtcataagcagtccttaaatcctggtatgttttaaattagctacaaactctgcccccaggatatcagcaaacacatcctctctgtgcaaactgaaagtttaaaaggggaaatgaatgttgagcttgatgcagaagaggtgggagggacctggtccacctggtggagctgagaggagcaagaactcaggtgggaaatagggaaagacactgcaaaggagaggtggcagggacccagctcccaaccggggggccagagggcagagcccaggaggtgatggacggcagagagcaccgccaaggtctgaggtgagctgggcacagaccctgggcaagggtttactcatctgcttggagagtcctgcagccccttgcaggggcctgggctgagaccagtaagtcagatggcctgaactgatggcacttagatggaggaaaagtggccatggcagggcaagtctctttgagttggcctgttgctctgtctccccgtacttctttttttttccttttcgagacagagtttcgctcttgttgaccaggctggagtgcagtggcacaatctcagctcaccgcaacctctgctccctgggttcaagcgattctccagagccaggacaggtgtaggaatgctcttcccaggctgcctcggtttgtacagccatgagcagggcatgcccagtgctgtggtggctcagaggtagctggtctgaacctgctgtttgtcagagcccacccgtgggcatgccagcatggggtcgcacacagcaacccatcacggccatctgctccccgccaccatccccgtatttatcctgctgacaacacaggcagcctgggagagaatctgagtgaatccccagcaaggggctgctcagtcatgatttctgagttttctttgtgttgacagacagctgtaaaatggtcaaggagaggtcactcctgtggcctggggtggggatggtgactccctgtgaagcccagggactccagcaggcctggccaccctggcctcatccctctctataggagacaggctgctacctgagtctgaaggaaagggcacaaaccagggcccatggccactggggagggtcagaggctgtggcctgggcgcctgcagtcctgggttttgttaccctctctgggctttggcttccttgcctgtgaaaggccaggggtgctctggccagcctctgggtccttcctgtctccgctcgtgctcgtgaaatgtcccagggcagagagagggaaaggtgagtggaaagagagggggcagaatgaggcttgatggggagtaggacagcaggaagctctgggtggcagagacccttcacctgtagtgcgctggcaggacctctccagaggtggtgggctgcaccctgggggttcaccccactctctctttccccccgtggctgaccctaggctccaggccacaggcagcctccttggccccagccacaacgaggccctgtcccggtggaggtcagcgcgggtttgcagcccttgtttctcatagctgatctgcctgctttggacaggcacctggcgcagaaccctttcatttgcgactgtaacctcaagtggctggcagacttcctgcgcaccaatcccatcgagacgagtggtgcccgctgtgccagtccccggcgcctcgccaacaagcgcatcgggcagatcaagagcaagaagttccggtgctcaggtacctgcccgcctgcccacctgcccacctgtccacctacctgcctgcccacctgcccaccggcctacttgtccacctgcatacctgcccacctgcccacctacccgcctgctcacttgcctgcctgcctacctgtccacctgcatacctgcccgcctacccacctgttcacctacctgcctgcccacctgttcacctacctgcctccctgccggcctgcctgcctacctgtctgcttgtctgtctgtattcagcctgctcagggaccccctgatgtttcctggatggctcccacaaaggtgtctttcattactgtgaacccagactggagggtgtgggcccaaaattctagacttgatctgaatggtagttcagtcccacctcattttattgaggcctagggaagaagcaaggcttgctgaaggtcccagagggaggactcaggtccctccacttttagccagttctcttttatgcctttgttgtcaagccttttaagacactcaggaggcctgggaaccctccttagtgagataggagcctcctccaggctttgggatgcagaaacagccttagcaattgtagtccacgtggcatctggctggggacagtgtggggcagcttctgagcctacatcctggtcaaggtcctgacgccacctgtaccccgtccccacctgtaaaattagcacagtccccacctcgtgccattgcgagtgagagctcgatggttttggcactccttgcgagaggtttaactggatgcgacacccccagtgtcagcctgggcaaggaacatgcgtgctctgtagctcgcccttctgcacacagggactgggcagatgggctcctcagccctgtctggggtgccttcagctgagcagtggggctggggcctgggctgttactgcaggtcctggctgattcctgcattatggtatttctgcttctcttcccagccaaagagcagtacttcattccaggtaggagagtggggggatccaaggccagcctggcgggaatggtggtagtgggtgggcaggctgggggccttggttgacccaaactgctgggagccggccccgggctcctcagcctctgcccccaccctctcatggcaggcacggaggattaccagctgaacagcgagtgcaacagcgacgtggtctgtccccacaagtgccgctgtgaggccaacgtggtggagtgctccagcctgaagctcaccaagatccctgagcgcatcccccagtccacggcagaactgtgagggtccctggcccccccagccctcccctgtccctaactgccactaaccctccttggcctactccaggattttcttggtccagccctgtctggggctgaaccactggagcctctggctcaggacataccaactgctggcttgggcaggaagaaaccccacccctgctgccctctgcttcattcacagcccccctcacccatcaaaagcagatgccagtctctggcactcagggcaggtcaccagcctgaatcagggatggcttttctcaacgatgcgtttgtcttattctgtgggacatgattccaaaactctttgttatttttattcctctatctaaaaatatgaatttgtgtacacatatgtctatgtgcatagatgcctgcaagcatctgtcatttacgtctgtaaatttttcatggcatttttaatgttaaaaatatccccattcatatcctctcccagtactaggcccagccttcctttgaaataggatcaatttgctttgccagataaattcttctgggagtcttctctgtttgagtcccaaatattctcagtttggaagggatttgaaatgtccatcatttgtgaatgtgcaagttcattcttgtctcttacaggcgattgaataacaatgagatttccatcctggaggccactgggatgtttaaaaaacttacacatctgaagaaaatgtgagttacccattggcgagaaggtgtctgttgggatgctggccagggatggacaagggaaatgccagggtgggggcagctcccacggcggggggccaggactctgtgtgtgggggtgttgcctgcaggaagggaggggcctgagctcctggctgctggccatatgtaatcctccccccgcctcttctcccagcaatctgagcaacaacaaggtgtcagaaattgaagatggggccttcgagggcgcagcctctgtgagcgagctgcacctaactgccaaccagctggagtccatccggagcggcatgttccggggtctggatggcttgaggaccctgtgagtgtgcagggctggggagcagggtgggccagctgcaggaggcaggcaaagccaagggaaaggaagagagaggctggaggagcccctcccctgggcccagcttgcaggagggtggggagaactgaggatcctgactgtgttgggacaggtaatcaagttggcaactctatggtgagacctgttctcttgtaccctggggcatggggccaatgcccagttggcctcaagggatggagacatgtggacccttctaggggtcccttcccattgccctctggtcaggctgcaagagcacagcatgagttcaggagtggctggcactgctgcaggcaggaggggctggatgaccttgccaaggtgattcagtgggtgtagataggggagcagggatgctgcactgtccctgagatgctaggatcccataacccacagcccagcctgagctgaccagaatctggagctcagtgggatcctggggtcatctgctcctccatgatgcaggacaccccctccatctgccccaggagggctggctcttcagatgatcctgagggtgtgtatcgtgtcccatagacagggcagtctgtcggatctcccacagagatggaaatgtttcaagtctacgctgtccagaccagtcacttcatgtggctgtggagcagttgaaatgtggctagtgctactcagtgactgaattttgaatttcattttattttaatgcatttaaatctaaatagctacatgtggctagtggctactatattggacaccacagctctaggaagccacttgcccaggtataagtcccaaatctgcagcaggatgtagagttgtctctgagcaagtaaatgaatgtgtgacaggactccctgtggatttttgttcctttattttacaaaaagcaaattttattatgcactatgttttgcagcttgctgttttcacctgtgaatacagcattgccttctttccaggctgttcctataggctgcctcatttttctttatgcttacctagtattccttaaatgtgggtgtgggggctgtccagtcagctgcattctttccaaggaagacttagataaggacagaggaaaagagaagggcccataccccatcactatccagaaatgaccactgttaattgttggtataaacaactgtctttccagtcttttacatatctctaaacctgcatacacatacatatacacacatacatacatacaagcatgcacgcatacagaaatattctaatggactcgtacattttatttagtaacctgctttttccttaaacttaatatgagcaccattacatattaaaatttttttccattccacatttaattcctaatacaaaaaaagtgctctgcatcagtttgaatgactaggtattatataattattggcaatgtaggctgtttctatttttttttttttataagcaatgttgtattgatacctgccttagtgggttcaggctgctataacaaagagccacagactggaggtttatagacaacagaagttctggaggctggaagtctgagaccagggtgccagcatggatgggttctggcgagggccctcttctgggttgcagacttctgacttctcattgtgtcctcacatggtagaaagagggcaagagagctctctgggatctccttgataagggcactaactccattcatgagggctccacccttatgacctcattacctcccaaagaacccccatcctgatcccatcacactggggattaggacttcaacatagggattggaggggatcacattcattctgtgacaatatctttattgtgaagttcacgtataatgcatgataatactcttgttaggaattcctaaagatggagtagtcgggtgaaaacacaaagtgtcattttggggattttgctacatctcaccaaatgcacttccagggaggtataaaggcatctcctgccagtgtgtggaagtgcccagtcactcacactctcagagatcctggatgtcattattattattattatatttttcattcttttttaatttggcaggcaaaaaatcaatattgcataagtgtctttgattagtagtaacattgaacatttttgtgaatgttgataaaccattttaatttcttttgtgagttggctaccctgtgttgacttggtttttgtttttacttttggttggcaagtgaaattgagctgggtttttgttgttattgttgttgttgtttagggagacagggtctcactctgtctcccaggcagctggggtgcagtagtgccatcatagcttactgtaaccttgaactcctgggctcaagagatcctcccacctcagcctcccaagcagctgggactacaagtgcacaccaccatgcctggctaagttttaaatttttttgtagagacaaggtctcgctatgttgcccaggctggtctcaaacccctggtttcaaataatccttggcctcccaaagtgctgtttttacaggcatgagccactgcatcaggcttgggctgggtttttgaagatgaacagcagcttttccagatgtagatgaggcaaaagagtattctagaaaactgtcacagcggtgtagcaggctgagggctggtccatctctagggaggcaggcaggtgccagggctgagatggtccgggtctgggtagacatggtctcaggtcacagtaaggagttcgagcatgactcggtgggcagtttggaggctgttagtggactttaagctggagagtgacatgatggattaggtttcaggaagtctcctgggcactgatgtggagcatggcctaaagacgggcaggaactctgggcacccagggcacggaggcaaggccagcatgggggacagggcagtggcagggagagagagacagagcctcgaggcttctcagaggcgggggcgggtctggagtgggcacaggtgtgtaaaactcgcctcacctggccggggcctggctggtgcgtgttcctggctctgcggctcgcagcctatggaggagaactgtgaacgagccacgatggcggaagctgcgtggcccaggtggatggctggcagggcagcaagggtcccctcctccctcccccgttcctccccagaatgctgcggaacaaccgcatcagctgcatccacaacgacagcttcacgggcctgcgcaacgtccggctcctctcgctctacgacaaccagatcaccaccgtatccccaggagccttcgacaccctccagtccctctccacactgtgagtccggcctccaggacaggcgggcgggggctctggagcaaccgtcccaaccgtctcggccagccactttgaaagagctcaccctgggggtgctgggtcttcgtggtttgctgaaacgtgggttccacatttcgaagtctccctccggtcctcagagccggtcctcttggtgatgggtggtggtctgggagacagtgccatgtggccatgtggccctgtgtccgtggtacaggaggggtttgctgggacctctgagaggggcagagtgtctccatggccgcctggcctgcctcttccaggaatctcctggccaaccctttcaactgcaactgccagctggcctggctaggaggctggctacggaagcgcaagatcgtgacggggaacccgcgatgccagaaccctgactttttgcggcagattcccctgcaggacgtggccttccctgacttcaggtgtgaggaaggtaactcgtggccccccggtggcaagggagagggcgccctgggtccaaccagtggggtggggcaggtgaggaagatgggagtggacaggcagcaccccctggcatgcccctgagaggagaggttaggtggggaggggaggccctgttttcaggaggagacgcgcctgcctggtggtgtctttgtgtggttataagagcaataaagttcctatccttaaaaaatgggaaagtatggataaaagaaggaaataaactttacctattattccatcgctcagagaaaacagttcccattttagtgtagtttctttctgtaagtttggtgaactcagacctgccttttggctgtccctaagcactctagactcatggggtcaccttatcttaatatgcaatggaacccttttgagtcccctcccccatatgtaggaaaccctggtcactctttgctccaatgccttgtttcctgggacttctcagggtagccccatccctcattttttcgccacagcaccaagcacggaaggtcactgtaggaagcagatttttctctgtgcagccatcccatccttagtgtctctcagcaccctgccgcagggaatttctccctggctgacctcagcttccagcccccttctccgcttctgggtgctaaggtgcctcccttctccctggtctctccctttcttgccttctaccccctgcagcctactcccagtggcagctccaccctcagctggcctggccaggccacgtggcagtggagagctttgactttcaccccaagaaacaccatcagggtattttctaaacaaaattaatgaattctctaagaatacttttgcttctgacttctaaaatttaaaaaagagtctatactatttacatatatattttattaatttatataataatagcttgcaagtctttttaaaaatgtctgatttgtttaaaacctaactatatattttgggcattttctcatgccattaactatcctttggaaacattattttttccaagatacggtttccttttatccttctttttacaaaagaaatgcatcctcattccttaaaacaacaacaaccaaggacaaccagaaggaggatttaaaaaagttactgacaggccaggcgcggaggctcatgcctgtaatcccagcactttgggaggccgaggcgggcagatccctgaggtcaggagttcaagaccagcctggccaacatgctgaaaccctctctttactaaaaatacaaaaattagccaggcatggtggcgcatgcctgtagtcccagctacttgggaggctgaggcagaagaatctttagaatttgggaggtggaggttgcagtgagccgagatcacaccgttgcactccagcctgggcaacagaatgagaatctgtctcaaaaaaaaaaaaaaaattaacgatttgcccactaccccccggcccccatgccccaactctggataactcctgtcgacatttgctatgtggctttccagatctttgctgtgtgctcatgtgcacaagtgtggcacacagaggatcttgcagggccacctgtgaaaacctttcaacaggatggaccgctatctggaaggctccacaattgatgtaagcagcccccagctgctggacattcagacaacctcccaagtcccgctccaatgcatcgtgctgccaggagcaccctcgtagatgctccctacgtatatattccactctcccctagaacagcttcctagaggtgaaaggatgtgaatatttctaagatgttgctgctgagagcctggtggccaatcgagcaggttctggaggcaggctgcttgctccaggctggggcaagtttctgaaccactctgcctttagtttcctcattgctccaatgggctaatagtaacacattcactagagagctgttctgaggattcagtgagttcacccttatcctgtggggcctgcacacaggcgacctgcataactgatggtcactgtcacccgggagcatgtgctaccagcatcccagtgtcctcaagaactccgaccgtggtgatattatcatctctctgacacccaatcagcagaaaggaaggcacagattttttgaatagatgaatgaatcaatgaagggatggtgtggtatcgagggctcggattttgcggcagccagacctgggctcagactctgcattgccttggacccactttatgattcaagcaaggtgcctaacgtctccagacctcaataaaatggaaattcatccacttgttcattcattcattcaactcatctgttttgagggctgctgcgtgccaggcactgcactaggcactgggctctatcagtgaaaaaaagaggagaaaagaggcccaggtctccatcctcctcatgcctgcattctaggggcgatgctgcacccctaactgtactgttaaggagacaatgtcgatccagtgcccggagtagcaggcactccggggatgggatggtgcgcggccatcctcctgttctactttgaccaggtccactttgagtttgaggagaaagagaccaactcaagacctattttaacctcaaaactgctccagggggcttcattcctggtggcggtggtggctggcggggaggtgtagtgcacagacttactgatggccaaggtactgtcagaggggtcttctgttctgagaggccccagagcatggccctgactgtaggaggccctacagcggcccgtccacctccctgacaggggcttcgtgccttcttccctaggccaggaggaggggggctgcctgccccgcccacagtgcccacaggagtgcgcctgcctggacaccgtggtccgatgcagcaacaagcacctgcgggccctgcccaagggcattcccaagaatgtcacagaactgtgagtagctcaaggccttgcccccttcacgtgggtccacaggacggggacagtgggggcatttcctgaggggctggggcctagccatgggaggaggaggtgaccaagagcaggcattagctgactaggagctggagttcgggctttgcagaaaacactgcctccagaaaggctttgagcttctctctgattctccctctgcggtcacctgatgaccgcatggcagcgagtgcttcctccctttaaactaagctccgcctttaaaatgaggagaaccttgctttcccgcctgtcattgtctcaggctcctgtgtcatgaagacacaaatgtgatttttgcaccagcagtgtagtgttcttcacatgaatctactatgacccagataacaaaaccccttttgttggatatttgtttccaatttttttttactgtcataaacagcaccagtgctaacaccccctcactgaaatcgccagtcagagagcggtgcgtttttaggactcttgctgccttttgcctgatggtcttccaagaaaatctgtttcctttgcactcccattgaccatgtgagaaggtggccttcttgcttccctgggtcagcactgagtatggtgctgaaatcctggctgattggtatttggtatctgagcacatgtggaggattggacatagatgcatttgacaaacaggaatggagagctgggacttcttcagcagacacctcccaatgaaagactctggccagctcctgacctctgacctcttcctgtgctctggggttgatccctccaggcctccaaagctgagcttttctccccccacccccaggaccagcgatgaggcttctatttgttatttcttgcattaccagcaaggctggccttttcttcacaagcacatcaaccactgcgggccttttcctgggcctggcctgccccgtcttcaccctgttttctactgcagagttagtgtcctacaaacctcatgagtccttgctttctccttggagcctcctagcagccctgagaataatgggatgggtggggcagcctaccttctttgactgaagatggtgaagttcagagcctgcgaaaatcttttaacttctctaaacctcagttttgtcatctgtgaaatgggactacttgggtatgtggacgaggactgcctcgaggatcaaacgagatgggtgggaagtcagtttgtatgatgcagagcgaggggtaaggatgagcacagccctccttttgctcctctctggggctttgggaagtgggggagagctgtcctgcaggctgtagttagttggggggtggagatcctgtgctggagctcagcttggctcagctcctggcattgggccactgcttagcaccttcaggctggaggcatgaatggtcaacaatgaagggaagagggggaggttcagagcatcttgaatcccaagctctatcctgtagaaatgggaaccttgggaagcttcgggcttaggaggatttcggtgggcttggttttaaggacagtgacttggatagcagtgagtagagtggaggccagaagggaggtccaaggtgcagagaacagacagaagaggctgcagcaggagcccgggcatgggtggtggtgcacagtcggcgggtggcatgagagtgcaaggaaagcaagctgtgagagagcagcggtggcactggctgcagagggaggaggagaagcgacatcagggtgcggagcctggaaggcaggaaggcagaggggtgctgatggaatgagggggaactggttgggcagtctggctgtgaatcagcttcacagcccatgccagcaggtggacagggggccctgggagctggcagggcccggtaacgtgcaaatcagatctatttggccaggaaagagcagagcagggaggggaaggcaggggcccagggagtgtccatggacaaggaggaggctgggagggtgagaagggaagcgagaagggaaccgagagaggccacgtgactattggctttttaccaagtcctctgggtggcacctccccagatggcttcaacaacgtacatattttctcctcccataagtgattctgggcccatcgtgtggcctatgtggaggagaggaaatgagagcgaagtccctggctgcagggaaggctgtccccagcatggggcaccaccagaggtggagatgggcactaacgccgctgtgttctctctgcagctatttggacgggaaccagttcacgctggttccgggacagctgtctaccttcaagtacctgcagctcgtgtaagtatccaggccgcttgaggacaggagggcctttggcatctaaccatcaggactccggctttcctggaatttcctacggacctcacttctgggcagatcctgcttcttttcctttccctgctcccctctgggaacagctgtgcctagagctgttttgccacctagtggccacgattggcaattacatagttccaggccatg

SEQ ID NO: 1334 - protein, 472 aa, Homo sapiens
MQKRWEGPGPPGGAERSKNSADLPALDRHLAQNPFICDCNLKWLADFLRTNPIETSGARCASPRRLANKRIGQIKSKKFRCSGTCPPAHLPTCPPTCLPTCPPAYLSTCIPAHLPTYPPAHLPACLPVHLHTCPPTHLFTYLPAHLFTYLPPCRPACLPVCLSVCIQPAQGPPDVSWMAPTKVSFITVNPDWRVWAQNSRLDLNGTEDYQLNSECNSDVVCPHKCRCEANVVECSSLKLTKIPERIPQSTAELNLSNNKVSEIEDGAFEGAASVSELHLTANQLESIRSGMFRGLDGLRTLMLRNNRISCIHNDSFTGLRNVRLLSLYDNQITTVSPGAFDTLQSLSTLNLLANPFNCNCQLAWLGGWLRKRKIVTGNPRCQNPDFLRQIPLQDVAFPDFRCEEGQEEGGCLPRPQCPQECACLDTVVRCSNKHLRALPKGIPKNVTELYLDGNQFTLVPGQLSTFKYLQLV

SEQ ID NO: 1335 - DNA, 6205 bp, Homo sapiens
  source
  (1)..(6205)
  CDS (201)..(394)
  CDS (575)..(856)
  CDS (1276)..(2311)
  CDS (2972)..(3605)
  CDS (3962)..(4388)
  CDS (5768)..(6005)
tgaaaaggaaagaacacagcctccctgcgagctcgctcagggccccgagtcaagccccaaccgctcccctccttcaggccccaccgtctgacaagcgggcttgcctgtctgtcctacagagggtaaactgaggctgtggggctgatgcagcactggggcctggcctgctggcccagagtcctgagtgcctggcctacagcatgggggtcccctctgccccgttccctccacgcccggccctcctgggcgcgcccctcgccgcctgcccctcgccaactgccttgtctttccctccgcagtcggcctggagattctacgccaccaacctctcgcgcacagacctgcactccacgtggcagtactacgagcgaacggtcaccgtgcccatgtacaggtaccgccgccgggcacctgccaccaagcaactgtttcattttttattttccatttgttcttaaaccccactttttgttgttcattattttgattgattttttttctttaaaatgtatttttcacaaaggagttctgtgtgtggtttatttcgaggcgttgcttctgccctttgtgttagagctgcggctttctcttcactttcatttcctcacccctttgctttatcgtcctggccgtgggtcgtgctgtgttttgtgcgttgcaaggacgctccccagggagctcaaggtaaatgccccccgccccgggctgctctggaccgacagctgctccccgggctgctctggaccggcagctcgaggtgcccaagcttcaagagtggaaccagtaccatgaccccgtcccccatcaaggacctagggctccggcgtggggggcaggaaagtaaccccggatcacagtgagactttcagaccaggaaactcaaattatcctgggggtcccaggtgttccccaacaggacagagcacacagacaaccttggagcccctcgggcagcagagaagggggcctagaaagtgcctgtcgaggcagtgctagcaggtcctgtgagcctgtgtggtcggagggcggctttcccgtgtttttttgttttacaaaagggcaggtggcagccagctgggattttcgttgcctggctcttgcttaaattaaggtctgagatgaggggttctgagggcctttctcctggtccacgcgggcctgacccctcgagtccgtctgtgtgggcaccaccttgcccgcccgccctctgctctgaggtggggaactgagccccgggacttcccagctcccgcgccccccgtcacctgctcctagggggtttctgtcccctggagccttccctaagggtggggccttccctgtgggtggagccttccctgagggtggatccttccctgggggtggggccttcccagagggtggagccttccctgagggtggggccttccctgagggtggggccttccctgagggtggagccttccctgtgggtggagccttccctgagggtggagccttccctgagggtggggccttcccagagggtggggccttccctgagggtggggccttctctgtgggtggatccttccctgagggtggggccttcccagagggtggagccttccctgtgggtggagccttccctgtgggtggatccttccctgagggtggagccttccctgagggtggggccttcccagagggtggagccttccctgtgggtggatccttccctgagggtggagccttcccagagggtggagccttccctgtgggtggagccttccctgtgggtggatccttccctgagggtggggccttccctgagggtggggccttccctgtgggtggggccttcccagagggtggagccttccctgtgggtggatccttccctgagggtggagccttcccagagggtggagccttctctgtgggtggagccttccctgagggtggggacttcccagaggctggggccttccctgtgggtggatccttccctgtgggtggagccttccctgtgggtggatccttcccagagggtggagccttccctgtgggtgtggccttccctgagggtggggccttccctgtgggtggatccttccctgagggtggggccttccctgagggtggggccttccctgtgggtggggccttccctgtgggtggagtcttccctgtgggtggatccttccctgagggtggagccttccctgtggatggggccttccctgagggtggggccttccctgcgggtggggccttccctgtgggtggatcctaccctgagggtggagccttccctgagggtggggccttccctgagggtggggccttccctgtgggcggggctttccctgagggtggggccttccctgagggtggggcaggtgcacagtgtggctgggaattctaagctggggtggggcccaggattcttcttgaggatcctgagttggccagggtggacagacccgcggcagtcctcagttgctacctgccttttcagggtgtcacttgggaggaggatgccagagcccttggcggtcctcgatgtttgcagtcgccctctggggtctgccccaacccctccctcagcaccatcccccctgcacctcctggaagcccgaccttaggagcctggccctgcttgtctttcctgggaatgtcggccatgcccttgtttctgcaaagtgacctctctcagcccagggcagggacagaaccagcccttgtgctaattttctttgttctgttgtttcccctactttcctcaactatttgtttcattttctttttcttatcccgttctttttgaaattttccgttcttttccctttgtgtgtgtggaaacacttgaaagttcgcaaactcaaacctacggggcctccaggtaggaaatgcatggacagaagccctgtgtgtgtgtgtggttctagttctgtgtctggaactgtgaccgggcaagcccctggagccccgtggcccacccggtctgcagagtgaccactgtccctgcccaccgagcatccctatgccccctgccctgcgtggccccatgctgggcggccagatcaccctgggccctcccctgcctggagcccacgtgccaaccctgccctcccagggcccatccacccttctcgtcctgcctccccccagccgctgcttcctgttgccagcccgcctgtgtcccccgtggtctcgttctgtcctgcttctggcctggctcccctcgtgcctccatccccaccccacaggccccatctgtgagcagagcaggaatgatggatggggggcttcccctgccctggcgctgggcacccatctggggccaagggtgctcccaggccaggacccccagaccagccacagtccttgtcccaccgtggctcacagggcagcctctgcgggccagctagcctcaggggtctgcctcagggtctcctgccctggactcaagtttctcctgagtcttgccctggcatcacaggggaaccccagggctccaggccgtcccacccctgtccccactgctgagagcaggaaacaaggctgtttgttcagactggagagcgctgagctgctatgggaagcctcacccccatacagcacaaagggcctttacctgtcgggtgggcaggcttgtgctctgtgatgacactgccctgcagagcctggggccagccactccccacatagaccagaagggcttcctgcacagaagcccttgatgactcctccaggggccagtcacccgtcctggaggagagacctggctgcccttcctgggaactgttagaatgttgactctccattcccagaaaggaagtgggtgcagtgctgggcagtggtgggtccagggctcctctgcccccgacatgctcagccataagacatctccaatgtctgcagaggccctgctgcccctggggccaggaggctggcgctgaagccggctgcctcctccccagcctctgctctctcccagggccgccccctccccttgttgcaccctcgtcccacagctccgtcctgccctggccctgccgcccgcctgtctgccctggcgctgctgctctgtgtgttcgaggcatggcctcctatgtggctctgagggctgacgtgtgtgtctctcacctgggcctgcgtgcgtgtgggtcccatcaaggaggggtggggagccacctgtggcccccagacagactccggccaggctgggctctgctgcgcccacaacaccagctcaccagctgcctggttcctgctccatcccgacttggacagcggactgtcctctgcagggagggggctcacaggagccccactcctgccagcattttgggggcacctctggggctgcagagggaacaaagaggggccaggcacggctttaccagctcacacctgcctagcctgtgggggggcaccagaggctggtggggtgcagggaggggcttctggacagctctggagggaggagtgtggctggacgaagtgggagtcggcagtagggtgatcaccaagccctgagggacaatggagtcagccatccttttgctttggaggcagtggggagccattgagtgtttggtcaggagagtggcaaggatgcccatctggaggaccaagtaagcctgggtgggcagaggcagggcaggtgaagagtctggaggatgtgggccacggcccagcctggggcagagggaggacacgggcaggggcatctccagggggtggccgtggccatagccgcgtagggagtcagctgggtgagggctgggctgggaggtggccgtcctgcctccaacgcagaggagagaccaggacgtggccccagtggggagtgctccacaggtgggtgtggggaggggtggaggccgtggatgggatggcagggcctgggagcagaggctgaggaggcggagtggagggggttcaggtgggtcagggagccgggtgggggaggccccagaggagggtgtctcttcctgaagcgagctggaatgctgtgagggcatgggtggtgaggaggagtgggcagagtgaggtgggtgggagtggggaggggtgaagagggggacgtcccacccagacgtgaggaggtgcctgcatacctgcctggggggcttcggcgggcccggacttggtcctgctggtggctgtgggcggcagggcaggaagacaggggtgggtatgaccaggactgggaagggggctcggagcagagctgggccacctgcggaggattcccaaggcatctgggcctgatgaggctgggctcatcctatagactccagaatgagctgctctttgccaagcagaatccttttctgtatccccacctcccaactcctccagctttggcagagaaagtggctgtgtagagaggggccggggccctaaatatattcgcgtgctgtccctctaggatgttcagggattagaagggggagtagcgcctccccctacctgcgcgccctcctccacctgctccaggctgcagggtcggggctgcatgggtggccaggcgccctcttccctcctccctgctgtccctgctggttgacaaggccccaggcacagccagagaatgaagatggctcccaggcctgcccaagagaggtgggcctgagcccagggcccagtgggcagctgcctgaaagcctggccacgtcacatgccgccgggtgtctgacactgcaggcgcctgcccatggagctgtgcaagcagagggaggtgtcccaggactcgggagggtgagacgctcactcccctctccttctcttgccccagacttatccccccgctgaaccagctggagctgctgaggaacctcaagagtaaatctggactcgctttcaggtcagctggggagctccaggtggggcgggtgggcgtctcagtcctcctgggggccccagctgcccacagaagacacgccaggacagtgccccagggactccagggagctgggacgcgcggggacgctggacttggtgatggtggtgctttctcttttcgcgtctgctgacctggtctgggctcccacccccagaggggcagctggttcgggggacgggcagagagggaggggcgaaggttgatatggggccgggggctctgcatggctcctaatggggcccaggcgcgtgggtcgtacgacaaagtgtcccagcccgtcgtcctctcgagtgcctggtggtaactcaggtgctgatggcgcctgctgcc

SEQ ID NO: 1336 - protein, 936 aa, Homo sapiens
MGVPSAPFPPRPALLGAPLAACPSPTALSFPPQSAWRFYATNLSRTDLHSTWQYYERTVTVPMYRAAAFSSLSFPHPFALSSWPWVVLCFVRCKDAPQGAQGKCPPPRAALDRQLLPGLLWTGSSRCPSFKSGTSTMTPSPIKDLGLRRGGQESNPGSQGFLSPGAFPKGGAFPVGGAFPEGGSFPGGGAFPEGGAFPEGGAFPEGGAFPEGGAFPVGGAFPEGGAFPEGGAFPEGGAFPEGGAFSVGGSFPEGGAFPEGGAFPVGGAFPVGGSFPEGGAFPEGGAFPEGGAFPVGGSFPEGGAFPEGGAFPVGGAFPVGGSFPEGGAFPEGGAFPVGGAFPEGGAFPVGGSFPEGGAFPEGGAFSVGGAFPEGGDFPEAGAFPVGGSFPVGGAFPVGGSFPEGGAFPVGVAFPEGGAFPVGGSFPEGGAFPEGGAFPVGGAFPVGGVFPVGGSFPEGGAFPVDGAFPEGGAFPAGGAFPVGGSYPEGGAFPEGGAFPEGGAFPSDHCPCPPSIPMPPALRGPMLGGQITLGPPLPGAHVPTLPSQGPSTLLVLPPPSRCFLLPARLCPPWSRSVLLLAWLPSCLHPHPTGPICEQSRNDGWGASPALALGTHLGPRVLPGQDPQTSHSPCPTVAHRAASAGQLASGVCLRVSCPGLKFLLSLALASQGNPRAPGRPTPVPTAESRKQGCLFRLESAELLWEASPPYSTKGLYLSGPPPPLVAPSSHSSVLPWPCRPPVCPGAAALCVRGMASYVALRADVCVSHLGLRACGSHQGGVGSHLWPPDRLRPGWALLRPQHQLTSCLVPAPSRLGQRTVLCREGAHRSPTPASILGAPLGLQREQRGARHGFTSSHLPSLLIPPLNQLELLRNLKSKSGLAFRSAGELQVGRVGVSVLLGAPAAHRRHARTVPQGLQGAGTRGDAGLGDGGAFSFRVC

SEQ ID NO: 1337 - DNA, 9851 bp, Homo sapiens
  source
  (1)..(9851)
  CDS (201)..(581)
  CDS (2244)..(2394)
  CDS (2475)..(3642)
  CDS (4153)..(4238)
  CDS (4840)..(4953)
  CDS (5064)..(5179)
  CDS (5444)..(5833)
  CDS (6503)..(7011)
  CDS (7503)..(7674)
  CDS (7925)..(8081)
  CDS (8179)..(8325)
  CDS (8393)..(8945)
  CDS (9525)..(9651)
  modified_base (1066)..(1066): a, t, c, g, unknown or other
  modified_base (1068)..(1068): a, t, c, g, unknown or other
  modified_base (1094)..(1094): a, t, c, g, unknown or other
  modified_base (1097)..(1098): a, t, c, g, unknown or other
  modified_base (1100)..(1101): a, t, c, g, unknown or other
  modified_base (1126)..(1126): a, t, c, g, unknown or other
  modified_base (1129)..(1133): a, t, c, g, unknown or other
  modified_base (1135)..(1139): a, t, c, g, unknown or other
  modified_base (1141)..(1143): a, t, c, g, unknown or other
  modified_base (1189)..(1189): a, t, c, g, unknown or other
  modified_base (1191)..(1191): a, t, c, g, unknown or other
  modified_base (1196)..(1196): a, t, c, g, unknown or other
  modified_base (1213)..(1214): a, t, c, g, unknown or other
  modified_base (1245)..(1245): a, t, c, g, unknown or other
  modified_base (1250)..(1251): a, t, c, g, unknown or other
  modified_base (1260)..(1269): a, t, c, g, unknown or other
  modified_base (1271)..(1274): a, t, c, g, unknown or other
  modified_base (1278)..(1377): a, t, c, g, unknown or other
  modified_base (1438)..(1438): a, t, c, g, unknown or other
  modified_base (1441)..(1441): a, t, c, g, unknown or other
ggctgcgggtgccaggtgcccgtgctgcagggggcaggcagggcccgagccccacggctcccaccttgtctctttcacagacgccaatgagtgtgaagggaagccatgccttaacgctttttcttgcaaaaacctgattggcggctattactgtgattgcatcccgggctggaagggcatcaactgccatatcagtcagtatggggggtgggcgccggcgggtgggccgaggcacatgggaccccgcctctgaccctgctcctctgcccccagacgtcaacgactgtcgcgggcagtgtcagcatgggggcacctgcaaggtgaggcggggccaggagggtgtgtggcgtgggtgctgcggggccgtcagggtgcctgcgggacgctcacctggctggcccgcccaggacctggtgaacgggtaccagtgtgtgtgcccacggggcttcggaggccggcattgcgagctggaacgagacgagtgtgccagcagcccctgccacagcggcggcctctgcgaggacctggccgacggcttccactgccactgcccccagggcttctccgggcctctctgtgaggtgaggtctgcctggtcaccctgccccacctgctgctctgggagctgtagggcaggcctcgtcccctgaccatggggcctgagtgacccaggggtgctgcaggggaagttgtccccaaggcgtcccaggctcagctctccactgggtgccaggtgggcaggcggggctgtcacaggtcaccaggcttggccccctgtggccattgcttgttgtgatgggtttcctggtggcctgggctaggagcccccgggctgctggctgcccaggcctatctgtccatctgtgcactccctcgggactggagggcagggggctctggtgggcagagcacatggggtagggtgggtgcctgatggtggagaggtatacacctgtcataggtgagtcctgggtcggagtgggcatctctctcagggctgatgctctcgcctccctctgaccatctgttggtaccgggcgcaccccacaaactcaactcacccaancncaaaaaaaagccaaaacccaacccanacnntnncaccctctcccactacccctccccnttnnnnnannnnntnnncatacattatattacctatctactcttcaaccttctcccttatatntntatantatttttttattatatnntttataaatttatatattttttttaattttntatanntttaaatannnnnnnnnntnnnnttcnnnnnnnnnnnnnnnnnnnnnnnnnnnnnnnnnnnnnnnnnnnnnnnnnnnnnnnnnnnnnnnnnnnnnnnnnnnnnnnnnnnnnnnnnnnnnnnnnnnntcgtttttcattatggcaccgctcttctgttttttctattcacacatggggccagaggggntgnggcgccacgcactacattactttctttcccccttccccaacaacactcccacccccttcctcacctcccccttccgcacatacccacaccattcgtccccccacccacttcactatcaccattcccctactcccccaaccctgcctcactccacacacctccctaccacccccttccccacctcccccaaccctgcctccccccacccacctccctaccacccccttccccacatccccaaaccctgcctccccattacttgcctccctaccaccccctcccgttacttcccctttttccctgcatccccccacccacctccctaccaccctcggccgcccacgatcctgccctggccttggtgcagaggatgggcctcctgtccagagggcttcttggggcccagggcaggggtctgacctcaggacctgcaagcatggcagtggctggccctggaaaagacccacagtcttggctctgagggtggccaggcagtgtgtgaggggctcaggagctgtccttcctgccagcagcaggggccaaggccacactcctcccgagggacagtgaggaagctgggctgcagtggaggtgggggtgggggcccacaggtatctgcgttcagctaaggcctgggcagtctcaggtgggcaggggtcttgggctctggctggcactgttaggcccagggcggaggggcctgggggtccccagggatctaccttcgtatggacagaggcctggcctgtgttcccggcctgggcctgggcctaggctctcacaggcaccccccaccctgcaggtggatgtcgacctttgtgagccaagcccctgccggaacggcgctcgctgctataacctggagggtgactattactgcgcctgccctgatgactttggtggcaagaactgctccgtgccccgcgagccgtgccctggcggggcctgcagaggtgctgggtgcggcatggggtggtgggggaggtggtggggcaggggcgggcctgactcctgactgtactgcctgccatagtgatcgatggctgcgggtcagacgcggggcctgggatgcctggcacagcagcctccggcgtgtgtggcccccatggacgctgcgtcagccagccagggggcaacttttcctgcatctgtgacagtggctttactggcacctactgccatgagagtgagtggccacgaacggcgggctggtggtggggctgggctggcctgaggccctggctcaccccgctcgcctctgcagacattgacgactgcctgggccagccctgccgcaatgggggcacatgcatcgatgaggtggacgccttccgctgcttctgccccagcggctgggagggcgagctctgcgacaccagtgagtgttccagcacccgcccacacggcctgtgcctccacccctgtgggccccttatcaccctgagatggaccgctgtctgggtgcggcaggccccgtacccagaaaggcctggccagggggtgctgccaccatggggtggagtcccaggctgcccccatgcccgaggccagctcccccggcccgacgctcctcccccgcccctctctgtcctcacctggcccagctccagtgcttcctcccccgggaagccctccctgagcgccggtgaccccccgcccgctgaccggcgtcctcgcccccagatcccaacgactgccttcccgatccctgccacagccgcggccgctgctacgacctggtcaatgacttctactgtgcgtgcgacgacggctggaagggcaagacctgccactcacgtgagtgtccgcaggccctggccgcctggggctgcccccaggaccctggccctggcggtctggggcctgcctgctgagcggcccatgtgccaacaggcgagttccagtgcgatgcctacacctgcagcaacggtggcacctgctacgacagcggcgacaccttccgctgcgcctgcccccccggctggaagggcagcacctgcgccgtcggtgaggagcccccgctgcctctgcgaccgccgggcatatgccctcccaggcaccgctccctcgggcgcgatgggccgaggggtcttttttgagggccacacctgccacctgccccctgccccctgcccccgggtctgtctgccctgtctgggttgggggcgcggtatggagacccagggccagcccagggccaggtgagacgctccctcctcctcctcaccttacagccaagaacagcagctgcctgcccaacccctgtgtgaatggtggcacctgcgtgggcagcggggcctccttctcctgcatctgccgggacggctgggagggtcgtacttgcactcacagtgagtgtgggaggggtgtgggcgggggccgctttcctccacccagatgacatccctgcccccgactcgccccccagtcccttctgccagcccctccccctgctgcccctgcccccagcaaaaggcaccctccttgatgaccctccccagccccacagcctgatcacgccaagccagcctggacagtgcctggcacgcttggggggtgggtactgatcccctgcgttctcttctcccaaaccagataccaacgactgcaaccctctgccttggtgagtggcaccctgggggccacagcaggggtgggtgggacttggcatacaacggggggccacctgatgcccaccctctgctctgcagctacaatggtggcatctgtgttgacggcgtcaactggttccgctgcgagtgtgcacctggcttcgcggggcctgactgccgcatcagtgagtggccagacagccccagccctgggagcccctcagcccagccgcggtgtcaggagtctggggacatcaacgtccacgtcccttgaagggcagtgtggccacaactacttcctgcctctcttctgagcctcagtttccccacatgtctgtgccctgtggggttcctgctgtataccctgccaagtgattaagtggggagccccagcctgggggaccagtccggggcccagggagctgtgggggttggagcgtgcagcctgacgtgggctcctctgtggccgcagggctgttgtccctgggtgttggcccagctgtctgtccagcaccccttggctggtccgacgcagcagctggggctaatccaggatgggacaggcccactgcagaagcagacggaggagggtgctgttgggccagggtcaggctgggctcaggaaggcctcaggcaggcagcagcttgggctcgggggcaggggctgctcctcattgtcctggggcttgcgcctgtgtgccactggctccccgctgccctaggccatgccggtcctgcggtgggcgttggcctcactgcactgagcagcggtggctctccctgcagacatcgacgagtgccagtcctcgccctgtgcctacggggccacgtgtgtggatgagatcaacgggtatcgctgtagctgcccacccggccgagccggcccccggtgccaggaaggtaggccccgtgtgattgccctgggttggggcgggttggggggcatgggtgacacccagccccgagggccagatgcccactgctgaccctcgagccccttctccccacagtgatcgggttcgggagatcctgctggtcccggggcactccgttcccacacggaagctcctgggtggaagactgcaacagctgccgctgcctggatggccgccgtgactgcagcaaggtgagggcagcccgtgagccgccctgccctacccgaggctggtgcacgctgaccctggccactctgtgagatcaggaggcgggtgctggggtccggatggactgagagccgtctgccctcagggacacccagggaggcgagagctcagccaggccccatgcttcgatgtgcagttgggaaaacaggcctggtctgggtcctgccttgctccgcctgccctttctgatgtcgagcttggcctgcctccctgggagccctgggtagggggtgggctgggccctggggctcacagacttgggcggtgtccctccttggcatggggcccgtgcctgcctgtgggttctcatctgtgtgcctgcatctgaccctcctgtgcgcctgcgcctgaccctcctgtgcgtgcctgcccaggtgtggtgcggatggaagccttgtctgctggccggccagcccgaggccctgagcgcccagtgcccactggggcaaaggtgcctggagaaggccccaggccagtgtctgcgaccaccctgtgaggcctggggggagtgcggcgcagaagagccaccgagcaccccctgcctgccacgctccggccacctggacaataactgtgcccgcctcaccttgcatttcaaccgtgaccacgtgccccaggtgaggggcctggtggcatctgagcttgcagaggccacacgccggcatctgctcgtggcatggcgaaagcctagccccgcagggcagggaggccctggttggctgagcagagtcactcttggtcacagagagtggccctgtggggtcagatgagaggggcattgggcctggtgctgggtggaggtggcagaggaggctgggagagcagccagctgggggtgcctgtttgtccagctgccctgagggcctggactgacggcgccatggctgcctggccccagctcttgggctgtagctccgtgggcagttttgccctggcctaggagccacctttgcctgctgtgtgcttggagctgggcccctgtctcccaggaggggctcagaactggaggagacccactgtaccccgccctgcctctccttcccccactggcctgcaggtggagctgggtccgccctgaggatgggcgggtgggcaccgtcactcctgcctcctggtatagggcacagccgggtgggaagctgcccccccaggcccttggcatccttgctgtgctctcctgggcgggctgtagggtgtgtcccacgtgtacccacagcgccagtccagggatgtaggtgtcaggttcacggccctgccctgcccacgcactgcctgtctctgcccagggcaccacggtgggcgccatttgctccgggatccgctccctgccagccacaagggctgtggcacgggaccgcctgctggtgttgctttgcgaccgggcgtcctcgggggccagtgctgtggaggtggccgtggtgagtgcccagtggggagcagcacctgggtgggccctgggtcccgtactatgcaggtcctggctatgctggacagaggctctggcgaggctagtcctggtgcggaaggactgcgggcaggcctgtctccctgcggcccctcgctgtccatgccgcagacccgtggaactgctccctgggcctggccagcatgagggagatgcagggctgtggtgtggagcccgcttcccctgcagctgcatcctcgcccggtcccctgctctgtttttgtctctgtgtccctacgtcacaggcagcaggagagtccgtgggcttagtctgccctgggaggcctgctttgggactggcacctgccctggacctggggggtgtcagatgtgaatggataccaagggggtcgggtgagactggggtggagacatgcccggagaggggcgggaatgttctggaacatggtgggtgggtgtgcagagcagtgggtgtggccatggcacagtgtggctggtggaggccatggccaggcacaggaaggacgtgcagtgttttggtgccctgaggccgcagagggggtggggaacatggatgggtgctgctgggtgatggaagggcagtaggggcagggggagatgtaagaagtgtgccagcacaggtcagggcgccatcagggatgtggtggaggcagggcacagccccgggttgctgtggcctcgtgaaggcactaggtttgtggtgcccctggggtgtggcccataggtgggggtgggggctgggaactgacaagaagggatggccatcacggagcaggtgtcagcgaatggggccacacacctccccaactcactgcctggtggcgaggtccccaccgcaggaccccgggctctcctgtgtgcccggacggggacaccctccacccctccacttccccccacccctcactgcctgctggtgaggtccccaccgcaggaccctgggctgtcccgtgcgcccggatggggacatcctccacccctccccttccccccactgctcgctgcctggtggtgaggtccccacacctcaggaccctgggctctcctgtgtgcccggatggggacagcctccacccctccactcctccccccgctactccccactcactgcctggtggtgaagtcgccactgcaggaccccgggctctcgtctcccgtgcgcccaccttgctccagtgtggccagggcctcagtgttgggggcaggctgctgggagcctggagccctcgagccatccccacaatgccgttctttgccgcagtccttcagccctgccagggacctgcctgacagcagcctgatccagggcgcggcccacgccatcgtggccgccatcacccagcgggggaacagctcactgctcctggctgtcaccgaggtcaaggtggagacggttgttacgggcggctcttccacaggtaagcgcgggaggtgggcccctgggaaggcaccaggcaggcaactcaggcattgggcacagagccggccgatcctgccgatcctgccagccaccaggaacacagaagtccctggcacctgctgccccagccgcccagccccacaacctgaccttcccagcccccgtcctgggaccctccccacgagccagcaaccggagggtgggcccggccgccgatgcccgcagggccctcccaggcctgggtgtgtggctagtgccccgcaggtgcccaggcctcattgcccaccggctcttctccccggtccccaggtctgctggtgcctgtgctgtgtggtgccttcagcgtgctgtggctggcgtgcgtggtcctgtgcgtgtggtggacacgcaagcgcaggaaagagcgggagaggagccggctgccgcgggaggagagcgccaacaaccagtgggccccgctcaaccccatccgcaaccccattgagcggccggggggccacaaggacgtgctctaccagtgcaagaacttcacgccgccgccgcgcagggcggacgaggcgctgcccgggccggccgccacgcggccgtcagggaggatgaggaggacgaggatctgggccgcggtgaggaggactccctggaggcggagaagttcctctcacacaaattcaccaaagatcctggccgctcgccggggaggcccgcccactgggcctcaggccccaaagtggacaaccgcgcggtcaggagcatcaatgaggccgctacgccggcaaggagtaggggcggctgccagctgggccgggacccagggccctcggtgggagccatgccgtctgccggacccggaggccgaggccatgtgcatagtgtctttattttgtgtaaaaaaaccaccaaaaacaaaaaccaaatgtttattttctacgtttctttaaccttgtataaattattcagtaactgtcaggctgaaaacaatggagtattctcggatagttgctatttttgtaaagtttccgtgcgtggcactcgctgtatgaaaggagagagcaaagggtgtctgcgtcgtcaccaaatcgtagcgtttgttaccagaggttgtgcactgtttacagaatcttccttttattcctcactcgggtttctctgtggctccaggccaaagtgccggtgagacccatggctgtgttggtgtggcccatggctgttggtgggacccgtggctgatggtgtggcctgtggctgtcggtgggactcgtggctgtcaatgggacctgtggctgtcggtgggacctacggtggtcggtgggaccctggttattgatgtggccctggctgccggcacggcccgtggctgttgacgcacctgtggttgttagtggggcctgaggtcatcggcgtggcccaaggctggcaggtcaacctcgcgcttgctggccagtccaccctgcctgccgtctgtgcttcctcctgcccagaacgcccgctccagcgatctctccactgtgctttcagaagtgcccttcctgctgcgcagttctcccatcctgggacggcggcagtattgaagctcgtgacaagtgccttcacacagacccctcgcaactgtccacgcgtgccgtggcaccaggcgctgcccacctgccggccccggccgcccctcctcgtgaaagtgcatttttgtaaatgtgtacatattaaaggaagcactctgtatatttgattgaataatgccaccattccggcctcccttgttctttcggtgctg

SEQ ID NO: 1338 - protein, 1356 aa, Homo sapiens [sequence omitted]

SEQ ID NO: 1339 - DNA, 1152 bp, Homo sapiens
  source
  (1)..(1152)
  CDS (201)..(629)
  CDS (728)..(952)
caatctcatgaggctcagcaggaacctctgaggacagagggcaaccctgactctcctctccagacctggtatgttaccagcctttgtttttgcaggatgtgcgcaggcagcaaaggtagcccaccatagcctagcttctcgcaaccctctctggaaagctggattgggacaatgagactgagacctcaggacatgtgaacatgagccatacgggaggtgagtggttggtggacaggcaggtggtcttctccctgacagtgctggtggccctctgtggactggtaggcaatgatgtgatctgctggcttctctactcacaggtctggagcagcccctatgtgacctacatccttaacctggccactgttgatatggtcaacctctcctgtgtaactgtgatcctgctggagaaaatcctcatgctgtatcaccaggcggcattgcaggtggctgtgtttctggatcctgtctcctatttctccgacacagtgggtctctgtctcctggtggccatgagtattgagagctttctctgtgccctctgtcccacctggtgctgccaccgcccagagcacacctctgccatggtgaggtgggccctggccctttctttgtatgcagttagccaggtctgtgagtactgggagaagtgcttggcatgtgaccaatttcatgaggctttatgacatgtcatgtacttatttgctttgtaatgggcatgtccaagctgatcctgatcatctggggtctgtgctgtccccagtggtgttcccccatcaggacctatcatgttgtctgctttgtgatcatcagcttcttcctttgggtcctgcccttagttgtccttgtgtgcctgccaggaaagtttctgacccttgcctttgacctcctgttgctactgtccattgtggtcagcatgcctcacctagtcatctacttcttggctgagtaactctacaggaagaggcacagggagtccctaaaggctgtttttcagagggctttgttgagtgagatggaggcatggataaaatgaggcgtttcaggcccccgatcccagggcagatttcagcctcacagctggaaacaaactgctcttctagggggctcagctcctccacaaaggcagggactgcctatgcacaaggctgt

SEQ ID NO: 1340 - protein, 217 aa, Homo sapiens
MSHTGGEWLVDRQVVFSLTVLVALCGLVGNDVICWLLYSQVWSSPYVTYILNLATVDMVNLSCVTVILLEKILMLYHQAALQVAVFLDPVSYFSDTVGLCLLVAMSIESFLCALCPTWCCHRPEHTSAMVRWALALSLYAVSQLILIIWGLCCPQWCSPIRTYHVVCFVIISFFLWVLPLVVLVCLPGKFLTLAFDLLLLLSIVVSMPHLVIYFLAE

SEQ ID NO: 1341 - DNA, 1888 bp, Homo sapiens; identical to SEQ ID NO: 1249
  source
  (1)..(1888)
  CDS (201)..(1403)
  CDS (1524)..(1688)

SEQ ID NO: 1342 - protein, 455 aa, Homo sapiens; identical to SEQ ID NO: 1250

SEQ ID NO: 1343 - DNA, 985 bp, Homo sapiens; identical to SEQ ID NO: 1267
  source
  (1)..(985)
  CDS (201)..(785)

SEQ ID NO: 1344 - protein, 194 aa, Homo sapiens [sequence omitted]

SEQ ID NO: 1345 - DNA, 1474 bp, Homo sapiens
  source
  (1)..(1474)
  CDS (201)..(1274)
acatgcttgtaatcccagctactcagaaggccgaggccagagaatcacttgaacccaggaggcagaggttgcagtgagccaagcttgcaccactgcactccagcctgggtgacaaagagagactctgtctcaaaaataaaataaaataaagatttaatctatatttgtagtttagaaactaatgattccagatcatagagatgttgaaattggttattattgagaacatggcagaaattatgctattctcattagatctcttgcttttctccacagatatcctttgctttaattttccttctaagatgatcaaacttcctggttttattaccatacaaatcttcttttatccacaagccagctttggaatttcagcaaacaccatccttcttctttaccacatcttcacctttgttttcagtcacaggtctaagtccattgacatgataattagtcacctgtctctcatccacatactgctgctcttcactcaggcaatattggtgtccttagacttctttggttcacagaatactcaggatgatcttaggtataaggtcattgtctttttaaacaaggtgatgaggggcctctccatctgcaccccctgcctcctgagtgtgctccaggccatcatcagccccagcatcttctccttggcaaagctcaaacatccttctgcaagtcacatcttaggattcttccttttctcatgggtcctcaacatgttcattggtgtaatcttctgctgtacactgcggctacccccagtgaaacggggccagtcttctgtttgtcatacagcactgttcctttttgcccatgagctacacccacaggagactgtttttcacactaatgactttgagggatgtcacctttatagggttcatggtcctctcaagaggctacatggtgattattttatacagacaataagaggctatctcagtgccttcacacagccagcctgtccccgagtctcaccagtgaaaagagcctcccaggctatcttactgctggtgagttttgtcttcacatactgggtggactttacgttctcattttcaggaggtgtgacatggataaatgattctctgctagtgtggctccaggttattgtggccaatagctatgccgcaattagtcctttgatgctaatttatgctgataaccaaatattcaagactctgcaaatgttatggtttaaatatttgtctcctccaaagctcatgttgaaatttaatcgccaatgtggcagtactaagaagtgatgagaggttaatccattcatgaactcatgaattaatgggttgtcatgagaatgggactggtggctttagaagacgaggaagagagaccactcagcctccttgccatatgatgccgtctgctgcctcaggacactacagaattcccaccagcaagaaggctctgatcatctggtgagatattggaccttccataactgtaa

SEQ ID NO: 1346 - protein, 357 aa, Homo sapiens [sequence omitted]

SEQ ID NO: 1347 - DNA, 940 bp, Homo sapiens
  source
  (1)..(940)
  CDS (201)..(740)
attttccttccttacattgattttagaaaacttgtctcaactatagaccgggctgggggagctggtatccttcatgagcttatattacctatctaggaaccaaccacattcacccttttgagaatttgcattaacacccatgaagaaaattcaaactagagccatgagtggcaggtcactacaataaacatcaggtaacaatgatatcaagtaattataatatgctaactctagccacgcaccgttccattgccctcattttagaaacaagaaaatggagatacagaagtttcaataacttccccaaagtcagaaaactgaaaaagaaaataaaaggggctatacctggatttgaatgccagcgttgtttctcagagcgcgatcttaacagaggcactagacgccgccatgggggagattctgtgcttgcatctgacccattcccccactcccgaggctgcttcccttcgctccccccactcccgaggctgcttcccttcgctccccccactcccgaggctgcttcccttcgctccccccactcccgaggctgcttcccttcgctcccccgactcccgaggctgcttcccttcgcttcccccactcccgaggctgcttcccttcgctcccccgactcccgaggctgcttcccttcgctccccccactcccgaggctgattcccttcgctccccccactcccgaggctgattcccttcgcttcccccactcccgaggctgattcccttcgctccccccactcctgaggctgattcccttcgcttccccgactcctgacgctgcttcccttcgcttcccccactcctgaggctgcttcccttcgcttcccccactcctgaggctgcttccctttgcatgggattctggaggcctctgagaaatgcctttgggcgtgtaatgtaattgaattgatcctttgta

SEQ ID NO: 1348 - protein, 179 aa, Homo sapiens
MISSNYNMLTLATHRSIALILETRKWRYRSFNNFPKVRKLKKKIKGAIPGFECQRCFSERDLNRGTRRRHGGDSVLASDPFPHSRGCFPSLPPLPRLLPFAPPTPEAASLRSPHSRGCFPSLPRLPRLLPFASPTPEAASLRSPDSRGCFPSLPPLPRLIPFAPPTPEADSLRFPHSRG

SEQ ID NO: 1349 - DNA, 904 bp, Homo sapiens
  source
  (1)..(904)
  CDS (201)..(704)
gaacaccaagcatgttggattcagagcatgaggttttcttgaagccagtgtggagagcacagaaaaaatgagggaggagacattctcagcagtcaggaagagaaaggctgccccaatagaggagaaggaaagagaaaggagaaccagtgaatagtggacacacctcctgggattagaaacagccagatgagggtggagaaatgccaggcctcactgctcatccttgctgctcaggcacggaccagggcattgcaagccctgttggagacactccatgttctatgtggcatgacttgggcagaaggttaaatatgatcacagaagatacccaggtgagtggaccaggggctgcttatggagccacatgcttttatgacataagcacctgggcagcccaagagaacttgcagaacacaacatacgaaaggtgggctctcataaccaaatcctgtggcagggatcacagacttcagtggcaggtgatagcacagtatccaaagtacccagatggcaccagctgctctctggagcacctaatactggaatcgcaggggccaggggaagccagtgatcctgaacggaaaccagcaaaaaggcagaggacagtagagagaccaccttcccccagtgccaggagggcaggtgggcttccttctaccaagacacattccaggaagagaaaacgggagcaggaaatacagtgaaaaacttaacacccaaagcagactgagctcaccccaaagagcccgctctaatccaggagagtctgagccacctctaacagggagggtgtaggttttatccgtctctgccatcagtggactgcagccttcctaagccagaaaaggacatttgaagaaagctacattttctttacacatctcgatttggtttggatgtgtgt

SEQ ID NO: 1350 - protein, 167 aa, Homo sapiens [sequence omitted]

SEQ ID NO: 1351 - DNA, 871 bp, Homo sapiens
  source
  (1)..(871)
  CDS (201)..(671)
ttccccagtcgcatcctctagggtccatctggaatgccgccaacttctcaagggtgtccgagtgctctgagcagatgtgggcccttccgtgttctgtttcttcgtgtgtgcgtctatttgctggaggcttcttgaggccaggagtctttccttctctctcctggcctggaatgtaggtgggccccaaatgtttacccggaatgagagcaggggcatggccccaaaagcaaacctcctacttaggagttttgctaagagacttgctgcctccatggcatatgagatttggggatcctttgaccgtggggtccaggagcactagcctgagagtggggcctgtctggggcattcaccccagtgcccccgtgcctagagccgtgcatggtatgaggcaggggcctctccatgttgggtggatggagccattcgacagacgttaccgagtgcccgtgatgtgtcgcgcagtcactgtttccagcgctgaagacccaacagtgaaggagacgaggcaggatatgcgattgggccccgctctcggatcctgtgtccaccaagcacgccgctggggagcgagtgagcctccacgtcactacggggttttgtccgggttgcctgccgtgctgttgacgctggacaggagcggagccgttttaggtctcttgaggctgtgacagtgaggctgagacaggctgatgggaaggaaatcatgaagaggggagacgagctcccaggcaggtcacagctctgcggaggccctgaggtgtggcgagtctagcgccttccagaactgagagaagctggcatcctgaaggaggcctcagacagggccaaagaggcagctaatatgctaggtggggcggggaggctgtcg

SEQ ID NO: 1352 - protein, 156 aa, Homo sapiens [sequence omitted]

SEQ ID NO: 1353 - DNA, 1063 bp, Homo sapiens
  source
  (1)..(1063)
  CDS (201)..(863)
cctcccactgtccagggagaaggtgcctttaaagtgagggctcccttctccactccctggccagtgagtaaaacctgactaccttttccaattggatattctttctttgcagccgacacaaagtgggaaaagaactcggttctccagtgacagatccacaagaacccaaagagagaggttacctggtagcaggtgaggggatggggaaaggagacctcactctcaactttttatatgtatatattttatatatatataacacacatataaatatactatatataaaatatataatacatatatattatatatatatatatatatatatatattttttttttttgaggcagggtctcaccgtcgcccaggctggagtgcagtggtgcaatcatggctcactgcagcctaaaactcctgggctcagcaatcctcccacctcagcctcccaagtagctatgaccacaggggcgcaccgccatacccagttaatgtttgtattttttgtagagatggggtctcactatgttgcccacgatggtctcaaactcctggccttaagcaatctgcccacctcagcctctcaaagtgttgggattacaggtgtgagccactgcacccggcacttttttatacttttggattctgaatcatgtgagtgtattgccattaccagcaaattttgggaaaagcccactgcaaggatgagtgaagggccccgcagcaggttcctcctcacagcctccactcagggccaacagcttccacacagacgcatggacatgtggactgtggacgtggagcgaatgtggtggctgtctactttgttctcaggatacttctggacagaaaatcccagcatatgactaattagattcagttgaaaaataacctaaaagccaatcttcagcaacgaaatgaagttcctgactggttgttctcagtaaactaaaaataaaatcctgagcccccagtggactgaagggacctcctcttggcctagaggactccagagcagccttgaaaactgagttcctctccctcttctggatagtctacggagggc

SEQ ID NO: 1354 - protein, 220 aa, Homo sapiens
MGKGDLTLNFLYVYILYIYNTHINILYIKYIIHIYYIYIYIYIYFFFLRQGLTVAQAGVQWCNHGSLQPKTPGLSNPPTSASQVAMTTGAHRHTQLMFVFFVEMGSHYVAHDGLKLLALSNLPTSASQSVGITGVSHCTRHFFILLDSESCECIAITSKFWEKPTARMSEGPRSRFLLTASTQGQQLPHRRMDMWTVDVERMWWLSTLFSGYFWTENPSI

SEQ ID NO: 1355 - DNA, 973 bp, Homo sapiens
  source
  (1)..(973)
  CDS (201)..(773)
gacaaatgggatctaattaaacttaagagtttttgcacagcaaaataaactatcaacagagtaaacagacaatctacagaatgggagaaaatattttcaaactatgcatctgacaaaggtctaatatccagcatctataaggaacttaaacgaatttacaagagaaaaacaactaccccattaaaaagtgggcaaaggacatgaacacttttctttccctttttttttcttttttttttttgagactgagtttccctcttgtcacccaggctgtagtgcagtggcacactctcggctcaccgcaacttctgcctcttgggttcaatcgattctcctgtctcagcctcccaagtagccgagattacaggcatgtgccaccatgcctggctaattttgcatttttagtagagacgaggtttctccatgttggtcaggctggtctcgaactcccgacctcaagtgattcacccacctcagcctcccaaagtgcttggattacaggcatgagccaccacgcccggctgaacagacactttccaaaagaaggcatatatgcagccaacggacatatgaaaaaaagctcaatatcaccgatcattagagaaatgcaaatcaaaaccacaatgagataccatctcacaccagtcagaatggccattattaaaaagtcagctctttcccatcttacaagatggagggtgaacaagttgagaagccagatactaaagagaagaaacctgaagtcaagaaggctgatgctggtggcaaggtgaaaaagggtaacctcaaggctaagaagcccaagaacaggaagccccattgcagtcaaaatcctgtcattgtcagagggattggcagatattctccatctgctatgtattccagaaaggccacgtgcaagaggaagtactcagctgtgaaatccaaggttgaaaagcaaaaggagaagtttcctgcaactattacaaaacca

SEQ ID NO: 1356 - protein, 190 aa, Homo sapiens [sequence omitted]

SEQ ID NO: 1357 - DNA, 919 bp, Homo sapiens
  source
  (1)..(919)
  CDS (201)..(719)
gtttccactaccctctccatgctctcagttaaatgacttctcagggtgaaagctccttaagccagtcctggggattcacatagaggacttgactggcctccaaaaatttgcttcttaaggtttcagggattcaatagctagagattcatcctaacaacacaaaagttgatttccttgtagtttattttcataaatatattatgtatactaagtttatattagcaaataatgtgataattttaaaaacatgtttatacaaacatagccctttctttttctttttctttctttctttcttttctttctttctttctttctttctttctttctttctttctttctttctttcttttctttctttttctttctttttctttttctttctttccttccttccttccttccttcctttctctttctttctttcttcctttctttctttctttctctttctctctctcttcctttcttcttttcttctttctttctttttttttttgagtcggagtctcgcactgtcccctgggctggagtgcaatggcacaatcccagctcactgcaacctccgcctcccaggttcaagtgattctcctgcctcagcctcctgggtaggtgggattacaggcacccaccgtcacgcctggctaatttttgtatttttagtagagacggggtttcactatgttagccaggctggtctcgagctcctgaccgcgtgatctacccgccttggtctcccaaaatgctgggattacaggcatgagccaccacgcccggcctctttctttttttttcttttttacatgtactggtttattataaaggatattgcgaaggatacagaagaaggagtgacatgtagcgtgaggtatgggggaaggggcagggagttttcacgtcctccctggatgtgccgccc

SEQ ID NO: 1358 - protein, 172 aa, Homo sapiens
MYTKFILANNVIILKTCLYKHSPFFFFFFLSFFSFFLSFFLSFFLSFFLSFLSFSFFFFFFLSFLPSFLPFSFFLSSFLSFFLFLSLFLSSFLLSFFFFLSRSLALSPGLECNGTIPAHCNLRLPGSSDSPASASWVGGITGTHRHAWLIFVFLVETGFHYVSQAGLELLTA

SEQ ID NO: 1359 - DNA, 1069 bp, Homo sapiens
  source
  (1)..(1069)
  CDS (201)..(869)
tccagagacttgttgaatggctttgacccaaatgcagatagtgatatgaacaatgaagtccaggctgaggtggtctcagatggaaataaggaacttgttagatactgtagtaaaagtcactcttgctgtgcaaagagactggtggcattttgccccagccctaaagatctgtggaatttttaacttgagaaagataatttatggtagaaaaaatttctaagcagcaaagcattgaagaggaagcagaacatacaaatttggaaaatttgcagactgtcaatgtgataaaaaagaaaaccccattttctagagagaaattcaagccagctgcagaaatttacataagtaatgaggaaccagatgttaatcaccaagacaatggggaaaatgtctccaaggcatgttatggtggctcttcccatcacaagcctggaggcctaagagagaaaggtttcatgggctgggcccaggcttccccttctgtatgcagccttgggacaaggttccctctatcccagctgcttcagctccaaccatggctaaaaggggccaatgtgcagctcaggctgttgcttcagagggtgcaagccccaagccttggtggtttacatgtggtattgggcctgtgtgtgcacagaagtcaagaactgaggtttgggaacccctacctggatttcagaggatgtatggaaacacctggatatccaggcagaagtttgctgcaggggcggtaccctcatggggaaacactgctgggacactgtggaaggaaaatgtggggtcagagccccacacagagttcccactggagcactacctgttggacctgtaagaagatggtcaccatcctccagaccccagaatggtagatccaccaacagcttttactgtgcacctgggaaaactgcaggcactcatgccagcccatgaaaacaggctgaagtggggctgtaccctgcaaagccacaagagcagagctacccaaggctctgggagcccacctcttacattagtgtcccctggatgtgaaacatgcagtcaaaggtgatcattttggaactttctggtt

SEQ ID NO: 1360 - protein, 222 aa, Homo sapiens [sequence omitted]

SEQ ID NO: 1361 - DNA, 916 bp, Homo sapiens
  source
  (1)..(916)
  CDS (201)..(716)
atgatctcatcttagaatccttaatttaatcacacttgcaaagactctttttcccaataaggtcacagtaattggttctgaggatgaggacctggacatatcatttgggagccactgttcagcccactacagcctggtagaagttccgccccttcccacctcctttctcccccttgtgcgctccagccaaagtagtctccatgcagttccctaaacaataccacctcagggtgccttcagataaacccatagcccatgtccttatttctttcgagtatttgctcctatatcacctgtccagtgaggacttcttagccaccctactgaactccatggaacacccgattgcaactcctcttcctttcctgctttatttttctccacagcatctactgcctttaacatctatcattttacttattgctttttatttatgtctttttttgagacagggtctcactctgtcacccaggctggagcgcagtggcgcggatctcggctcactgcagcctcgacatcccgggctcaagcgattttctcacctcagcctcctaagtagctgggatttaggagtagtaggtgcacaccgccatgcttggctagtttttgtacttttttgtagagacagagtctttccatgttgcccaggatggtctcaaactcctgagctcaagctatctgcccacctcagcttcccaaagtgctgggacttataagcgtgaaccattgtgctcagcccattttacttatgtgtttatcattgcccaccaaaaatgaacctccatgcaggcagggactttgttttgttcattggtctattatcccctgcgtctaaaattgtgcctaatacagtaggtgctcaaaatccacttgctgactacacgagtaaatgggcaaagcactgtgctatgctggg

SEQ ID NO: 1362 - protein, 171 aa, Homo sapiens [sequence omitted]

SEQ ID NO: 1363 - DNA, 961 bp, Homo sapiens
  source
  (1)..(961)
  CDS (201)..(761)
tctacctccatgctagcattgctggtgttagagaggaattaacttcctggtctgtgcccttctctagaagaatataagatgctcctcctcctcaccccttctcagcctcctcccaagtcttcctcttctgcaccacccccgagtccaaacccacctcttgccccagcattcaggctggaaaacactgatgtggactcagtatgataactgagatgggggacgccagacatgtgaggacgctgtcctccgagaggtgtccccggctgttagccagctgtgctgtggtgctgtgggtctgtcataccctcccttgcttctgttcacactgggaggcccactcctggctcacctctccctctcagggacccacgtgggagcctggatccctggactgtcctgggcataggtttcaggggcctcctttgttgtcatcagaacccagaggaattcttctcctaaaaaatacgtatggcataccaatctgtgcggggcagtgtcctaagcacttagactacatcagggaagaacacagaccacatccctgtcctcatgcggcttatgttttctggaggaaagtggagacacaagtccttggctttagggctcccccggctgggggctgtgcagtccggtcagggcgggaggggaaatgcaccgctgcatgtgaaccttaccagcccaggcggatgccccttccccttagcactaccctggcctcctgcatcccctcgcctcatgttcctcccaccttcaaagaatgaagagccccatgggcccagcccctgccctgggaaccaggcagccttccagacctcaggggctgaggcagactattagggcagggctgactttggtgacactgcccattccctctcaggccagctcaggtcacccgggcctctgacccaggcctgtcactttgagaggggcaaaactgagaggggcttttcctagagaaaga

SEQ ID NO: 1364 - protein, 186 aa, Homo sapiens [sequence omitted]

SEQ ID NO: 1365 - DNA, 994 bp, Homo sapiens
  source
  (1)..(994)
  CDS (201)..(794)
cttccagaggtaactggtgctgccaaaccctgagcctttgggggactttttttttctgatgcatttttctcaatcattcgtttattttccagctcctgaaatttcattgttattgtcccctctcctgttctcccatcctgtgggttcattccctcagacatttaaagaaatctcatcactgttattggagcacccaagggatgactttagcattgcagtggctgtgcgtgtccaagctgccatctttatgtggacgtcctctcttctcactgacttccccatcccagcatggcagctccatgcttccagttgctcaggtcaaaactctggtgccatccttgactcttctctttcttttatacctcacattcaatcgctcagcaaatgtagtgagctctaccttcaaaatctattcagaattcaccacttccactgtgaccactcaggaccaagcctccactgtctctcacctggacgtcgcaatagcctcctcactcactgacctccctctttctctctttgtatttagcacagcagcatgttctatctgtcatactctgtcactcctcttcctaaagctcccctgtggctcccgttttactctgaatgagagtccaaatcccagtgaagaccaaggcctgtgtgatccagctctaccaccttcccagacacactggccttctggccacctcattgcacacaggcaagattccccactctcctctttaaatgggacactcttcctccaggtatctttggggctcaattcctcgtctccttcaggacacttgtgatgcatccttgacccttccatctaaaagtaaagccttcctcactctggggcccccctaccttccttatcctagttcatttttctctgtagcaactatgggcattagacatatattttgttctctgtggtatcctcagcacctagaatagtgcttggcacgcacatagtaggtgctcaacaaatatgtgttgcctgcaggca

SEQ ID NO: 1366 - protein, 197 aa, Homo sapiens [sequence omitted]

SEQ ID NO: 1367 - DNA, 1491 bp, Homo sapiens
  source
  (1)..(1491)
  CDS (201)..(517)
  CDS (580)..(751)
  CDS (908)..(1291)
aaactctggagtccataccctcctctcagcagctgctggccaggttcggtcttcattccctctcacatggactctgcctctagtgtcccctcccagcaagggctgaagaagaggagactggggtgggagaaggtggaatgggggctgcctttgtcgctagcctccgcagtaacctttcttctgccacttcaaggtcagagatgaacagcagtgttggggacctgggtgttggcggctgcagcctctgggatgaccctgctcgcttcatcgtggtgcccgcggcctatgccttggcactgggcctggggctgccagccaacgtggcggccctggcaatgttcatccgcagcggcgggcgcctgggccaggccctgcttctctacctgttcaacctggctctggttgatgagttcttcacgctcacgctgcagctgtggctcacctactacctgggcctggcccggaggccgcctgccacgcggccggggccacctactacgtgtccacctatgcggcggtggtcttcgccgcgctcatcagcgtgtgccgctgcggcttcgtacgcggtcccgggcccagggcggctgcccgcctggcccggtgcctacggcgccccgcgcgcgctgcctgcgccttcgcctggctggcgggcctggcccctccctgcctggagcaccgctgggcaagctcggggctggcctccgccacggtggccttcgcggccgccttcctgctggtgctcgcggccaacgtgagcctggcgcgggcgctcaaggcgccctctggcccgggcccgggccctgcaaccgccggcgcgcaccggcgcgcggccaagaccatggtcctggggttcctgctggtcttcgccctcagtctggcgcccaaccacctgctgctggcgccctaggtggctgggggggaagacaacggagaccggtgtcgcgccgcctccacgctcgacatcctgcacaccctcagcctggcgctgctgagcctcaacagctgcctggacccactcatctgctgcttcttcgtgcgcctcttccaccaggactgctgctgggcactgagctgccgcctggtgaagggggcgcccagggcgcatggggcctccttggcctcctcttggagagtctcctggcctcccctcctgtctcacccccctgtcaccctcccagtggcatccagggtggagaaagctctttggaaagacctagattctaatcctgacgcaaccacatactacccctgtagctgtgaacctccgggctcatctgtaccaaggacatagaacattctttgtaacccgaatgttccctggatgttgccagcttttggatacaaataatataccactgtgttttttttaaacctcttgggataaaacccaaagtccttatcatggcctacaaggccctgtctgatttggctcccctttctctccctaacccaccacccctgcgtctccctgcaggcagtcaccttcttagg

SEQ ID NO: 1368 - protein, 290 aa, Homo sapiens
MNSSVGDLGVGGCSLWDDPARFIVVPAAYALALGLGLPANVAALAMFIRSGGRLGQALLLYLFNLALVDEFFTLTLQLWLTYYLGLARRPPATRPGPPTTCPPMRRAAARLARCLRRPARAACAFAWLAGLAPPCLEHRWASSGLASATVAFAAAFLLVLAANVAGGEDNGDRCRAASTLDILHTLSLALLSLNSCLDPLICCFFVRLFHQDCCWALSCRLVKGAPRAHGASLASSWRVSWPPLLSHPPVTLPVASRVEKALWKDLDSNPDATTYYPCSCEPPGSSVPRT

SEQ ID NO: 1369 - DNA, 744802 bp, Homo sapiens
  source
  (1)..(744802)
  CDS (201)..(246)
  CDS (25640)..(25677)
  CDS (27078)..(27094)
  CDS (141192)..(141769)
  CDS (159571)..(159606)
  CDS (174525)..(174575)
  CDS (234891)..(235013)
  CDS (235514)..(235560)
  CDS (279677)..(279729)
  CDS (408660)..(409123)
  CDS (409204)..(409669)
  CDS (428381)..(428396)
  CDS (472204)..(472330)
  CDS (714252)..(714355)
  CDS (714447)..(714529)
  CDS (739794)..(739891)
  CDS (744484)..(744602)
  modified_base (51812)..(51911): a, t, c, g, unknown or other
  modified_base (57122)..(57221): a, t, c, g, unknown or other
  modified_base (79368)..(79467): a, t, c, g, unknown or other
  modified_base (293951)..(294050): a, t, c, g, unknown or other
  modified_base (310089)..(310188): a, t, c, g, unknown or other
  modified_base (332935)..(332935): a, t, c, g, unknown or other
  modified_base (332992)..(332992): a, t, c, g, unknown or other
  modified_base (362002)..(362101): a, t, c, g, unknown or other
  modified_base (639781)..(639880): a, t, c, g, unknown or other
caacgcaggcgcattcagctaaggaccactccctcccccgcactcctgcctcgccatttctcttccccgcccggccggccttcgctttgcgcacgcgccttttgaggtaacggcccaaagaggtggaagcgcttttcccgcccggccgcggggcgtggctctgcgcgcagcttgatgacgactttcggcgccgtggcggaatggcggcttccatctctgaggcgagcgacgctatggatcccacaggtgagtggcgcgggatgcgcgcctgagacggtccggcgccctgggggcttccccgagcccctgcggaggccatctccgttcctccgcgagccccaggactcgggccggccagccggctctgcccaggcagggcaggctggggagtggagggccccggttgagtcttctgccacccctctgggccatgcctttgtgccaccttcccgcgcggctcgtacactctgtcccggtccggtaggtgttcgctgaaggttaaccttcgttgaaggaattgagggaaggagagctttgtgttgaagttgagccttgggctcaacaggcggtgtgggtgtaagagccgggtgtgggtcccagctcgacccttcccctgtgtgctccacatctccgagccttggttttggaggctcccgaagcccaattggcaggagagttgggaacaagtgggcgcgtgctgttaagggaggtcttggcatgacagaatttgcttggaatgattagcgttgcccaagggctgtcgctgtcagaaaaacaaaacaaaacaaaaaacaaacggggtccgaagcagctcctggagaaaataggtgttggagagtcgccatgaagtggactctaggtgcatggcacgcagagacctgtgacgggggagggtggccatggcagagtcagataacaggggtgtgggagacacctcttgggaattctcgggtttgaatttcctttcttggaaatttcctagaaattcctctgggcctcattctttcagtcgctgcccatgaaagcttcttctgagcagagatgctctccccttcatcgtctctagagctccgcacttaccgaacagtccacagtttaatgctgctttgatcattttgtagtagtgcagcgttttcttgaccaagtgccttaggactgaggcgtttttctttaacactgcagttgatagctaggttaagaattgaggccgggagcggtgactcacgcctgtaatcccagcactttgggaggcccaggcgggtggatcacgaggtcaggagttcaagaccagcctggccaagatggtgaaacctcgtctctagtaaaaaatacaaaaattagccgggcgtggtagcgggcgcctgtaatcccagccacttgggaggctgagtaagagaattgcttgcacccgcgaggcggaggttgcagtgagctgagatcgcgccactgcactccagcctgtgcgacagagcccagagcgagactccgtctgaaaaaagaaaaagagaaagctggccgggcgcagtggctcacgcttgtaatcctagcactttgggaggctgaggcgggcggatcacgaggtcaggagatcgagaccatcctggctaacacgtgaaaccctgtctactaaaaatacaaaaaacaattagccgggcgtggtggcgggcgcctgtaatcccagctactagggaggctgaggcaggagaatggcgtgaacccgggaggcggagcttgcagtgagcccagatcgcgccactgcactccactctgggcgacagagcgagaccatctcaaaaaaaaaaaaaggagaaaaaagaaaaagcggccgggcatggtgactcacgtctgtaatctctgcactttgggaggccgaggagggctgatcacgaggtcaggagtttgagaccagtctggccaacatagtgaaaccccatctctactaaaaatacaaaaattaactggatgtggtggcatgtgcctgtaattccagctactcgggaggctgaggcaggagaattgcttgaaccagggagtcggaagttgcagtgagccgagatcatgccattggactccagcttggcaacggagcgagactccatctcaaaaaagaattgaaaaagtcggcactttgggaggctgaggcagcggatcacttgaggccaggaatttgagaccagcctggccagcatagggaaacccgcctctactaaaaatagaaaaattaggcagcctgtggtggcaggcccctgtaatcccagctactcgggaggctgaggcacgagaaccgtttgaactttggaggtggaggttgcagtgagatgatggagtgagactcagtcaaaaaaagaaaaaagaggctgggcgcggtgggtcatgcctgtaagcccatcactttgggaggccgaggcaggcggatcacgaggtcaggagatcgagaccatcctggctaatacagtgaaaccccgtctctactaaaaatacaaaaaaattagccgggtgtggtggccagtgcctgtggtcccagctactcgggaggctgaggcaggagaatggcgtgaacccaagcggagcttgcagtgagccaagatagcgccacaggactctagcctgggcaacagagcgagactctgtctcaaaaaaaaaaaaaaaaaaagaattgaaaaaacttgggagatgttcctattgccgagaggcagagattcctgtctcctctcactctacagctgcctacatggcctctttacacccagcctctcttcctccacagactgccaggtggcacccccagtgcctttacttgtgcagtgggcagagctgggccatgaaaactgtaactagcccaccagtgggacttggcagacttcctgtctgtgaagtctaggtctgagcatttttcatttctgacctgggtgagctgagaggtaggattctggaaagctgatcttagttttctttctttttttttctttttttttttccattttttgagagtttccctctatcaccccggctagagtgcaatggtgtgatcttggctcactgcaacctccgcctcctgggctcaagcatttctcatgcctcagcctcccgagttgctgggactacaggtgcccgccaccacacccagctaatttttatatttttagtagagatggggttttgccacgttggccagactggtctcaaactcctggcctcaagtgatctgcccaccgcggcctcccaaagtgctgggattacaggtgtgagccatggtgcccggcctttgatcctagttttctcatggcttattcaaaggctcccttggcagagcttgctcttcccctccgttcattgcatagtgcacaggtaatatggaggggatttgcccctgtctcagttttgtgaggtggtgtttgtattggaatcttggttctgccacttactagctgggtgggggtaagtgaattatcccatttctgcctctccttcatcatctgtactgacctgcagtcatagtacatctgtacccatcgggttgttgtgaggttggtttttctattcttgtatgacaaacttagcagcttaaaccggcatccatttattatctcatagttatgtatgcagaagtccaggcattacaagattaaaatcaaggtgttggtagctttgctcttatctggagactctagggaagaagctgcttccaggtttatttaggttgctggcagaatccagttccttggagttgtagaactaaggtctttgtttccttgctggctgtcagctggggactactctgtaacttaaggtccactaacttaggactctaattggatgtgcaaaatgccgtcatagcagtacctagatgagtatttgattgaacaaacaggggtcgggaatcttgggctgctatctttagaattctgcctaccactgaggattaaatgaggagatatatagagagcatttagagcgagtcctggtatataacaaatgctgtacaagcattaccgaggattcagtactacaaacttggctctgaagctggccactatgggctgcaggagaacagtatttctttttttcttttttttttttttgagatggagtcttgctcagccttctaggctggagtgcagtggtgtgactcagctcactgcaaccacctctcctgggttcaagtgattctcgggtctcagcctcctgagtagctgggattataggcacccaccatcatgcccggctaatttttgtattttggtagagacgggttttcaccatgttagccaggctggtcttgaactcctgacctcaggtgatcctcctgcctcagcctcccaaagtactaggattacaggtgggagccaccatgcccggctgagaacagcatttctataaaagatgggaattgctggccaggcgtgttggctcacacctgtaatcccagcactttgggaggctgaggcggatagttcgcttgagtctgggagttcaagagcagtctaagcaacatgatgaaacccccatctttacaaaaagtacaaaaattagctgggcttgttgatgtttgcctgtagttcccgctagttgggaggctgacgcaggaggatcacttgagctcaggagtttgaggttgcaatgagctatgatcgcaccactgtactgcagcctgagtgagcaagcaagagcctgtctctaatcaataagtaagacatgagaattggcaatgtaatgtgtgttgcgaattggtaatgtaatgtgtgatattctcctgggcattgtgaaactatgtaatattttgttagggccaggtgcagtggctcacacctgtaaccccaacacttaggaggccaaggcaggaggatcagtggaggccaggatcctgggcatcacagcctgacaaactagcctgggcaacatagcgagaccctgtctcaaaaaagaagaaaattagccaggcatagtggcacgtgcctgtactcaggagactgacgtgggaggattgcttgaacccaggagtttgaggttgcagtgagctatgatcgtgctgctgcatgccagcctgggcaacagaacaagaccctgtctctaaaaaaataatataaaaagattctgctgtgttacagatgttgagattttgtctttgtttttccacagtggtttgctaagaaggccattttcaactctccactggaggctgctatggcgttccctcacctgcagcagcccagctttctactggtaaatatcaactgcttgcatgagtgtcagtgtggccatagttctgtagatgtgggacttgagtgttcttcccattgacttgaagaactctgtagtggttgttttttaggggcatgtgatggaaacaatggcagactccttaacttgactgtgcctccttattactacaggaccttggggttactcaacttctgggctctgggttttctcacacaagttcattcaaattctattttctctacttcccaagggtgtgaggaggaggaagagcaagtgagaaggatgtatatcagaatgttcatgacttgtaaattcttaaatagatatgaagtattctaataatcagtcataactgtcatcagtgaaaaatggagacactgttgtgcgggggcctgctaggttgcactttaagtattaaacatgatgctgagaactgggtgcagtggctcatgcctggagttccagctactgaggagactgaggcaggaggattacttgagcccaagagtttgagaccagcctgggcaacatagtaaagactcaaaaaggaaaaaaaaatgatactgagaagtgagaagttagatatgaggcaagtattggtgatgaaagttcctaattttagttcttaggaggtgtttttgtaaacatttatgtggaaggacattcttcctcagtgcaccccactagagtcaacaggtctggcccatggccagatagctcaggtctccatctctgtctcaatcactgtgaaatccacccttgtttggaggtagacaaggccttagatatcctttggcaaagctctctaggttgaaattctagccgtttctcctgatcttaatccattcgcacagatgccctttttctccttgtagtcagggtgctttcctcacatcccacgactaggtagatttcattagtccttgtcctgagtcttttctggcctctccattgccttcatgattagtgtctacttggctgaagccatctataatttttgtctgccctgtgttttaagatcattggtttagtggttcagtgtctaccgaataaaggacagctcatttaagagagcttctgccatagccgtgatgttgttgggcgttcttactgatgatcacaatggtgtaatcacggtggtccatcaggctggaaatttccagttgatgcgtacaaactcagttatactctgtggtttgtgaggggtgcccttacacagtcaagatcctcttctggctgtggggctgactctgggaccaacccctacttatggattggtggaagtcaatcctgttctgatcatgtgcagcactctgagggggtactgggaaacaaggctgatagttcctggtccagagagcatagaactacggcctctcctagtagtactctttgggccactgacacacatgaggggctggggaaccaggccagaggttatgggtctgactcataacctattgcttggatttctgtttgactcaagccagagtgccactaaaagctgcagagtgaatgtcctcgtgactttttcgctttgttctgtcttctaggctagcctgaaagctgactctataaataagccctttgcacagcagtgccaagacttggttaaagtcattgaggactttccagcaaaggtatagctctgctaacgtctctctttggagcatgtcttatacattcgttgaagaactttattataattcctaatttccctccccgccccaaccccgagcactgcctggcacagaggcctggccattaccatgaccattatgtttacggacacatttaaacatgtgaacttgtagatcaggggttctcagccacagatgctctgttcctcagggacacttggcaatgtcagagacatttttggttgtcacatctggaggtagatggggagtgtgtgctactagcttctaagaagtagaggccagggttgctggaaacattctgcaaagcacaggacagctccctgcgacaaagaagtatctagcccaaaatgtcaacagcaccaagattgagaaaccctgatgtaaatactaaaaatatgtatttaaatcacacctggaattgtcaagcccaggaagctggcctagacaaggagttaataccaaatggcaataggtcagttaggtttcaggggcttcactctggaaaggatgttgctttcctttctgatagagcatccttcaagtcagaagtttccatcactgtttaaagaatcttttttttgtggtggctcatgcctgtaatctcaacactttgggaggccgaggtgggaggatcacttaagcccaggagctcaaaaccagcctaggcaacatactgagaacctatctctacaagaaatttaaaaattagctgagtgtagtggtgtgtgcctatagtcccatttactcaggaagctgaggtggggggattgctcgagcccaggaagtcgaggctgcagtgagccataattgcgccactgcactccagccagggcaacagagtgagaccttgtctcaataaatatgtattttgtttatttttttattttatatttttttattttcattgtttgtttttttttaaatttatttatttttcttaatttaatcttctatcacacacaaaaaatgtattttgatcggaggctgacttacttaactggcccaagtctaaagcaacactgcttggtatgccatgtaccccactggaagaacgtaaagctgctcttgtcgttggcaccatggcaccaggcttcctttgggtgcagggctgatcccataggtcttagccagggagtggcttcctcagagggagctgggcagcaggtggtgcaggactagagccggggcaggagtgggtgctggtcctgcacgcggcttcaccacacattgtttcaggagctgcacaccatcttcccatggctggtagaaagcatttttggcagcctagatggtgtcctcgttggctggaacctccgctgcttacaggggcgcgtgaatcctgtggagtacagcatcgtgatggaatttctcgaccctgggtaggtaggttggtcaccggagagaggctgggtgattcctcatggtgattccacctttaaagcactctctgaatttctcaagattaagaaacaatcaaagcaagataattcgcagttcatttgccctgtttttgtttgtttgttcaatttcgtgttcagtggcccaatgatgaagttggtttataagcttcaagctgaagactataagttcgactttcctgtctcctacttgcctgtaagtaaaccacagtggcgagagtggtgctcggggcagtgggccttgcacagccctgtggtgatgggcaatctcctccagtcctctgagggcaaattgaggagcgattcgttccaggggtgtgagaggcaaaggaaatgggtattgcatgactgctacccttgctgtctgcagctctttatgagatgatggtaggagaagttctaagcaaagactcttgttcaggcactgctcagaggcagggcactgtccccacaggtgggttctgtgtgtgggtctcttccccagcagccttcccaaagtgctgctgtgcatgtggggtactgcgtatcgggcactacgcaccagcacctgcccacaagcctcactgcctctctctgcagggtcctgtgaaggcgtccatccaggagtgcatcctccctgacagtcctctgtaccacaacaaggtccagttcacccctactgggggccttggtctgaacttggccctgagtatcctttggtggccctgaggtagggaggctgtgggtggcccagcacttgacactgagcggggggtggctcatcaaccctgcatgtttgcccctgacgctgctctcagatccgttcgagtattacatattcttctttgccttgagcctcatcactcagaaggtaaggaagggatgccttttgctgggagaggtggggccacggcccagggcttccctgcacttgttggtgcttggtggcctggcagtgtccagagcccatgctaacaactagcttggttttccagccacttcctgtgtccctccacgtccgtacttcagactgtgcctatttcatcctggtggacaggtacctgtcatggttcctgcccaccgaaggcagtgtgcccccaccactctcctccagcccaggggggaccagcccctcaccacctcccaggtaaggctgccctttgttaagacctggcccttccataagggagtggcctggtcacttgcatcgcccacggggacaatgttgccaccctttgtccacggttccccaatttttcttatgcctcattccccatccccagctgtcttagcacagactggagggtggggtatggcgggcaatctgtccttagtgttcagtgtctttggccatcactgaagctatcaggtccctggaggcctccacggcctgcatgggaatgggctgtgttgtgcatggagcagccgtccccacaggcggtgtctgagtcagtgagcagggtggaaaggttgtcctatgagcaaaaaaaataggaatctctatgggccccaggagcagatcttgaaggggaggccctgggccaaagagcctgttttgtcagtccaaacaggctgagcctgatgcgtgcctgcacaggttgggagtgtgaaccaggggctctcatgcctggctgtcctgggtcctcagtgggcactaacgcaggccgacttcccaggagaccctcttgccccagcagcagctgcctgtgcacctctgaccctctttaatctcactggcccatcgccttccccaggaagctgcatgcaggccccttcctgcagatgctggcccaccccagatctgctggcatgtgtaaggcaggccaggcctttacctacaattcacgtgtggacagattccccagagggtggaggggagaaagggagtggcaaggaggagacgctgcccaggtagcggcagtgatcagtgaccctgaaatgttgctgatcctgtggaggactcggaggtgaggcagattcacaccctcttagatgcagaattcagctgccaagcagtttttgatgcctggtttttttgcttgttttaactttttgggttgttttaattttttctattagaaattatatacgtaggctgggagtggtgactgatgcctgtaatcccagcactttgggaggccaaggtggagggatcgcctgaggtcaggaattcgagaccagcctagccaacatggtgaaaccttgtctactaaaaatacaaaaattagctgggcatggtggtgcacacctgtaatcccagctactcaggaggttgaggcgggagaattgcttgaacccgggaggcggaggttgtggtgagctgagattgcaccactgtacacacacacaaaaaaaaaaaagaaaagaaattatatatatatggtttgggtttatttatttattttattttattttattttattttgtgtttggagatggagtctcactctgtcgcccatgctggagtggtgcagtggcatgatcttggctcactgcaacctccatctcctgggttcaagtgattctcccacctcagcctcgcaagtagctgggattacaggcacaggtcagcatgcccgactaatttttgtatttttagtagtaacggggtttcaccatgttggccaggctggcctcaaactcctgacctcaggcaatccgtccaccttggcctcagacaaagtgctgggattacaggtgtgagctactgcacccagcatttttttttttttgagacagggcctggctgggttgctcagcctggagtgcagtgttgtgatcacaactcactgcaacattgacctcctgagctcaagtgatcctcccacttcaacctcccaagtagctagtactataagcatgcacccccacacctagcttttattttatttttttgtaagatgggtcttgctatgttgcccaggctgctctagaactcctgggctcgagcgatcctcctgccttagcctcccaaagttcagagattacaggcatgaaccactacactggtccattgtgtgcttttttttttttttttgacagggtcttactctgttgcccaggctggagtgcagtggcgctgtctctgcttcaagtgattctcctggctcagtcccaagtagctgggactacaggtgcctgtcaccacacccagctaatttttgtatctttagtagagacagggtttcaccatgttgagcagactgatcttgaactccttaccacaagtgatctgcctgcctcgaccccctaaagtgctgggattacaggtgtgagccgccgctcctggcctagccattatgtatttttaaagacggtcttactctgtcacacaggctggagtgcagtgtcataatcatcacttggtggcacaatcatcactcaagccagcctgtcacatcagtgactataggcatgcatcactacagccagctaatttaacttttttttttttttttgcggagatatggggatgcctcgctgtgttgcccaggctggtcttgaactcctggcctcagcaatcttcccgcctcagcttcccaagtagctggaattacagttgcaagtcaccacacctaactttttattttgaaataacttcagatttacagataagtttccacgcataataaaaataacttgcaggctgagcacagtggctcacgcctgtaatcccaacactttgggaggccaaggcgggaggatcacttgaggccaggaattcgagaccagtgtgggcaacgtcgggagacctcatttctacaaaaaaaaaattagccaagtatggtgatgtgcaactatggtcccagctactcaggaggctgaggtgggaggatcacttgtgcccaggagcaatgagctgtgagcgtgccactgcactttagcctggggtaacagaacaagatcctgtctcagggaaaaaaaaaaaaaagaaactttcatagatcttcacccagatttccaaactgttaatactttgctgcatgtgttggtttccacctctattgtatgtgtttttttttctctaagccaatatgagtaagctacaggatatggcatcccttgacctcttaatatttcagtgtatttcctagaagcgaatgcattatcctatatagtcacagtgcctgtaaccacaccaggaagttagtattgccaccaggcctcacactgtgtgcagtgatgtttcacaggctcacccactgtatatagtgatatttctagtccccttcagtcaggaatggtcccttgcctttctgtctttcctgaccttgacccctccagagcatgcggccgccccttaggctgtgtggtatttgctggtgactaggcccagcatgggctttgttgggaggagcaccgtagtgggacacctggtccttgccaggtgcccttttatcactgggttaaaaaggtgccggtcaggtttttccattgtaaaataattactttgtgcccaggttaaatagtaatgaggctgggcatggtggctcatgcctgtaattccaggactttgagaggctgaggtgggcggatcactggagctcaggagtgtgagaccagctcaggcaacatagcaaaatcccatctctaccaaaaatttaaaaataaccaggtgtggtggtgtgcgcctgtaatcccagctacttgagaggctgaggtgggaggattgcttgcacccaggaggcggaggtagcagtgagccaagatcatgcccctgtactccagcctgggctacagagtgagaccgtatctcaaccaaaaaaaaaaaaaaaaaaattaatagtgcctgggcaacatagcatgaccttgtttctactaaaaagaaaaacatcagccaggcgtggtggtgttggtcccagctacttgggaggcctaagtctaggaggttgaggttgcagtgagctgtgattgcatcattgcactccagcctaggcgatagggtacgatcctgtctcaaaaaaaaattgataacgagaatttaccgggaagatgtatggagactatgtaattatcagtagtattaacatccacttttgattctcctattttttcaaattgattttatttgcagacagggtcttgttctcttaccccaggctggagtgcagtggtacgatctctgctcacagcaacctcaacctcctgggctcaagtgatcctcctgtctcaaccccccaagtatctgggactacagggaggcatcaccacacctggctaatttttgtatttttttgtggagacagggttttgccatgttgcccaggctgggaatttcttaattttttagaaacagggtcttgctctgtcaccccagggtggagtgaagttggtacgatcatttgtcactatagcctcaactcgtgggcccaggccattctccctcctcagccttctaagtagctaggactacaggcacatgccaccaggcccagctgttttatgtttcaatgtttttgtggagataggttctcattttgttgcccaggctgatctcaaatgcctggcctcaagaaatcctcctgccttggtctcccaaggtgctggtgtgagcccccatgctcacaggtgtgaacccccatgcccaacctcactgttgattcttgaccaaatcagctattaatagggcggttactaaatggtggttctctaacttcatccctccttcattgatttgtgggtcaatggtcactctgtggtaaggaagacttctctctttgctatttatttattcaggtatatcagtgtggatcagggggctggggggaggtgtgcattgtgctattgaacaagttgtaatctgtccctgctctcgttgattttgatatccagattgcccctgttacagcgggagcgagttacagcgggagcctgtaactcgggcctgtttctgtgtctccctcaggacaccagccataccctttgcttcctatggcctccaccacactagcctcctaaagcgacacatctctcatcagacgtctgtgaatgcagaccccgcctcccacgagatctggaggtcagaaactctgctccaggtgagagttgagctggtcaaaagaaactgttcagccagctgggcatggtggctcgtgcctataatccccagcactttgcgaggcctaggtgggcagatgacctgaggtcaggagtttgggaccaacctggccagcatggtgaaaccacgtctctactaaaaacacaaaaattagttgggcgtggtggcaggcgcctgtaatcccagctactcgggaggctgaggcgggagaatcgcttgaacccaggaggtggaggctgcagtaagctgagatcgtgccattgcactccagcctgggtgacagaactagactccatctcaaaaaaaaaaaaagaaaaagaaaagaaactgttgccaccttccactatgtggggcagagtcccagaggcggcccctcagcccggggctgattctaaattgttgatattttcctgctgtgacatttagaaaacatgaaagtaaatctgcccacccttttaacttgaatgtcattgatggcgtttttcatcccaggatcccctgtccatggaagttgtttcgttttgcctgtggtgatataattgttgcagagtcttttggtttccatgacactgaatggtgaggggtctgtgcagcctccacaggccttccattgattcaggggatccaagtagtaggtgacagatttccttgtctgcccagaggggctccagcctgtcaggatggtatgggctggctcacttcctgagtgctggccaactcccaggtcctggctgtgtcttctaggcacacagagagattcagcaggtgctgcttctgacgctggatcctggggctgacttggtagccacagccttgctttacagcctggcatgtagataagataggattctatctcccatcttatatgtaactcctagtatttggggtgctgcactttttgaagcctccataccatttcacagcatcctcgcagggtggaatggtaagaaccgttgcccctgttcacagaggggaccatgatgcccagatggctcttggctgtgtggaccgtaggctgtgctggccatgaagagggcagaagatcatgacacagcgcttatagggaagaactggaaggttctgctgttccctgggccaaagcattttttttttttttttttttttttttgagatggagtctccctctgttgtccaggctggagtgcagtggctcaatcttggctctgtgcaaccttcacctctcaggttcaggtgattctcccgcctcagccccccgagtagctaggattacaggtgcccactgccatgctcagctaatttttgcatttttagtagagatggggtttcaccatgtctcgaactcctgacatcaagtgatccatttgctttggcctcccaaagtgttgggattacaggcgtgagccaccgtgcccggccctttttgtttttttaactaagaaaaaaatttaattataagatatatataacatgaaacttattgtcttaactatttccaagtgtacagtcagtagtgttgaatacagtcatgttgttgtgcatgcaatctccagaatgcttttcatcttgcaaaactgaaactgaaccagcccgggcgcaggggcctcacacctctaatcttagtgcgttgggaggcccagcaggaaaggattgctcaaggccgggagttcaagaccagcctggccagcatagtgagaccccatctcttctaatgaaaaacaaggaaatcaaaccattaaacaattccccacccagcacctggcaaccactattctgctctctgtttctatggagttgactcctagatctcatacccagagtatgcgtagcacatagtacttatttgtgtgtgagtagcatgcttcacttagcataatggactaaagattaatccatgttacagcatgtgtcagaatttccttgctttttagggctgaatagtgttccattgtgtggatgtaccacattgtgtttattcattcatctctcagtagacacttgagttgctgggttttttttttgttttttttttgagaccgagttttgttcttgttgcccaggttggagtggagtggcacgattttggcttaccacaacctctgcctgttgggttcaagcgattctcctgcctcagcctcctgagtagctgagctggaattacaggcatgcgccaccacgcccggctaattttgtatttttagtagagacactgtttctccatgttgggtcaggctggtctcgaactcctgacctcaggtgatccacctgccttggcctcccaaagtgttgggattacaggtgtgagccactgtgcccagccctttttttttttttttttttttttttttttaaatcagagtctgtctttgttgccaggctagagtgcagtggtgcagtcttggctcactgcagtctcaaactcctgggcacaagcaatcctcccacctcagactcccaagtcgctgggattataggtgtgatgcctcaccacacccagctaatttttgtattttttgtagagacagattttcattatgttggccaggctggtctggaactcctggcctcaggtaatcccacccacctcggcctcccaaagtgctgggatgacagggttgagccaccatgcctgttggttgcctttttactctatctatagtattttttcatgctcaagagtgttgattttgatgaagtctagttgtctattttttttccttttgttgcctgtgctttgggcatcatatctaattaatcattgccaaatctagtgttatgaagttttctcccatgttttcttctaagagtgtatggttttagtgcttatcctcaggtcgcttacccattttgagttattttttggtgatggtgtgaaggaagggcccagcttcactgttctgcacatgggtattctgtgttcccagctctgcttgttggagacactgtcctttccccactggatggtctgacaccattgtcaagaatggtttgactagctaatgcttttttgcaggtttttgttgaaatgtggcttcatcactattccttggagatgtatcaaaaaatgcagtcccctcatgccaaggtatgttttcagtttttcttcccacctcctgcttctgaccctgctcagcctgctgcttcttatcctgcctctgagtgagttttcacaggctggatggtgggaagcagaaacccaccacccacctgtcactcagaagccaaataagaagtgggcatcgttctctagtttccggtggcgggcagggggcattgcaccctgatgtgtagaaacttgaggcctggaagtctgcctctccggggccctccctgtgcagcttcctgagccccctccctggcagcaggaacagatgaggttgtggtgctcttgctctgggagtgggggagctgcgatgcctcagggagtcactttcttgtctgtctcctcgaccatcagcagtgcctttgtgctttcccatgaaggggtggcctggagcctcctttgcctgctcaccctactcccccaccttctccagagcatgagcaagcagcccttctcgtggcgagtggcacctggtgcccccctgcatgcagcctggcttgcctcctctccctccgcctcgcctgtccctgctctctctctctgggcagcacgctgctttcagatgcatggaggtggcggaggccctgggtcattcctgctgttgccgttcctggagctagcaccacccctggaccggtcagagtgagaaagcagctaggtgaaccttagatctccagtcagtcatctccatggagcagcttgactcatgcccatccgtgcccttgcctgaagtggcatcagccacgtagtctggtgcccatggcgtctgtgcatcagtatgcttgggaaactttggctttgtcactgacagaattattgagggcttcctccagaatgtgggtgatggagttaaacttcagaagagcatcctgtcacttttcctctggttctggcaaagagctgtgggtctgcttctgccacagtctgcagccagttccatggccccatgctttgccatgtggaggctctctcagagcatagggtcccccaaatcctcaccctcagaatcacatgggcggagaatggggaaaagctgaggaccccatcttgggcctcttgagtcacaaagagcctgcagtgcccttcctgcttccagagcagacttgctgcatgttcctggccggtgcctgggggcctggttattccctgagcctgctcctcccgtggggctctgggacactcagcactcgtgcatgtggcgtggcgtggcgtggcctggcaggggcagaggccactgcaccgcattgtgttcctgttgctccttctgccttctgagggagtggaagcacacctactttcaagagtcagccagaaaggctctttgaggctgtcacctgtgaggattctgtgtcctcacgggccagaggaagggcagggggctgtccctgtggagggcaggaggtgcagttcccttcttccccacatttgcttcctcttggccagaccttggggtgggtggaccctgctcagaataccttgcagtggccggaccaagtacccagagatgctccactcttcgcctcttccagttcaggcaaaacacaaaacgcaagaaaacttggtgggtgggagtcagagaaaggcagctgtggaggtctgtgtctcccaaggcttcttgccgcttgtccaggcctgtgctacacgtactgccatgcagaaatccctgcccgtccccactagcccttattttcagatgcaggaagtgaggctcctggggtcatcctcctcaccctgcttgagtccaggatgcatgcttgctccccagtggccctgtgggcagtaaggatggccatggcgctgtaggccactgtgttcctgcaagcaagggcagagccacactggggaactatgtgtctgattcctccctgagccccaggtctggcacagaggaaggctgtggagggcaacacctccctgccctgctccttcactccctgctctgcgtgtcatggcgactggcgtgtgttctgatttctcctgtgtggagcccagtgggtgtgctgcttgggcaggaggcatgctgctggcggggcaggatgtgcaccaggccggctgtggctgcactgggctgaaggggtgcttcggcaggccgtggtgctgcagggcagcaggtcggagggtcctggctaggagccagctcagcctcaggttcctgctgcctctgggtgtgtgtggctgtggccagatcctcaggggctcccgcccttgggaacccactgtatctggagggtgggagtttctggtgcggtaggagaggctgcctccaggagtcagagctgatgtgcacaccaccttagctgacgtccagactatgagggtggagggcagggcctggtggcctgagcctgtgctcctcgtctctgtgctacccttggggacctgtcctcgccctcagttctcagagagccagtcatggaggggacattgatttgagttttagacacataggaatcaatcatgtcttataccaatttggtaaatttcttaagacaacccagggaaatccagtcaattccacatgtgttttctgggcagagtgctcctcctggaacatgctccgctggtttcttttctgagcctcaggatcttgaggtcttggtggctggcagcatgtcccagtgagggccctgggctcttggagggctctggtttgcatttgccacacatagtgtgacctcagtcactggggagagtgggtcccgtcttgaagggcagtgagttgggcccttccaaggagctagagaggcctttaggccccagcaatactgaggggccacccaggtgacctggaggcccctctgcccgggccttcaaagcgaggagagtgtggccacagccctggcctggttgtggaggggggtgctgcgctggcccgcggctgctgggactgcaattgtttggattgtcactgaccgtgctttgtttttgtttttttctcctcactcctgggctcgttctcattgctttctttctctctccgcttccccctcccgtgtctggtcctatctctccccttccccaccccattctcttgtcctctgctcttcggcctcttccggcatctctctgtttcttatctcagctggaggttctgcactaccgactcagtgtctccagcgccctctacagccccgcccaacccagcctccaggccctccacgcctaccaagtactggctcattcgttcccttcctcctgcccagagtgcatgtccatgcctggcaaagcaaggggccgccggggccggccgctggtgactcagaggctagttccaagcagaacgaagcccctgtgtcggggggaggcaggggtcagcctccagcctggcttggcccctggctttgtagactagtttggttgggggtgggggtggtggctttgtggcagaacgaggcatgtgggcatgtggccctggctgtccaggctccaggccagtggaggtgtcacaagctctccagtgttggaggcctcgtgcttggccctggtttgaagagctggagtcctcaggcctcagcagtggctgggttcactgcactctgcagggtctggcgcttaggaaggagctgaagacgcagaggcctgggacttacgggtggtgtgggttctgccttgttcagaactgtcacccagcctggaggtgctgtgacccagagcttgcgtgtgaggcagggggtgggaaggacctggggcttgaccctatagcccacagaagctgtcagtccttgacagcccagccaggacccggccttcacctggggagccctggccgctcatacacacctccagaggcagattagagtgggtggtgacctcatagaggttgcagctgcctaggcagaaatgacaagtgtgtggatggatttgaggtcagtgaagcagagttcagacctgtaggggacttcagggatgacagaggaatctgtgagagccgggggagacgggctgtgctcacagccagtgatctgtcccattcacctgggaaagagcacacatgattgaacaggaatttgagcataagatgagaaaatgtgttggctccttagcgctggtgggctgggatggtggccacagcacacaggggcacctcattccgcaggagccactgcagaggagaggagggacctgagggcttgcgccagggagggaggacagtggtccagaaagcatctggcaaaccccatggtgggagggtgaccagcgagacccaggtggggtgagctgaggtgctgtgagtctcagcccagtgggaaatgtgcggctttggggacacatccttaagaagcaagcaggtgactgtggccagggactccatgtgggaacatggcccaggaggggtgcagagctgagggagaagtttggctcagcaaacctatgggaaaatagcctgagagggttccatgtgactgccggcggtatgggcggacagtgggccctccagacccttcggaaggaccaggtgaggtgggtcaagtgcaccagcaggggaaagcagttttccagttcacatgtggaggtcttcccctccccttagctgcaggaaggatgttacggctcaggatcccaggccaggattggagggagggctgggctgagactggaggaggagaaaaaccctggtctaacttcccaccccactggtgcccttctagttgggcagtataggtacaggtattatgtctcatacttttctccttctgtctttttttttttttttttgagatggagtctcactccgttgcccaggctggaatgcattgacatggtctcggctcactgcaatctccacctcccagattgaagtgattcttctgcctcagcctcttgagtagctgggattacaggcatgtgccacccacccggctaatttttgtatttttagtagagatgtagtttcaccatattggccaggctggtctcaaactcctgacctcaagtgatctgcctgccttggcctcccaaagtgttgggattataggcgtgagccaccgcacctggccctttcttccaaaacaatgcaaattcattgcccaaagacttaacaatacagatagagaaaaatagccagccacgatggctcatgcttgtaatcccagcactttgggaggttgaggcaggcggattgcctgagctcaggagtttgagaccagcctgggcaacatggcgaaacccctgtctctacaaatacaaaaattagcctggtgtggtggtgtgtgcgcctgtgttcccagctacccgggaggctgagatgggaggatcccttaagccctggaggcagaggctgcagtgagccgagaccacgacactacagcgcgggtgacagagtgagaccctgtctcaaaaaaaagaaaatgcctcccaccccatagctccatcttcagactcagccacttatctctggggtgtgtcacttggacctgtggggacagtttcctgacggggagacttgagtgggtagcgatatgggcagtggcccgtgcggggtctacagcataccaggatatacctggaggctgggccctgcaccagcctcagcagcacagatgtgttacggcccaaagggctaggggacaagtgtggagaggcgagcatgtccactcagactcagggtcctgccctcagcacccctacttccctgccctcgtctactctcgatgcgcccacctgccctcccaatgctaaacaaccagaggaagcccatggccaccaaaaaggctttcctctccggctagatctccaggatcctgcttgtatgttacaaatcaaaagtttggcctaggctggacacagtggctcacgcctgtattccctctctttgggagacctgaggtcaggccaacatggtgaaaccccatctctatgaaaaataaaaattagctgggcatggtggcacacacttgtcgtcccagctactcaggaggctgagtcaggagaattgcttgaacctggaggcggaggttgcagtgagccgagattgcgccactgtgctccagcctgggcgacagagggagacgttgtctcaagaaaaaaaaaaaaagtttggcctaatatgcttgactgtgcttttgtcttggggttttcctgaccacaggtccctgggcaacagaggaagtgacgcccggggcttctactgggccgagttctcatctggctgtgtccaggatgaggagcaggtgggaggaattggggaggaaagtgaagccatggggttcttatttttgaaccaggtcttactctcacccacgctggagtgcagtggcacgatcctagctcactgcagcctcaaactcctgggctgaagtgatcctcccaccctagcctcctgagtcattaggactataggtgtgcaccaccacacccagctaacttttaaaaattttttgtagagacagggtgtccctatgttgtctaggctaatctcgaacttcttcttagcgatctttccaccttggcctcccaaagtgctggaattacaggtctgaggcaccacacctgggttccatgtgctttctgcacacacttgggaggcaggtgggagaccctggatccagagcttgtgggtgatgctggctttctcctgccctggggatcaagacaggcaccagcgcccaagggcacagcctgtgccacccgctgcggatttgcagccgtgcagaagcagggctgggaggccctctgcagatgtgtctgtcttagtgaggcctccccagggctgtgtgggcgctgggccaagcacttccataccacaagctggtcacagttcagaccaagcagtgcaaggcacatctgggtgccaggcacagtggtgccccatggggtggccccactcctggcctggctcatgcctcccgtgggggcagcagagcaactggctcagggcgggatgtggtcagacctggaggcggagtgctatgggtgccacgctccttcccaggccctcacccctccttctccacccaggagtcgttcacgcctactgaggagcatgtgttggtggtgcgcctgctgctgaagcacctgcacgcctttgccaacagcctgaagccagagcaggcctcaccctccgcccactcccacgccaccagccccctggaggagttcaaacggtgggtggcccttgcggcttcccaccactgccgtctcccccactttcccctcctaaggtgtcgcccacagcgacctctccccagggcatggagggcagggtgaggggagtccctttctgttcacagagcacgtgaggcctctccaggcctaggcaggtgtcctctcaccccgcccagttggctcccagagcctctctctccagactggccagagaggccccattgtgctgccatctcttgcatctcatattcttcaaccctgtcagaagagttggggtggccctgactgccaggcccaccagggccagcagagtgggctgtttgtatgggacggagggtgaggtgtgtgcaggagttgtgctgactcggccgcctgcgtgctgtgtgtccttgggatgttccctaacctctctgaaccttgatttcttcctctgaagaatggggctgaacctcccggaggtgcccagtgctctcccccggcggagccaaccctcactgatgggagccctggggtcatctgtgagcagggcctccttactgggcaagcagcaggtgaccctccccatcccctgcagggctgctgtcccgaggttcgtccagcagaaactctacctcttcttgcagcattgctttggccactggcccctggacgcatcgttcagagctgtgagtgttggccccgtcacacgtgtgcctgtgtcctctgtgtgccttgaggtgggaggtcctttggggcagataaaggaggagagcaagtgttatcacagaggccttggcaaggagggggtcttggagggccacattgttctttctgtttgagtttccaaagccagccctcaggaaagccctgccctgtcccacctgtctggtgcagggcaggttcctacccttacctgaccagggagtactctgccccctgggctgggaaaagcccaccctggcttctggagggccagcaagagccaaacctcacagggctgtgcatgtctctcctgcgccctctggaggaagtgagaagagtcagtcccacccagctgccgcctggtatctgggctccaggccaccgagtatttggcccccagccacggagcccttagcacacacctcccccacaggtcctggagatgtggctgagctacctgcagccgtggcggtacgcgcctgacaagcaggctccgggcagcgactcccagccccggtgtgtgtcggagaaatggtgagcctcagctcctctcacagacatgccactggctcccccaggtggatattgttccagtgggtggaggccaagccagcggcctgtgctggggtcagcctggccctggcccccgtggcctcctgaagtcctctcccagcccctgccgagcggaacacagaccagccttttcctaggctcaactttgccaggccctagaattggtttcttatggaagctgtgggtgacccatcctgccctgtcccctctcccttctgtcccagatgagtgtttagccacccccaaactatcccttgaccttcatcagcacagaacagagcagcggtgatcaagcaggggatgagggaggctgtcttcccctcatcccctgcttgatcctcacagcggacccccaggcttccgtggcacctggcatggccactgatccctcccctccttgcccaaggcattcccctttggaccctctgggggatcctccctgagccccctcaggctctgggctggcctctgccatggtggcctccatccacttggaaaggggcctcagccttgctaaggatgtggcatcctcagagggcctgggtcttacctgcctctgtcctgtcctccctgcctgcccgtggccccctgagctgtcatctgtgacagcttgtcaccttggctaaggagagtctgaaagcccaagggtgagcaagggcattaggggcacggaccgggcattaggggcatgcttccagttggaaggctggccccaacctgccacctcggtccccagggcaccctttgtccaggagaacctgctgatgtacaccaagttgtttgtgggctttctgaaccgcgcgctccgcacagacctggtcagccccaagcacgcgctcatggtgttccgagtggccaaagtctttgcccagcccaacctggctgagatgattcagaaaggtaagtcctcagcctgggccagcccggtatacgtcaacccagccagaccagggccaggcccttagctgggggtggctggtctttaagagggacccacacgcccagagtgggccccggcaaagggtgctgtggagactcctgggacacgtctgtgtggtgaggtctgaaaccggctggatcctgcctgccctgcagccaccaggcactgggtgggggatcgcaggtgtgcccacagagcgggccggcacggtccaagctgcggccccgtgaccccgctgtttctccctggcaactcgtgttggccgcttcaggaggtgagcctggtctctgccttgcattcatcctggctgggttgggcgttggtttctgtcgatcctcctgttgtttacctcctgcagacactgctaggggctctgtgagccagcagctcccccatccgccctccccatgtcagccacctactgtgtgggagatgctgccaggcagggcctcaggaggacacccctgggtcatggctccccagacacctcagagacaccccagaatcctaagggcagcagtcgggtactctgcctccgggaagtgggtgccaggttcgtctcctgccttctaggtgagcagctattcctggagccagagctggtcatcccccaccgccagcaccgactcttcacggcccccacattcactgggagcttcctgtcaccctggccaccagcggtcactgatgcctccttcaaggtgaagagccacgtctacagcctggagggccaggactgcaagtacaccccgatgtttgggcccgaggcccgcaccctggtgagtggttcggcggtgcctgtcctcagggcccctggagccatggggctgagcagaacccgggaagtgctgtgatccagcaggaaggagggaggctgggtatagatttgacgccatatctccttcccccgttttagtaaagtctaattttttcctgataacgaaggcagtgtttcttgggaaatttcaaatgtagaagatcatcctttagtctttaaaagtcttctggcagaagccactcctcctgacgctcagcagtctggctgtgcattgctcttggggctgcctgggtggcagcacaggcctgtcctgctggtgacctgcccgcgcctcccttgcaggtcctgcgcctcgctcagctcatcacacaggccaaacacacagccaagtccatctccgaccagtgtgcggagagcccggctggccactccttcctctcatggctgggctttagctccatggacaccaatggctcctacacagccaacgacctggacgagatggggcaagacagtgtccggaagacagatgaatacctggagaaggccctggagtacctgcgccagatattccgggtacgagctatggggcctgccccaccgccatcagggtccccttccctgaaggatccactccacccagcctgtggtcagccacctaccagtcccaggccccacacatatggacccagtgttgtgggaggcaggcccacaccccgagcgtcatagctgggtccccttgttgccactgttgtaggctggtggggtgaagactggtcccctctcttcatcttgatgctgagggcagtggcatttctctctggcagctcagcgaagcgcagctcaggcagttcacactcgccttgggcaccacccaggatgagaatggaaaaaagcaactccccgactgcatcgtgggtgaggacggactcatccttacgcccctggggcggtaccaggtgagaggcccgtgtctcagaggcgcacaggctgggccctgacccgtccccagctccctcctcccttgtgagcagaggccatcaggctcctctgagttgtgtgtggggctgtgttttctgacccatccccatggcctggctttctagatcatcaatgggctgcgaaggtttgaaattgagtaccagggggacccggagctgcagcccatccggagctatgagatcgccagcttggtccgcacactctttaggctgtcgtctgccatcaaccacagagtgagtgggcaggagggctggcctggcgtcttcagagagggttctagatgctcctgcctggggtgcagtcctggggtggcctgtgagggtggggtactgctgtcctgaggcctgtggtgccaccaccccacatccccgtgcctctgtctgtgcttcagtttgcaggacagatggcggctctgtgttcccgggatgacttcctcggcagcttctgtcgctaccacctcacagaacctgggctggccagcaggcacctgctgagccctgtggggcggaggcaggtggccggccacacccgcggccccaggctcagcctgcgcttcctgggcagttaccggacgctggtctcgctgctgctggccttcttcgtggcctctctgttctgcgtcgggcccctcccatgcacgctgctgctcaccctgggctatgtcctctacgcctctgccatgacactgctgaccgagcgggggaagctgcaccagccctgaaggtgtcagctgccttcagagcaggctggagggatttgccacacagccccacccttgggctgagaggacctgggaagcccctccaggagggaacacggtcatcctcgggcttctggagcggggttcctgcagccgcagaggcatctggaggaaacgcaaccaagaaaggaaggcaggtgggccccagcaaaggagtagctgccagggctcaacagctacgctctgtgacagcgcagagctcagcggcggcctttccctccctccgccaaggactcacggccaagccagctctcggggccttttttccactgcccatttggctactctgctgcaccaagcttgggagccagcctgccaacagccacctgggcctggcctccccactggctggccttgaggttggcagagtgggttgtggcgcttcctctctctgtgtgggaccaggacagtggcttaagtctccactccaggaaagaatcaaagtttctagagttgtgagaaaaccagagagtggctgtcctgattcttcactgtgaggggcgttcttcatgttctcccagctgttccaagactgggccgtagaattccatgtttcaggagcctaagaccctcccagagcccaggggcttcaccgcagaccccaagccattgagcacatcacccaaagcagtggccaacatcgcggacccctgtgccttgtcacagatgggtgctggtcctcaggcgttggggacactgctgggtcgatggggtcggattctgccagtttctgctctgcagccaaagatggtcagaagcattgtcacttcagtaacatcaagtgctcaaagacatggcaaccgttcagtggtacttaagtattcaaaatatacaactacagattctctgacagaaaccagcacggggtcttcaccttcattcaccccacaggcgacatgcgagggagaacagcatctcagtggtgatttccaaaccaagcctttgttttcggtgtggggttttgggggtttgctttaatgtttttgaaattgtaaatgttgggctttgtattttgatgtaaactgagcataatggcattttagggcctgtgaccaaaaatgaagcttgtaacgaccatggatctgaataaacatgtccttgcttctgagtcttctggcacctgggctcagtctctaggaggttcacctgtacagagtccctgagcacacgggggctgcagaaacaactgttgggcaccctgtcggcccctcccgctagtgtccacaggcctggacctctggcttcctatgctttcctctctcagaggcacagtagactttgccctgcctttacaaaagattcaaaaagttaggcatggcggttcacatgtgtggtcccagctacttgggatgctgagtttggaggatcatcagggtccaggaggtcaaggctgtagtgagccttcatcacgccactatactccagcctgggtgacagagtgagaccctgttctcaaagaaaagctgaccaccgggaacatgtgctgccaagtctatggcttccagaagctctgaggattgcgggagttgctgggggctgaactgtctggccaggagcggagggcagacaaaaatgcattgagaaccaagaacagcaaagctgagtgaggggtcagggtcttggtggctgggacctggacagcgatggccacaaagccagctggtgctcagtggcttctccctggggagcgagggcagcagtgggcagctgggttccagccacttccaggtggggggtagggacctcgccaataaaatgggatttaaattttgccaagaactctcactgtagagaaaatgggactgctgggatgagagcagaagcaaaatgcagttgggggggcccggccaggaggcacttgtgagggacttccggggaaggacgagttggagcaactcaggggaagcagttctgtctggggcacaaggaggagggaggccaggctggaggcaggagctcctgcagattcttgtctccacccctggatgcttccagagtggtttgcctaactgccactgccaccgcctcctcagctcctaggatgcccttgactttttgccattgggccacactcccctgctaacaggccaaatccgatgcttttctgaccacgtggcccagagactctggcagcgcagcttcagcctgtcctgacaccacccctgcccccgcacctccgcatcgtcctccttgccccgagacaatcccgttccctggatcccattcgtggcccactcccttccatgatctaccgctaggatataccagcgcccccgtgatccaaggtaagtcagattctgatcatcttgtgcaagcaactcacaagcagaggccctgtgcagtcgggagaaatctatacctttccccttggacatccaagagcaagttagatcccctaaaggccagctctcaccaataaccctgacatttccaatataaatgagagagaactctctgttttgagacaaggtcttgctatattgcccaggctggagtgcactgcaccatgacagctcactgcagcctcttaactcctgggcttaagcaatccttccgcctcagcatcccaagtagccaggactacaggcatgcgccaccgcaccctgctaatttttaaatttctttgtagagacggggtctcactgtgttgccaggctggtcttgaactcctaggctcaagtgatccgaccgcctccgcatcctgaagtgctagggttacaggtgtgagccaccacactggagagcggactcttatgtagccttcactgtaaaaattaagctagcttcccttgactcccaaaaccagaattcctagcataattttctcaagtcacaaggtgcgaaaatatatcaaattatttcccagtcaagaattcctacttttggccaggcgcagtggctcatgcctgtaatcccagcactttaggaggctgaggcaggaagatcacttgacgtcaggagtttgagaccagcctggccaacatgctgaaatcccatctctactgaaaatacaaaaattagctagtgtggtggcgcatgcctctaatctcagttacttgggaggctgaggcaagaagatcgcttgaacctgggatgtagaggttgcagtaagccgagatcgtaccactgtactccagcctgggtgacaagagactccttctcaaaaaataaataaataaaaaaagtgataaattggcagctggcgccagggacaggccatttcctgatgggccacacctatttcactaaagtgttaattgaatgcagattccagggagaatcaacttcccaggcatgtgcattaagagacaaagtggtggagtatgaccttcggggggcaccccacccaaaaacctcagatgggcatgcatacagtttcctaaacacactgcatgtgtttaggaactcccaagggtaaggagggtactgtacatgtgggcagcccaccctaagggaaggatcatgggaaaggggccagtctagaaagtcctaggatcaaggttaaacaccacacttgactttcatgtgcccacttaggtctcttccaagcgtactttcctttctttcctgttctaaagccttttaaaatacacttccactcctgctctgaaacttgcttcggtctctttttctgccttatgcccctcagtcgaattccttcttctgaggagccaagaattgtggttgctgaagacccatccggattcactgccagtgacttggacaccttccactgctaacactattaactcggacaccttccactgctaacacaataacactgggttattgtgtttatttggagagtgcgtatggtttaaggagatgtgtatgggtgccaggttgacaaggggtggacttgtgatggttaattctatatgtcagcttgtctgggccaccggatgcactcatatctggttacacattatttcctggcaggtctgtaagggtgttttcagaagaaagtggcatttaaattggtggtgcaagcagccatgcatgcatttctggagtagcttccctatagcttgcaggaaccagagcgggcaataagagccccatcctccaaatactggggatctgtgctctgattgatgatggctgctgttgattgtgaaaatgcagacaaagaggcaggcagccactgctgcaatctccactgctatgtttgcaacgtccctcctcaaccctcactgcctccctgggtacacaccttccaggaggtttttatggatcagcacctcctcctgccttcatttttcttttctccttcttgggaaccagatgtttaggactaggacattcaaaagcaaccatataccaggcacagtggctcatacctgtaatttcaacacttctggaggctgagggaggaagattgcctcagcccaggggtttgagaccaatctgggcaacatagcaagacaaaaaaaaaaaaaaaaattagccaggcgtggtgtgtgcctgtaatcccagttactagggaagctgaggcaggaggatggcttgagcccaggagttccaggctgcaagtgagctataatcgcgccactgcactcctgcctggatgaatttctctccactcaggatatcctccctcccagcaataatattgctaccattcattccagctatccataaaccataattactaaatacatgttgccataatttttttgaacaacctgtcatctattaaaaataataataaagattatattttattttactttattccttctctaatgcacttccctttttttagatccaaatttcctatatctttttccttctttttttgaaacagggtctctctgtgttgcccaagctggagtgcagtggtgcaatcacggctcgctgcatctcagccttctcagtagctgggactgcaggtgtgcaccaccatgcaggcaaactttttagttttttgtggagtcagggtctggctatattgcccaggctggtctctaactcttgggctcaagagatgctcctgctttggcctctcaaagtgctgggattacaggcatcagccatgcacctgagttttcatttctgttgtgtttttgacttcttacattttcttttagttttttgagatggagtctcactctgttgctcgggatggagtgcagtggcaggatctcagcttgctggaaacttcacctcctgggttcaagcaattctttggcctcggcctcctgagtagctgggattacagacatgcaccaccatgcctgcctttcttttttctttttttttttttgagatggagtcttgttctgtcgcccaggctggagtgcagtggcatgatcttggctcactgcaagctccgcctcccgggttcacgccattcttctacctcagcttcccgagtagctgggaccacaggcgcccaccaccatgcctggctaattttttgtattttagtagagatggggttttaccgtgttagccaggatggtctcgatctcctgacctcatgatccgcccgcctcggcctcccaataatttttgtatttttagtagagatgggttttcaccatgttgcccaggctggtcttgaactcctgacctcaagtgattcacccacctcggcctcccaaagtgttgggattagcggtgtaagccactgtgcctggccaacttctcacattttcttttcttttcttcttcttttttttttttttgagatggagtcttactctgttgcccaggcttgagggcagtggcatgatctcggctcactgcaacctccacctcctggattcaagcaatcctcccaccttagcttcccaagtagctggaattacaggtgcatgccaccacactagctaatttttgtattttttagtagagatggggtatcaccatgttggccaggctggtcttgagctcctgacctcaaatgatctgcccaactcagcctcccaaagtgctgggattacagacatgagccaccctgcctggccttcacattttctttagattatttcttagaacgtctacctctctgttcccattatcagtctgtaatctcatgttgtccactttttccattagagcccttagcatattaatcatagtcgtattccatttcttggtctgataattccaacatctctgccatatttaagtgtggctctgatgcttgctgtgtcttcgaactgtgttgttttttattatgccttgcaagtttttgttgagggctggtcatgctcaaccagtaaatggactttctgtgtgaagttttatgttggtctggttaggggttgtgccatgtgtgctgtttgttaactggaggtgtcagaggcttaaacctcctctagtgtcttagtttttgtctccctgttgtctttacggtttcctagagatttctcgaataagctctgagatgagcagttctttcacttgtatcccctgttattatacaggagccccgctgatgtggcagtaagatgtggggaaggagagccagagcaggctggggttagctatgttcccttcctccaggtttgttggtgtctggcaaaattatgattggcctggctgtgattttttttttttttgagggcaggccttgtaaaaaaaaaaaagactttttatttttattatttttaaatttatttatttatttattattttttttttttttgagacagaatcccaccctgtcgcccaggctggagtgcaatggcgcgatcttggctcactgcaacctccacctcctgggttcaagtgattctcctgcctcagcctccggagtagctgggattacaggtgtgaaccactgcgcccggcctcttatttttaggcagcatctcactctgtcacttaggctggagttcagtggtgccatcatagctcactgcagcctcgacctccggggttccagcaatcctcccacctcagcctcccgagcagttgggactacaggcgcaagccaccatgcccgggttttttttcttttaatttttatagagacaggggctcactttccatccaggctggaaaggatgccttttattattattattattattattattattattattattattttagatagagtctctgtcgcccaggttggagtgcagcggtgcgatctcggctcactgcaacctctgcctcccggttcaagctattctcctgccttagcctccggagtagctgggattactggctcccgccactacgcccggctaaattttgtatttttagtagagtcggggtttcgccatgttggtcaggctggtcaggaactcctgacctcaagtgatccgtccgcctcggcctcccaaagttcggggattacaggcgtgagccccggcgcccagccctggatgccttgtaaatcactactcacccaggaagagccagcgacagccccgcccccgccaaacgcctggcgccctccgtcgcccggtttccatggtgacggggcgccaggctagggcggcctggccactgagccggggtgcagtggcagcgggagagtacctggcgatggcgatatgagcggtgcgggggtggcggctgggacgcggccccccagctcgccgaccccgggctctcggcgccggcgccagcgcccctctgtgggcgtccagtccttgaggccgcagagcccgcagctcaggcagagcgacccgcagaaacggaacctggacctggagaagagcctacagttcctgcagcagcagcactcggagatgctggccaagctccatgaggagatcgagcatctgaagcgggaaaacaagggtgagccggcgcggggccctaggccggccctgcctccccaggcacactcaacactgccgctcccgcagcacagaaacacagccatcaactccagcacacgcctgggctcagggggaacacaggacggtaagcccgccctgccacgctgagctgtcccctcctcccagagggagacccgcgtggcccccgggcagtgccgaacctgtctgcctgtctcctagggcagcagcatttcagatgctgactccgccagtcctctcctctccaagcagggtcagacacacctctgttaaaaactttatagaggggcccgggcgcggcggctcacgcctgtaattccagcactttgggagaccgagacgggcggatcgcgaggtcaggagatcgagaccatcctggctaacacggtgaaaccccgtctctactaaaaatacaaaaagttagctgggtgtggtggtgggcgtctgtagtcccagctactcgggaggctgaggcaggagaatggcgtgaacccgggaggcggagcttgcagtgagccgagatcttgccactgcactccagcctcggtgacagagcgagactccgtctcaaaaaaaacaaaaacaaacaaacaaaaactttatgcagggaaacgtgcccaagtgcgagtgcgcagctcagtgaatttcttccagctaaacacatcggatcaggagcaggcattcccccgccccccaccccgtccccgcttcgcctgtgcccatgctgtcctccggcggggccttcccaactgcacccttagctgctcctcacccccacgcccccctttctccctccctcctcccccacccctcctgccccgagcaggaggagggcccgccaggatgtgggatgtggctccgctcctcgctcttgcttcaggagggctccagcaagggcaccagtgcccgcggcctcctctcccgccccgttccctgctgctgccttacctgagtgccgagtatcccatcaccaggcgtctgttttgtcaggaccccgcttccccatgtcttcttgagcctcaggacgccccgttcctcatatcttcttgagcctccccccagtccctgatgcccacgggatcatgacaccgccatagccagggattccagagttcacctctgtacccctaaagcccaggttctgcctggcagtgtggacgccctccagtcatctcagatggatgaggctgatatgccaggtgggctctgcctagggaacaggcaggggccactcctggcctgacacccacgacaaaggcatggtggagagcgggatccatggggcagggcccaatcagccagtgggggggcaggactttcgggctcagcagccaggagaggacaggccaggcttcttctctcagaatggctgtggtttcacaagtgctgaggagagcgtgtgcttgctttcagatctccgttacaagctcataatgaatcagacatcacagaagaaaggtgagaactgggcccttcagttcctgatgggatgctcttgccacccaggggagcccctccagactgtccttgcccacctggctgcactggcccctgtatgccaacccagtggggacaggttctgggggacctggacagatgccgctacctctagccgtggctggatgatgttacgcagccaagcacagcacgtgctgctctcaggaagcccagggcctgaggtcattgcagtggggaggtgggcacagggtgctccccagacctccctcctccaagtagagctgaaatgggaaggaacccctgggacagcccctgccctgctagatctttgcctcagattgctgctgtggccaggcccaggatctccagccctatggctctgagtcctgacatgctgggggcccaggggctctggacacactccatccagggatcccttcctgccatctgggcagcaaccatggggacaaagggaggaagcagagtcctgtttccttgccacttgtccaaggcacttccccatcctgacagcggcccccacccagcccaggattctgggttgtggtctcgagctcacttcccgttatctttggggctggggctgacatcaggaggacatctgactggtggatggagccagcctgggaacatcgtagctggggcagtgcctagggctctcccttcccagagagacatggagaatggggttgagggagggcccttccctagccgctgtggcaactccagtgagctgttctgggcaaagtgtggcccaagtcggcagccccagccctgcagtgctggggacgctgacaggacacgggaagaggccatgctctccctcgggacctgctgttccatgtgtcccaagccctcctgctttccagatggcccctcaggaaaccacctttccagggcctctgctcccttgggcgctcgctgggtctgcatcaacggagtgtgggtagagccgggaggacccagccctgccaggctgaaggagggctcctcacggacacacaggccaggaggcaagcatgggcgtcttgcgggcggtagcgccgacactgtgcgctctcctgcagacagcctctccacgtcaagcttccagtctgtcaagtccatctctaattcaggtgagcaggctggcgtccatgtgctcacaggggtgagtgccccacggggaccccagcctgggtggcctctaggggtgctgaccaggtaccctctgctgggccaagctccaggatttggggatgaaggtgcagctgaaaagagccctgcaagctgaagccaccgggaggggattaagggggggtgggcaggaccagggaccagtcacagggcagtaaggcctcacagcaggcaccccagggtggggcagcaagcaggcaggaggggcctccccgggtggccgcctagggaggacgtaccctggctgcccagcagcagccctgcttggccgtgtccccgccacaagcaggcaggacacaggagggatggcactgcccacggagccctgggctcatggcaccttctgcagagtgaactgggagcagagagcctcttttccccactctgtgaggccgggcattttcctcagcccagccctaaccctcaccattcctgtgatgggcccaggtgctggacgggccttgtccttgccgaggaaacccatgcaggctgggtcccaagcctctcatgcagtttcattttacccaagatggggccagcttccactatgttgattgttctagagtgttcacaggcaccacccatgggcttcaccctcagaaccacattgattccccccagaaccctccaaggcaggcttccctttacagaggaggaaactgaggcagggacaggggcttcttgggtacacacagctgttcctggaaaacttgggcggtgactgttggtgcctgcagtgaccggccttgtagggtctgacttgcagccaactctcaaggcaaggccaggccccagcccggctccttcaacaagcaagattcaaaagctgacgtcccccagaaggcggacctggaagaggagcccctacttcacaacagcaagctggacaaggttcctggggtacaagggcaggccaggtaaggcttgggtgttcctggggtgcaagggcaggccaggtaagtcttgcctgcaccctaagggccccatgactacatttactaggctcacgccctgcagtcagccaactgctctgcccctagctccaggggcctgtctccagggctcatgatagcagatgacggccacgctctacccatcggtgggcgctgtcttcctcccttcccctgggggtcctgcagagtacctgtgctgacctgagcccacgaggggggccagtagcggcccctaaaccacttcctcagagaaaagtaaagtaatattctgaccaagagaaggcttgctgcccctggccacagcctgcctttggagggcactaggccagcaggtcagagtaggaacaggttctggtgatccctgagtttgcgggactgccctgagatgctacagagcgcacactttcagcagcgcaaccagcaggacaggctcctgcatctgcacatcccgagaccaggcctggagcaagatgccccactgggtgtggggtcacgatcaagagcagcctggcagctagctggtcacccactgaagcccatctgacccttagggcaccttcagaggggagaaagggacaggccccagtcccagagacccccacctggtgcccagagcaccctgctcagtgggagaggggaaccaggccctcttccccacattggcctgggcgctgcctggggaggtatgctgggtgggtggttagacgcacctgggcaggtcacctctggctgctgcaatgactgtttcagaaaggagaaagcagaggcctctaacgcaggagctgcctgtatggggaacagccagcaccagggcaggcagatgggggcggcggcacaccccccaatgatcctgccccttcccctgcgaaagcccaccacacttaggcagtgcgaagtgctcatccgcgagctgtggaataccaacctcctgcagacccaagaggtgaggccctgggtggtgggggtggccctgggcagtctggcaccgccacaggccccaccacgcccctgcccctgcctttcagctgcagcacctcaagtccctcctggaagggagccagaggccccaggcagtcccggaggaagctagctttcccaggtgagtgcctggtgcacccctgccccatccctgggggcctatccacagctcactgctgactcttccttcacccagggaccaagaagccacgcatttccccaaggtctccaccaagagcctctccaagaaatggtaagtcccacaggcatggggacagtggggcagccctgcagcctgggccccagggagggagtggggaagggagcgtggcagcgcagaagcggagctcgctgaggcctctctgtgcccccgtgagggccatgcaggccgcactccccacacactccactcgcgaggatgctcacggtgacagtccctctacccgcccccagcctgcttctgagcccacctgtggcggagcgtgccatcctgcccgcactgaagcagaccccgaagaacaactttgccgagaggcagaagaggctgcaggcaatgcagaaacggcgcctgcatcgctcggtgctttgagctacccgcatctggtcagtgccaggcccaccaacctgcagctggagattggctctctatagcatttcctgacacttccgctacttttaggcctggctaaattccaagatagataacactcaagatagataaagtacttgatctccaaactgacaaactgtttattttctagctgttattttgctatttggcatttacataaaagcacacgatgaagcaggtatcgccttacctgttgaaactgaaaataaagcttgtttatttccaagttgtgtgcctggctcctcactggctatcaggcgtcgcgtcccttcccagtcccagcccttggcctctagcccaggccccgctgtctgcagggacctgcctgggcagcccagtcttgcgcatcctgggacctgccagcggccctgggagacaggcattggcagagccatgcacatcctccctggaagcgggagggcttttctggtcccctggctgggctggagctgcgttccaaacacatgatcactctgtctcttgcccacactgcacactcctgggggcaagaggctgtcctctgctgccctgacacagcaccgcagacagggggtccagccaggctcgccctcctcctcggagggctgtctcgagtgccgtggccatgcccgcaccaccccttccgccacagcacagccatgtccatgtcgggggtggggtggccagcttagtgcccaccctcagccagccacacagtcttcccaggcccacggcccacttcgttggcattaatctcagcctcttcctgcttcagggagcagaactttgccaggaagctggggatgaaccaggccaaggaatgggacagtgcgtcagaaaggacagcccaggcccgggggcttacagcatcctaacaggacagcaggcccagtttcatggagtgggggacacagtgacgagtcctgacaaacacaggaataacaagattataacaatcacagatgatggggtggtatgcattaaaaggggcgactcttgtcaccaaagggctgctggccggtgcccagggcagtgggcaacatagggaggcactcactgcatggccccacccaccgccaggcccgcactctctgggtggcagtgcgtagtgttctgaggacgcgggtccagagggcctggctcttcatccttcacaatggggacacggccctcacacgagtgacacaggggtgccggcagcaggatcccccgtgcccctgctccctgggggccccacagtgctcagcaggaatgccgtgagggctgaggcccagctggtggtggggagctggcagcagccatgggccagccctccctccgataggcagcctgtgccctggacttaggggcttctctggggggtgccccacctgcccaaagcagcacagcctgaacccaaaactgtgagcagagaatccgatgtgtgtttgaagggtttcctatgtcctctgtgttctcctatagaaaggagcaggggtgtgttgagcacacacaagatgctctaacaacaccctgagcgcaccctcatgccgctgagatggacctggaccctggacaggccacggcgagcagcccgctccaccacgcccatctcagtctgtacaagtgcgggatttcatttggcagatccccaaggcaggagagaaaaggaggaaagctaacctaactccaggctctccatggacgccaacacctagaagtgtctgacaggaggcatgcgtccttggccccgatgaggctgcgggccatccctgcagtcctggctaagcagccgaggcaggccttgtggatgttccgggcacaggtgttgagcaaggtggtaaccgagtgcttttccaggctgtggctgcctggaggtcacgcagtggtgcaccgacctgaggaaggggttggtgcctgcaacagaacaatgggcatgagcctgaggcagctggtgctgcacccacggcctgcacacccggcagtgctctgggaagtggcagccccaggactggctgaagcaccaggaggagccctgcacgctgcctgcctggccatcgggctctcctcccagagcctcattgtcagtgaagaactgaatctgaatggggtttggagcccagggctttgcctctgacaaccttggggacccagccctggatctgctgtgtgccagctctgggctcagggacactgactcctgtcaacatgaccctctggagccacatcgcccagatggggccttgtgtgcccaagctactggtaggacctgtcagccccgctgagctccctggtggcctctgggaaaagcagggtctgtccttgagccgtaggctttctcacccctcagccactgaacacagccaccctggacaactgacctgacacaagatgaaggggcaaagggacacagaagaagagcagagacccctctctctcaggtgaccactggaaaacctgcgcctgcccgtgcagggggagtcagaagaggggagggaggggcctgagctgggaggggctggagtgcacagaggctgtccctgcagcactggaagcctggtgttccagaatgacccctgcctgccctgggcccccagacagctccctctgggtctgcccactgtatagccactgccggtccatccacagtggactctgggtagggtagtgggtgggcacatggtggcacacttgggaggtccttgtcgtttgcaacacacaaggctgtacctgtgacccagacaagccctggcctgccccgcctcacagccctgctcccgaacaggactcttcacacccagggaggttctggtgaggcttgcggcaaagcctggatgtctctctcactctcggatttccaaacctgaagccagagtgacctgcatcaatgggtgcccagaggtcctgcgtgccacctccctagggccccaggcaagcagagccgcatctgtgttggggaggtgagggtgcgtgggctccgggggtgggggcagaggcaatggccagtctgtcctgggcccagaagacagagcagacaacctgctggcacgtgaacataggatggggtctgggcactgtgccctccagcttggacagcagaggcctggggctgcagttgggggttgctctcttgcgccagcctggccctcctggacactcgcccagcttgcagatcaggcggacggtgccgttgttgctgcagtgagaagggtccaggtttatcatgcacttgggctccaacctggccaccaggccctggagcacactggggatgctctgctgctcatcgtcctcaagcctgtgcttctgggtgcataccactggggccttggggaggcaccatggtgaccacactgggcacacatggcccagggccaggcagccaccctctgcgaagcccagcccagctggatgtatgtgatgggtgggctgtggatggcaatcatggttggcatgaatatgcggtacagggaatggttgaagagggtgagcggatgttggccaggatggcatccaggagcagctggcataggtactgctgtttggtcagtggcaccgggggcagtggggcagtgggctggagcaggatgggcatggtcagcagcccggaacccaagggttccccatgtagggggctttcccaccccaggcccgtcctcactcacagccagattcccgaggcctctctctcagcctccacccttgtgcagacaatgttggctgatcctgggtatattccctacccccacagctttgtcctccccagagtccctgccccctctgggccaggtggcagaggcaccgatgggggccacagacagagagtgacttctcccatgttcccacccagcacagcaaacctggcctggaagaggcctggtgggcagggtctcaggtcaggcccagcccctacccagccaccctaaccttgaaggcccctcccagtggtgctcccaggagctcttgggggagccccaattcccccagggatgcccaggatcccactcaccactgccatgtcattcttgagttttcttttttttttttgagatggagtctcactctgtcgcccaggctggagtccagtggtgccatctcagctcactgcaagctccacctcccgggttcacgccattctcctacctcagcctcccaagtagctgggactacaggcgcccgccaccacgcccggctcatttcttttttgtatttttagtagagacggggtttcaccatgttagccaggatggtctcgatctcctgacctcatgatctgcccgcctcagcctcccataatgctatgattacaggcatgagccaccgcgccaggccaatatttttaaataaaaaattacaaagctgtttttcttaaaatgttacaataaaattgtatctgtgtataaaatgtatctattttatgtgtacgtgtgtgtgagtgtgtgtgtgagagagagagacagagagagacagagagagagagagagagagagagagagagagtgagttatgaattaggaagcatatgtaccaaaacattaggagtagttgagtaatgagattatgaatgattttcactttcttctttataccttatcaatcatcatctcaaaatttacaatcagaattcattataagctattgtttgtttatttatttatttatattcgcagtggcgcgatctcaactcactgtaacctcagcctcccagggtcaagcaatcctcccacctgagtctccggagtagctgggacaaatcaaagttaagttttcttcagtttaaaataacttgatataattatgttgtttagcctcatggtaaccagaaaacaaaaatcaataatagacaccctaaaaatgaaaagcaagcaattgaaacacactaccagaaaaaattatctcactacaaataaagacaggaaggaagggaaggaggaaagaaaagaaagaaagagagagatcagagagaagagaaagaggaaggaagagagaaagaacaaaagaaaaaagagagaatagcaaaacaaccagaaaacaagtaaaaaatggcagtagtatgtttttacctgttaataataaccttgaatataaatgaattaaattctccaattaagacagagtggctgaatgaattaaaagacaagacccaattatatactgcctacaagaaactcagttcacctatagacatacatagactgaaagtgaagacatgataaataatatcgcacacctgtggaaacaaaaaaagcaggagtagctctacttagattatatagactttcagtcaaaaaaagaaaaaaatgaagataattatataatgagaaaaagtaaacagcagcataacaattataagtgtatatgcaaccagcactcaagcaactaaacacagaagcaaatattaacagaccttaaaggatagactgcaatacaataacagaatgcctcaatgcttcgctataatcaacaccccactatcgtcaatggacagatcatccagacaacaaaacatcatcagttaaactgtactctataccgaatagacctaacatttgcacagctttccactccgcaactgcataatgcacattccactgaatagaatatggattattatccacaaaagactatgcattaggccaaaaaacaagtcacaacacatttttaaaaactgaaatcatggccgggcacggtggctcatgcctgtaatcccaggactttgggaggccgaggggggcggatcacaaggtcaggagacagagaccatcctggctaacacagtgaaaccccatctctactaaaaatacaaaaattagctgggcgtggcggcgtgcgcctgtagtcctagctgctggggaggctgaggcagtagaatgccgtgaacccgggaggtggagcttgcgtgagccaagatcgcgccactgcactccagcctaggcgacagagcgagactccgtctcaaaaaaaacaaaacaaaacaaaactgaaatcatatcgagtatcttttctgaccacagtggaatagtactagaaatcaataacaggaggaaaaactgtacaaatacatggaaattaaaatacatgctcatgaacaaccaataaataaatgaaaaaataaaaagaaaattaaaaatttattgaaaaaagaaacacaacataacaaatcctgtgggatgcagcaaaagcagttgtaagaggaaaagggcatagctataaatgcctacatcagagaaaatagaaagatctcaaatagccaacctgacagtacacctgaagtaatgagaaaaacgagaaaaataaaatactaaaattagcacaaaaaatatcataaagattagagaagaaattttaaaaatagaaacaaaaaatacaaaaagtcaatggaacaaagagctggattttttagaaaaaaatcaaaactgacaagctttaactagactaaggaaaagaaaaacaaaacaaaatgatagatgaaaaaggagacattacaatggataacacagaaatatgaaggattgtaagagattactaaaaacacctatataaaaacaagttggaaaatctaggagaagtgataaatttctggacacataacaaattcccaagatagaatgataaacaaaaaaccggaacaagatccataatgagtaatgtaattaaagcagtaataaaaagtcttccatcaaacaaaaacacaagaatcatggctttattgctgaattctaccaaacgttttttaaagagttaatacgaattttactcaaaatattccccaaaaaatgaagagaaaggaagtcttcgaaacttgttctatgaggacagcatgaccctggtacatggtacaaaaaccagaccaggaaacaacacaaaaagaaaaccacaggcattttaaatatccctgatgaacacagatgcaaaaaaattttcagcaaaatacttgaaaattgcacttgacaacacaataaaaagatgatctgccatgatcaagtgggattcatcccaggaatatgaggatgattcaataaaacacaaataaatgtgcgacatcacattcagcgaatcaagaacaaaaaccatataatcatttcagtagatgctgaaaaaaataaaaatcaacattccttcatgacaaaaactggacaacatgagtacagaaggaacatatctcagcgcaataaaggccatatatgacaaacccacagctaacatcataatcaatggggaaatgtttaaactcttcctctaaggcctggaacaagtgtggctacttttacgccacttttattcatcatagtactggaagtcctaagtggggcaattagacaagagaatgcaataaaaggcatccaaattggaaaaaaggaagtcaaactgtttgtttgcaggtgacatgatcatatatatacacagagaaagagagaaccctaaagattccacaaaatcacctactagaaataatttagtcaagttgcaagatacaatatcaacatataaaaatcagtagcacgcccatgcaccaatagtgaaatacctaagaaagaaatcaagaaagctatttcattaccaaaaaaattatatctagggataaacttaaccaaaaagacaaaagatcccacaatggaaactctaaaacacagatgaaagctattaaagcagacacaagtaaatggaaagatatcccatgtccatgcactagaagaatattgttaaaatgtctatatcacccaatgtgatctagagagtcaatgcaatccatgttaaattacaaaagacattcttcatagaaatagaaaaaaaaaatcctaaaattcacatggaaacgcaaaatacctcagatagacaaaagaatctggaataaaaagaaaagctggaggcatcacacctgacttcaaaacatactacaaatctgtagtaagcatggtaataccaaaacagcataatactatcaaaaaaaggggcgggggagaaacagaaacgaaggaatgacagacatagacaagtgaaacagaatagagaaatcagaaataaattcacccatttatggcgtactcatttttaacaaaggcaccaagaacacacattcgggaaggacaatctcttcaataaactgctaggataactcaacacccacatgtacaggaatacatctaggccgttatcttaccatatacaaaaatctactcaaaataaagatttaaatgtaggacctgaaactataaaactactagagaagaaaacataggataaatccttcatgaaactggttaggacaaggaattttcaaatagacatcaaaagcacaagcaacaaaagcaaagatgtaattacattaaacttgtcaaaagcacaagcaacaaaagcaaagatgtaattacataaaacttaaaagcttctgcaaagcacaggaagaaatcagtagaacgaagaaacaacccagagaatggaagaaagtatttgcaaactatgcatcagccaaggggctaatacacaaaatatataaataactactcaaaagcaaaaatacaaataatctgattaaaaaaaaatctaccccaaatctttgtcttccaccattattttcccaccttcttttcccgaccgcctttggacgcctccccctcgccacctgttttcttcctacatctaccccaaaactttttccccaccatttttccccaccgtcatttcgcaaagcattctctgctctctcactcaccacccttttccccatccacttacccactttccccactgtttttcccaccgtcttttgcctttctccctggccaccttcttttcccccatcccactctcatcaccctcttttgctccttcatctaagcaaaaacattttctcccgtcttttcccaaacccttctcctcactcctgctgctcaccactttttcgcccttcatctacccgaaaactgttttcctcatcgtcttttcccccgctcctccttgccaccctctttcccttctctacccaaaaacatttcaccatagtcttttcgcaaagcctctccccactcctgctcacctccccttttccccctccatccaccccccagaatattccctactgtcttttcacagtcttccccccttcccactcgtcctcttctttgccctatcctgcttgccactctcttttttgccttccatctaccccaaactattttcccatttttttcccaactctctttccctgctccctctcgtcaccctctttcctcctcctcgttaccctctttccccccaccatctacccaaacactttttacccactgtcttttctttctccaccgtctttctttcctgcccactatcttttggaaaaaccttgtcttcctcccgctggctacccttttcccttcccccacctgttaccctcttttccccctctatctacccaaaaccttttctccccactgtctttacacaaaaccttctctccctactgctcaacgctgtttctcccccccaccaccctctttttcctcctcctttgccaccctcttttcctcctcatattaccaatacaatttcccccctctcttttcgggatcctttgagtccgcccgcaggccagtccannnnnnnnnnnnnnnnnnnnnnnnnnnnnnnnnnnnnnnnnnnnnnnnnnnnnnnnnnnnnnnnnnnnnnnnnnnnnnnnnnnnnnnnnnnnnnnnnnnntctccgttattattctattttaagttctagggtacatgtcgacaacgtgcaggtttgctacataggtagacatgtcgccgcaacgccttttcaataatgtcttacaaggagaaacgtggctcctctaggtgagcagccctcagtgcccatctccctgaagtccacattgatccggcagagctgtggggttcacagctcacactgaggcattcagggcctaaaccccactttactcttttgtacaatgaatgggaaatcagtgatctaaatgagtttaaatcttattagggattcagactgctcttcagactctgtctctattcctaccagagctgggttcaacatgaattcaaatagaaatatgagacaatgaattatggtagtgacaaagaccttccttcgaattccggatttttctagcagcccctttctttctgcttcccacctgccttcaactctttctcctaaaaaagttcagttggggtgaagtttggtgacttagaacatcattattttaacgtgatcccaaagcggttttcattatatgcaaagctgtatatttatttacattttaaaaaatgttctaaattggtttcttatgtccaaaagaaggggagctagttataagaaaagagaattgagtaacataagaaagtgctaatcatttcaaattaaagtgggaaacatgcaaagcagaaagaatgaatttcataaactcaacaaattattaacataaataagtccaaactcttgtatctatataacatcagtgatctgtgaggtgaaatgagattctgaagaaaaagtaaataataaggccatttttctaagccaaaaaagtttttgtcattaattgtggaatttcacaaattaatttttgttcaaataaaactttcttaaacttttagtgcttactattgcttgtaggttagtaaaccctagcagaaaacaaaatcattaaggaaatggaaaacaaacattaatggggaatttgtgtaaccttaattcttaacgtgtcttatgagttaattttttaaatgtgaaggtttattcttggtgtttggtaattaactaagtttattaatatctcaaaaatatgaggaattttattccctaaaggaacgtgaggaacacgagtagttcaagaaaatgctgaagatgcgcttggctgggaagctaggataggctgacgaagtcagacttagtgtgggaacctgttaagcagtggatcgatgttagctgttttcacttattgcactagtataatcagtttgatgatacatactttagccccagctgttacttaagacctggtttcacattttatgttctttttcctgtgcaggctgggaaagggtttcttctgtccataaaagctactccaatggctgtgggagacttaattccaattccaggtgatacagccgtcaatctcccactagctgtaggatggtgtgtgtgctgcagttcacaggtgtggatgctcaagtgggctttcaaagatgtcatgagagggagggttattgtattaggcacattttccaaatataggcatttcattgtacaagaccccaaatgtgagagggtgtttgtttcagtattttatagagttcctaatatgccatcatatatacattcagttgttttcaaaatacagtttagtacttggctactcacaaagtaataaaacatttaaatcacttaaccatacaattcttgataaccaaaaggcttttctttctactcagtagtttaacattcagctttcttttttagggcaaaggagatagaagtggatgaaatgagagaattttctttaattgaactctggttaatgccaaaagtgttcaatcactatgtgtggggaagtttcctggtacaaaggaaaaaaaaacaggttgttcatacatttggctgtgttagtatgtggtaaacagaattaaatttttttatgtgaactcgtacatatgtgcttcataatatgtcactcctatttaacatctctttcacacacacacatccccccacctccgcacacacccttttgctagtcttcttccattttgcttattaacccaaagaaagaaaaaaatacagaagccttcttgcataggttgctttaatcagatgaattattgaagccactctgtctaaatattattctcccttatttttctttcattagtttttcattcagttgtatttatttaatttttatttcattttccagacctaagtcagtgttagtctaccactgtacatctggtaacctcaatccctgcaaccggggcaaaatgggtaagtactttagccatgtaactgcataattactagtgtctgacacagagaagaaatagacagtgtgtcatggagattagagcctacatggggaggaggacaaaaagtaagcaaagagacaaaataatgagaaattgtaaatgtgtggtagttaactagaatgtactgtggttaccaaggaaaggagtcattgggaacacatacatgattgtaagcagtagggggtccattggctatagagattttaaaaaacaatgatgaaataaagcaaaagttggcagttataaagaatctcagtgataaaatactgaaatactcctccctgctggggcagtgggtcctatacacaccccttcccttgttgatatgtcactgagaatgcgacgtgatcaatgaccaatgagatttagaaaagtcgggtgatattattccttccttattgagtgtgtaatagtgatcactaatttatgcaacttgtttctcttgggtgtgcattaactactctactagtgatttgtaaaagtgaataggaatcactatgggagaataaaaacaacagccagattccttggaccctgtgaccaaggtcttgggtgatgctgagaaaactatatttttaataagcatctagatgtttcttgatgcttgtggaaatggtctttgagaaaccctgtactatacaaatgattaatttgtctgaatgtaagggatttaatctgatcaatgtacaaaaaccatggaaatcaatttgagtacaacttaaacatctaatgatggtagaagataaaagtagggagttttgctattctgtagaatttcttagtacctactaactaacgcaccccttctatccctgttacataggtaccactagctcttcatattccaatggtaagccatggtaccacactgaaagttctattgcagggcagctggacactgtggctcatttatatattgtgggtttgaattgaaaaatgcttttccacaatgaaaaatacctggcctgcatgtttcctctacctctctcacacctatagcaaacactgcgggctgatacgacattggttatccctgtccaaggctctgttctagattcccttctaacacagcatttctggaagctattactattaatttgatgttgcattcaaattaaactcatttgtgtttcctattggggactcttcagagggataaaaatgcttcctactaggagcagtagccatgttaacaggaggttgagcatatatagtctcaggtgatattacaaggagtgatagacagctgggtgggtgaacatgggctatctctccattgaattgtctcctttagtgtcccttaagaagagtttttaatctcctgcatatagatcttaagcatcttttatcagatttatacctagggcctaggtaattgatgctttttttttttaactaatttaaatgtcttttgtaaaaatacattttctaattgtttgtggatgatgtcaaatgcaattgatttttgtatattgaccttatattcagctatcttgctaaacttattattgctagcaattgtataaaatttcctcataatttcctaacataatcataatctgcaaaaatagcagtattatccccattttttcaagctttaggtctttatttttcttgttgatagcaccatctcagctcactgcaagctctgtctcctgggttcacgccattctcctgcctcagcctcccgagtagctgggactacaggcacccaccaccacgcctggctaaattttgtatttttagtagagacagggtttcaccgtgttagccaggatggtctcgatctcctgatctcatgatccgcttgccttcgcctctcaaagtgctgggattacaggagtgagccactgcacccagccttcttgttgaacttctactataatggtgaataaaaatggcaatagtaggtattattgtcttgctgctcattttaagcggaagacttcaaatattaaactcacctgccatttttaggataaacccaacttggtcataccatgttatctttttttatattttgtttaattcagtttgctaatcatatagttcccttgtttttctattatctgaaagtgcttttgtaatagtggagtaatgtattcctcgaaaacttgggaaaagcacctttaaattatcttgatttataattttttgtgagaagattttttattgcttcagtgtctttaatagttaaagaattttgcaggcttcattttctgttggaatcagttttagtaaattatatttgtctctttttctaagattttgtttgttctaaaatgtatttacattcttttttatattaatatttttgtcctaaactgtatctgtaattatgcttcttttttaattcataatatttgtgtgtcttctcttttcttctcagctagtctccaaagggtttattttatttctttttttgaaagaaccaacttcttcaggctttattgacttttttctttgttctttctttctttttttttttttttttgagatggagtctcgctcttgttgcccaggctggagtacaatggcattttcttggctcaccacgacctcggcctcctgggttgaagcagttctcctgcctcagcctcctgagtagagtagctgggattacagacatgcgccaccacacctggctaattttgtatttttagtagagatggggtttctccacgttggtcaggctggtcttgaactcccgacctcaggtgatccacccaccttggcctccaaaagtgctgggattataggcatgagccaccgcgcccagcctattgactctttattatgctgctttcttttctattgcatagatgtattgccttatctcttttttccccttcctcctgctttctttgattannnnnnnnnnnnnnnnnnnnnnnnnnnnnnnnnnnnnnnnnnnnnnnnnnnnnnnnnnnnnnnnnnnnnnnnnnnnnnnnnnnnnnnnnnnnnnnnnnnntactgtaatacatatatgcaaaatctaagtattagaataagaatatacaagattataaatatatagtaaaaaataaagatacaacaatttcaatataaatatataatcatacttatggatatataataataaatacaataatgaaatatataataaaaaatgagagatcatataaagaaacatataaaatatagaaaacatataataaatatacaaataggaatttagaatagataaaataaataatacgtaaattaaaaatatataaatataaatcagatgtgagattgcatagagagaatgatatagataacaaccgaaaacagagtaactatgaaatcaagaagggcaggttccacagaatgagtggataacacatatggatagatggaacaaaagcataagtaatatcagatggaaggtataactctattatagatctgatattaatttttgtataaagcaaatgtcaatagtacatgtatcaaagtatgtatggcagagcaatcaaaagaagatgagatagccatggtgataaaattggattctatctggacttgaacataaagtgctcctcaaggcggcctgtggtctgcctcttggccctacctttagggtagaagaaccaatgtaccatgtcccgcagcgagtgaggttggtggctggtctggctgctcctggcacacacttgcagaggtggctggttgctgtttgagccagcttggccttgcctggcatgcacaagtctcagtgcaacaactgtgctacaaatggagccacagagaggaaatgagcggcagagttaggagcaggatgtgcgctgcctttggggctccagtccatgcctcgggtcgtatggcactgcaggcttcttggttgccaagaggcagaccacaggccctcttgaggaggacttcatgttcaagtgcagaaagcagccaggattaccatccaagggactcggccttctgtggccctggccagactcagaatttgtgccaaggcaggacaagctcactcggagcagcgtgtcagtagctggggcctatgtatgccaggcaaggccaagctggctcaaagagcaaccagtcacctctgcaagggtgcacctgtggtctggaggttggtggctccctgtgttagtcctccaagcccatattttccttctgcagtgccctcgcagaggtttctgaagaggctctgcctctgcagcatgcttctgcctggaaacagtgggaggtagttttgcagggtggaagccttcaccagtggttaagcaccatcttcatgatgctgacctcgtgatagtgagttctcatgagatctgcttgtataacatgatgtggcacctctttcctctctctgtcttgctccttctcctgctgtatgaaacatctccttgccccttggtcttctagtatgattgggaggcacctgagtcctcccagaagcagaagccactgtgcttcctttgcagcctgcagaaccgtgagccaatgaaacctcttttctttttgatcatacagaaggttagtactgtgaagtgaagctatgaaattccttcagggccttttccctatgaaatgccttcaaggccttttccccattgtcttggcaagcagcactcagcttcttttcatgcaaatatctgaagcctgtgtgaattttttccctgaaaatggacttttcttcttttaccacattgccaggctgtgacacagagagctgataatgtagaagcaggttcagtagtgggtaaaagacagaggtcgggagagttgggaaagcttaaaagacagcaagatgaggaaaagcttggacccctgtagagaattgttaaatacttgtgatcagaaggctgacagaaggatggacagtgaaggccagacttaaaagttctcggataaaaatcaggaatttcctgtgaataggagccaaagctacatttgatttgcccaacagaggctgcacagtgaccttgccctggagatctgtgaatctatgaacttgggggtgatgatttaggatgtatcttgtggaatgaacatctaagcagcatagctcaagaggtgtcctgtctgcgtcgaacagcctgtgttgttatgtatgagctaagaaatgacctcaagttggatcttctacttaaatgagaagcggagctcagaagtttggaaaatttgcagcctagtcaagtggttaaaaagaaaagctgattttcagggggaaaattcaataaggcttagagtatttgcataaaaaggaggttagtgcaagtgtccaagacaaagggtaaaaggccttgaaggcatttcagagacctttgcagtagcctttgctctcacaggccctggggcctagcagagaagaatggtttactgggccagctccatggccctgctgctgtgtgcatcctcaggacactgctgcctgcatccctgcagccccagctccagccatggctgaatgatgcacaggtacagcttgggtcactacttcacatgtggctccaagccttgatggcttccacatagtgttaaggcagcaggtgaagagagcaagagactagaggctttggagcctcttgtctggactccagaggatgtagagaaaagcctgggtgtccaggcagtagcctttccaagaggctcatggaaaacctctgctagggcagcaaagaagggccatgtagggttgaagccccctcacagggaggctccattctccaaaccccagattcatagacccaccaacatcttgcaccctcagtgtggaaaagctacaggcattcaaaacagccctgtccatgagaggcagctgtgggtgctgaacgctgcaaagccacaggtgcagatctgcccaaggccttgggagcccagccctcacagccctgtgccatggatgtgggacaaggattcaaaaaggatgattttggagctgtcggattgaatgactggcctgctgggttttggatgttcatgtatcctgtgagtcccatctgtgttttgtttttctttctggcattttttttttctactggctgggaatgcttactcattgcctgtacaatcattgtgccttggaattagataacttgctttataattcagaaacccaggggcagatcggactgtagccttgtctcagacgagactttgggctttggacatttgagtaaatgctggaattatttaagatttgggggcctgtagggcaggtatcattgtattctgcaatgtaagaagcaggagatttcggggaccagggacagaataatatgatttggctctgtgtccctaccaaagctcgtggaattgtaatgggcaaagttaaaggtggggactggtggaaggtgatttaatcatggtggagagtggagtttggaaggtgggggtggttgggagcattgtgggggattgtgttggggttgtggggaaaggcagagatggggggcagattcttcacaaatggttaaacaccatctttgtaatgctgtccttctgacagtgagtttgcttcatggtttaggagctttgagatttgaatactggcctgctgggttttggatgtgcattgggcctgtggtcccatttgtgttatttttctgggaaatttcttccctttggagtgagaaagcttacccaatgcctgtaccatcatcgtaccttaaaagaactccattttaagttcagggactcattggcagaagagaccgtagccttgtatcagataagactttgaacttcttacatttgagttaatgctggaatgagttaaggcttttgtaaacatttgaaaaggcatgactgtattttactctgcgagaatgacatgagattcggcggagggggtcaaggtcagaataatatggtttggctgtgtttccctagaaaaactcatgtggaattgcagtcccgaatgttggaggtggagcctggtgggaggtgatttaatcatggatggggggtgggtggggttggagggaaaaagaggtgggtagcgtggtgaggagtaagctcgctgtagggtggtgggagggtgggggtagtaggaaggaggagtagcctgctgcagaggcagaggctcgtggaaaacctctgctaggactgtgcacctgtggctttgcagggtgtagcccccgtggctgctctcatgggctgggctggtgttgagtgccggtagcttttccatactgaaggtgcgagctgttgatgggtctatgaatctgggctctggaggatggtggcctcctgcataggggctccaagcccatatttttttctgcactgccatagtacaggttttccaagaggctcaggctctgcctcaggcttctgtccggaaacaggagggggtggaggtgggttggggacggatccttcactaatgattaagcaccatcttcttgatgctgacctcgtgatagtgagttctcatgaacttcctcatagtgttaagccactggttgtatggagcatgagcctaggggcttgggaggctctttatagattttggaggatgtatggaaatgtctgggtgtccaggcgaaagccttcctaaaaggcagaacctcataagaaacctctactagggcagtacagaaggaaaatatggggttggagcccccacactggaggccaccatcatgaagactgcagattaatagaccccgcaacagcttgtaccgtcagtgggtaaaagctacaggtgctcaacaccagcccagcccatgaagacagccgtggggcataaaccctgcaaagccacaggtgcagagctgcccaaggccttgggagcccagcccttacatccctgtgccctggatgtgggacaaggtttcaaaaagggtaattttggagctgtaggattgaatggccttctgggtttggagtttcatggggtctgtaagtcctttctgtcttttgttctttctggcaaaattattccttttggctgggaatgcttacccattgcctgtataagcattgtaccttggaagtagttaactttctttatatttcagaggctcatgagcctaagggtctgcagccttgtgttagatgagactttaagctttgaacatttgtataaatgatgaaatgatataagactttgggggactgtagggaagctatcattgtagtttgcaatgtgagaaggacatgagatttggggagccagggacagaataataaaatttagctctgtgtccctaccaaaattcgtgtggaattgtaatggggaatgttaaaggtggggcctggtggaaagtgatttaatcatggtggagtgtgggggttgggaggtgggggatagggagaattgggagattatgttgggggtgaggggtgaaaagtgatggtggctccttcacaaatgattagacacaatctctttatttctgtccttgtgatggtgagttctcttcatgattttggagcagtgagattgaatggatactggtctcctgggttttggacttgcattggtcctgtggtcccatctgtgttattttgctcggaaatttcttcctgttggactgagaaagcttacccaatgggtgtaccatcattgtgtcttaaaagaacacccttttaaattcagggacttataggcaaaagggactgtaggcttgtctcagatgagacgttgaaccttttacatttgagttaatgctggaatgagttaagacttttggcaacttttgaaaaggtgtgattgtattttgctctgtgagaaggacatgagattcggaagggtcagggtaagaataacatggtttggctgtgtttccctacagaaactcatgtgaattgtaatcttgaatgttggagatggggcctggtggaaggtgatttaaccatggatgggagggggttggagttggaaggaaataaagtggatagtgttgggaggagtgggttgtcagtagggtggtgagaggatggtgggtattaggaagggggagtagcctgctgcagagtcacatcctcatggaaaacctctgctagggcagtgctcctgtggctttgcaggctttagccccatggctgctctcatgggctgggctggtgttgagtgcttttgcatactgagggtgcgggctgttggtgggcttatgaatctggggtctggaggatggtggcctcctgtgtgggggctccaagcccatatttcccttctgcactgccatagtagaagtttcccaagaggctctgcctctgcaggaggcttctgcctggaaacagtaggcggtggtgtgtgtggtggatccttcaccagtggttaatcttcttgatgctgatctgatagtgagttctcatgtgatctggttgtataatgggctgtggcacctcttttctctctgtgtcttgcttctatttctgccatatgaaacatctcattgccacttggccttctgatgtggttaggaggggcctgcctgatcagtgtgggcctgctcagtggacctagtcagttgggacttggtcagtgaggcctgtttagtgggaacctggccagcaggggtctgcttagggagggtctcattagggggatccagtagtgggggttttggcaagtggggacctactggcagccagttgcttggtgtctggtcagtgcagacctaggctgtggggcttgaccggtggcgacctggtcagctgggcttagtggtggcctggtcagcatgggctgggtcactggtgaccaggtcaaggggtgctattcagtggaggactggtcacatgggacctagtcagcagggcctggtgggcgtgtcctcatcagtgagtcccttgtcagtggggccctgatcagggcagcctggtcagtggaacctcatcagtgggggcctggtcagtgatgacttggtcagtggtggcttttgtaccactggtctacggggtgacccggtcagcggggacctgagtagtcggtgcctgttcagtggggcctactcactagggtcccagtcaggggcatctggtcacctcaggcctggttagtaggggcctgatcagtggcagcctgttccctggaggcctggtcagtggggcctcatctgtgggtccaggtagtggggtcatgatcagtggaatctgatcagtgaggccttgtcagtaatgacctagtcagtgaggccttgtcagtaaggacctggtccttgaggccttgccagtgaggccttgtcagtaaggtcctggtcactgaggccttgtcaataaggaccttgtcagtgaggccttgtcagtggggccttgtcagtaaggacctggtcagtgaggccttgtcaataaggtcctggtcagtgaggtcttctcagttaggacctggtccatgaggccttgtcagtggggccttgtcagtaaggacctggtccgtgaggccttgtcaataaggtcctggtccgtgaggccttgtcaataaggtcctggtctgtgaggccttgtcagtaaggacctggtccgtgaggccttgtcagtaaggacctggtccgtgaggccttgtcagtaaggacctggtcagtgaggaattgtcagtaaggagctcatccatgaggccttgtcagtgaggccttgtcaataaggtcctggtcagtgaggccttgttagtaaggactttgtcagtgaggccttgtcagtgaggcctggtcagtaaggacctggtcagtgaggccttgtcagtgaggcctggtcagtaaggtcctgttcagtgaggccttgtccgtgaggctttgtcagtaaggtcctggtcagtggagtcatggtcattgttggcctggcagcgggggtcttgttagtgggtcctggtgatgggggtctaatcagtgagggtgtggtcagggaagacctgatgtgtggggtctggtcagcaggaacctggtcagtggggactgctgagcgctgcttggagaagccaggtgcattgcacgttatcgagggccctctggacagctgggatggcccagtgatgcccaatggcccggtcaaaagtagacaaagcagttgtttggatggacctgggagatgttgctcagagattctgacaggacaaaggtgaagaaagggtcagagtggctggagagatggtcacagtctatgggctgcacaggatggagaaagccagggaacagggagggtgggcagtgcggtgcagggagaggcaggtgcatggtgggacgtcagaccctgtgaaggctgtgagggtgtcaggtgggttgggctccaggtgcaccctcagtgcactgggtgggtatcaccccaagctccctggaccccagccaggtgatgtggtcactccctgggggactgctctcaggccccggctacctaccctgggcagcgctgtcccatctcaggactggactttctcagatcctgtagagggcacagactccacccaggaggggcaaccgcatggtgcagcctgagctctccatgggcctggagcatcccctgccagccttgtgctccccattctcccaggtcccacttttccagtgtcagccagcagggatgccccatcctcccttccccatgtgtctcctaggctgaaacttgtggcagattgggacagggatggtgcttccctcaggcccatttggggaggggactggctcccagactggtgcaggtcctcagctctgcctcgactggcttagagtgagatggatcagtcagttccctgaaggtgaagataagagactgtccctgctgttgggaggctagtctagggatggaggacttaacaggtcctcccaggctgtgaggcctgggcagcactgtcttgtcttaggactcagaaagtccagtcctgagatgagacagtgctgcccagggcgggtggctgggacctgacaacattcccccagtgattgaccacatcacacgtccagggtccagtgagcctggcctcagacgtgcccagtacactgaaggtgcacctggagcccactccacctgatgcctccacagccctcgcagggtctgacctcccagcatgcacctgcctctccctgcaccccagctgtccaccatgcctgttccctgacttcctccatcctgtccagcgggatgggatggacatggggacagcctgtgtgcacatttcgtggcgagtgggaatgacacaccatctctgggaggcaccatggttcctggcaaacccgatcccaagactctgtccttgaggtggttttaccaaatcccaaacccagaactgcggttgtggctcaggggtcagctcctgctagtgccaggacactactgggaggctgggacccgaccaaagcccatggtgtttctggcctgagaacaaggtgtcttgggaccataaggccaggccaccaatggccattgggtcataggggctcagccccaatctttgtctttccctggctccttctgattcagtcccatcagggccctggatcccaagactcagcatccaaggtcccctccaggaatcctggcagctcagcatactttatcctgtttcatctgagagcaaaaatgtaaaattggatgcacagaaaagtgactcaaagtgcttaatgactagaagaaatctaggagcagcaagaaggtaatgtggagggagggacctccatgaccggtgtctgcagagccaggggtacaggcacccagtgctgtggcctggcaccacctgcctctcagagggtgggtggcacactccttaaccagaggacagcaggcctggtcaccagcttttctacctgtccctgtaagcatcacattgctggaggaaaatctcatgccagagcttggaccatccctagctcgggttaggggttgtcccttggtgacctaaatgaaaaaacaggtccagaacagagttcctgatgctggacactcattcagtctttgaatcgtgggaggggaggcctggtactaggtagacctaacctctttgaggaaccacagagcccaaggctggaaacctccagaatcctccaccccctgatcctccctggggacccctgtggcctgtctcactgagcactcttccatctgtagatgtctgggctgctgtacaagggagtcccctttcaggtgtggtgctagacatggtcactcctgctggatgtctaggtggtagaaaccaaggacctagggaaataccagctacagcctttccccgctcatccagagcaggacaaacaggccaggcggtgtcaggagcccaggtctccagctggagggaacgtcaaccctgcggtgggagtaggggccctttgcacatcctaggcacagatggtaatgtagacaccacaggtaagctgggcttggtacctacccctccccggattcagaaagaaaccaaacaaggagctttgtgcggaatgaaacctcctttcctcccagaagcactgctgactgtttggtggttgccatttgtggcagtgagcctttgtttgttctgaggttgggctggtttctcctcttggtcctgccctacagatcataaaggagaacagcaagaggtccccagcaaacatccacagatggccttggaagtaagtcaccttgtgagaaacatgtcatgttctgggagggataaggcatcaagtaaggcctatggggttggaggatccctgggcaggtggggcaatccttggggtcttcccatgggaatagggaggtcctgaggcagaggcaggggttccacaggaggagtcacagagctaccaagggctctcctgtgccaggaagcagtcaacaccatgaactgaacacctgctgggctccaagccctggtccaggctggggcatgtggggccaggaggcagctcagagagggaggcagagagaagtgtgctgagagggcacccatttctgggtgtaatgtggtccagagattttggctgggaagggcttccagagtttcatatctgttacggagctgcttcctctccctagcctcaccctgcaggaatgccagtgaacatactgctgacatcttggagctcagtaccctcatagtgtaacggcgtcagtagatctgcctgtgcttggacttcctgtactacccattcctgaggggcgatgcttctgcagggcctgtgacttggtgcacaacttcagacaccatcatcttgcagcagcaccgcaccctcactagccagggtgttgatgacttcctcaaggccaaggccacattcaaggcttcggactttattgatgcgcttgtgctgagcaaggtggcttctccaggatcttaattcaggaggtagaatggagcttgagatcaagtgtctgatcaaggtacttgaacttgatctggagggctctggggagccatggaaggtgctggataaaggagtgacagtcagctatgttttcgagatgactatagaaggctgcctggaaggagtgaacaagagccaggagaccagggagggagcttgtggggcaggtctggagatggcaaaggagggatcctgcttggatgaaaggtcttcagggactgtctcaggttacacacaggtgtcctcagagctagtgtgttcagagtcttgcctccaggatgaaaatgggaaggagttgtcagacgaggacatataaatggaggctggcatattcatgagtgctggtggtggtcccggtgtgggactactgtgggaacaggggtctctccatccagggatatgatggatggaccctacatcactccattctgcccttcctttccctcctcccattctccccaaagcctcagtgtatgggcgctgttcatcctctggtgctgaagcagccaagagacccaagtctgcctggctgcctcttaggatatgacagcagagccagtggcctctactagatcctgtacaacctcacaaaacacccagacatcgggagtgctgccagcctgtgatgcaagagtcctaatcctgaagacattgaatggtgggtgcagggcctcatggcctgttccccagcccctctcattggctctgctccaggtggtgaagggggaaaatgtttttgtcaattctgtcatgattgcctagcaagaaaaggagcagaacccagaagcagtaaaatcagttagtaaaatcagttttcttttctgaactacatttctaccatctgtaattgaggggaattccttcgactccacgagattgcttggagaatgactgacagtgtatgtagagcaggtgccagccagcaggcgtttggtgtccagagcactcttcccccttgattttctgcctatattttcattttgttcccaagaccctcactccccttaattttgcttttccctctgattcccaccttatcttctatcccatggattcaccaggatgtaagtgggtaacagtcatctatgcatgtatgtgtatgtgtgtatgttctctgttggtgttggagtatggtgtgtgtgtgtgtgtgtgtgtgtgtgagaatgtgtgtgtgtgtgtgtgtgtgtgtgtgttggggtcactgagggactgaaactctccacaccaggctgtggtcctgctcactgctggaggcgctgtcagggctcttgccattgaccctccaggtctcattcttgcagtgcaggcagggcattctggaggaatcatgtccttggacgaagccctgaggagtgactggtgtgtattggtggataaataatccaactcccttgctctgggtgggatgactctgaggcacatgttctatgctgtctctcagaggtacccggcagggctgagtcctggctgcccacagtggaaactttcttgatgaaggtccctttaactgctacattccattcctgtctcagttccccactcctctactggtgttgcctgcaattagtactctaaggaagaactgacagtagaattactgtcctggagtcatctccagataaaatttttatacttgaatctttgcctcaggatctacttccaggaaacttaaactaagacacacatttttctttcctccaatcttcatagacctgtcattctgctgtttttaccaaaaaggatcatgaggatcagagaggaaaagtcacttgcccaaagtcacacagctgaacagtggtggagttcaactttgaccatgggctgtctggccccaaggtgtatgcttgcttctctcccaagagactcctttcttatcaggctcaaatgaatgaaaggaggatgttaaaggtaggatctctgaagcctgtgccagtggaaccgcagctcatggctggcacctgtgttctcattcttacctcattgagagtaaagtttattgagtttattgaatttaagtatctttagtgagatcatatattattagtaagaactgggaccaaacagattttctgactctaaaagagagattttcacagaaacagatatatacctataagtatacagacacgcatacacacatttctttactgctcataaaaattagtccttattagaatgtgggatgtataaatgtaagagaattttcatgttaaaattgacagatacatttttaaattgtcctaaaagaaatttaattatttttcttttagaattttccattattaatgttatttttatggaaaactatataactttattgataatacatacgataaccctttgtttttcacattgaaaatacagtgtattttgcaaataactaagtcctaattttgtattaaaatttaaaattttcaatctttttttattatattttaagttctgggatacatgtggagaacatgcaggtttgttacataggtatacacatgacatggtagtttgctgcacccatcaacctctcatctacattaggcgcttatctacatttggtgctacattatgatatggagaaataggaacgcttttacattgctggtgggagtgtaaattagttcaaccattgtggaagacagtgtagtgattcctcaaggatccagaaccagaaatacatttgacccagcaatcccattactgagtatatacccaaaggattataaatcattctactataaagacacgtgcacacatgtgtttattgcggcactgttcccaatagcaaagacttgaaaccaacccaaatccccatcagtgatagactggataaagaaaatgtggcacatatataccatggaatactctgcagccataaaaaaggatgagttcctgtcctttgcaggaacatagatgaagctggaagccatcattctcagttaacgaacacagaaacagaaaaccaaacaccgcatgttcactcataagtgggagctgaacaatgagaacaaatggacacagggaggggaacatcacataccggaacctgtcagtgggtggggggctagaggagtgggggagggatagcattaggggatttaataattttaaaattcaattctgttgaaatgtttactccaagaagcaatgtgtttttgagagctaatcctgatatattcaaatcttaacgacttaagttgatggagtggacttcttttaaattagtgattccctaatttacctgacagttggaatttccaggccatgttgaaaatacagattatccagactcttacttctgcagatgtatttagtggttctaaaatggcacccaggagtctggatttttcctaggggccttgtgtaattcacactgatgaccaggcaagtttgggaaattgtgccttaaggagatttttcattaagcagtcttcatttgaaaagaggatcatttatcttctaataccccatgcttcctctttctcctgctctctttgtctcctgttgtttttcagttcctagaagctttaattgaatgaaagttcctagtagatctgtacctactaaaaaccacacttctgaagctacgtggccaccagaagacacagctagtctgccatgtaaaaaaggaaaggtggcgtgtgccctgaaggcgcaggggtgagaggcagggaaatggagaccccaacagccagcatcagtggccctcatcacagccctccaggagatatcaaaggaggtcagaccttggacagtagtcttgacttcctgctatagaacacattgttaacactgaaaaagatgatctgttctaggggaatggtgaaagctgactctagcacttgtgctttttgtttgtttgtttgagatttgagtcttgctcttgtttcccaggctgcagtgcaatgcgtgatctcagctcactgcaggctctgcctcctgggttccagctattgtcctgcctcagcctcccgagtagctgggattccaggtgcccgcaagtgtgcctggctaatttttatgtttttagtagagatgggatttcgccatcttggccaggctgttctccacctcctgaccttggccaaagtgttgggattacaggcataagccattgtgccaggcctgtgtttttaatttcatcatggcacagcttcaaaatgacatctaagtagctgacataaaaatgaaaattctgtgtactttgatattagcaggcttcaaatacaaaccagaatatgagtaaattgtttcttagccaaactgaataattttcacattggcaggccattggtaggctattcagcatctggctcatgtttgggccaagctgggtgcctcatgaaagtctggagggaaatacagagggcaattctccataagcattaggctcagaaatatcctgcttcccagtgaaaagtttaagttgactttcacgccaccttcatcaaaccgaggttggtcaacacttttcaccactgccactggacactttgacttccaattttgctacctgctgtacaaagatacccccttctttcctttcctgcattctccctacaaccttgtctttttttgagtacatccactctgtctcatcattgtccatctctgcttcccaaaaccttatatagtacagaaattggccaatcaagattaccatgtggaagagcatccatttactgaataaggtagctggctcctgggggcagaaaagtgattagacacagagataaaaatcataatccctgctctcctggactcactgtctagtgggcagacagacagatgaacaaatacaacttgataactacaacaatcaagtgaattatataatttagactggagaaagagagcaaacgttatcataagacagtgtgtccactacttactctctaacagatttactcataaaccactaggcttgccaacttgttgaatgagataaaattggagggtcaggggatgggaaatgcatatgcttcttagtatttcattccataaatacataaataatgaaaccattaatgatatcatcatgttgattcaataagtttgaaagcaaaattgatagtaatctttggaagaaattgtatatgtgtctatgtatgtacatacatagacatacatattgctttctgaaattttcaatgactttatgcttcttctgaagcaattcgagtttagaatttgagacccctgggtcaaaacatcttcttgagtatactgaagaacatttggattaatttcagacacgtattttggtttatatagtgttttttatccatggtaacttatttactgtttaaaaacatattgagaacaaacagcagcagcaaccctgaattgagtgaaagtcctgagaagggctttgcccaatcagtgcatgtgcatgtttacactaatctcctgtctgaacctaggaactggctgaatgagctagcagatggcctgtctggctgcattataaatgataatttatttttatttgttttactcattcattcattttgagacagggtctcactctgtcatccaggctagagtatggtgacacaattatggctcactgcagccttcaactctcaggctcaagcaatcctcctgcctcagcctcctgaatagctgggactacaggtgcacaccaccatgcccagctaatttttaaacctttttttgtagagactgggtcttattatgttgcccagggtggtctcaaactcatggactcaagcgatcctccttccttggcctctcaaagtgctgggattacaggcttgagctaccacatatggccagaaatgacattttaaaaccaactattacgtacacagatatatgatgctctccgattgttttatctaaaaataggagtgccttaggtttattggctcattttgttttatcaaacagcttaaatgcagttgtgaatatttttgtttaccctcataacctgagaatttagaatgaatataattattgccattttcacaagtaaaattggaacgagaatataaaacagtggaatacaggtgcagctaagagtagcagaggtaagccatctatagaatattaaaatttcttccatgtgtgttgttagaaatctataaaaccaaaattttttcatgcctggaatcccagcactttgggaggccaaggcgggcagattacctgaggtgaggagttcgagactagcctggccaacatggtgaaaccccgtctctactaaaagtacaaaaattagccaggtgtggtgggcacctgaaatcccagctactcaggaggctgaggcaggagaattgcttgaacccggggagtggagattacagtgagccaagattgtgccactgcactccagcctgggcgacaagagtaagacttcatttcaaaacagcaacaacaacaacaacaaacaacaagaacaacaacaacaaaacccaacattttctaatacaaggaaactcactaagctttataaggcccccatccctccaagtattatcctttccggctgccccaacattaatgacagcaactggtactagccatctgacatacaatcccagtacatttttgggctctgatgttttctaggaattttttctttacagacttattgaaattaagctctattccctgaagacctggttttcataaactgtatagttttgcagttgaggggaaatggtcttaggtcagtcaatccactgttgacacagaaatgaaatgaggtaacggtaggattattgttaagattgagagatgtatgaatcatcctatgctctttcccagcccccaggtgaccatataattaaaatatccttgatatttctatgtagtttaagtttttaattctagaacccctcaatctttctctattcaacttaaatgaaaagacatttagtatccagaagacactcagcactcagaagcaaaggaagaaaaatggaaacataatggtcaatgcccatgttctaccccaggatcaaatgaggcattaatattgagagttgtgattctgaatgagtcttaacctcatgcacatcttagttgttcaaaaatgtgtcatgtcagcaaggtggtaacagtgaagattttctacaatcaaaatagtatagttatgttctgttgtataaaatagaaataaatggaccacattgatcagaaaaatcaccctagcatattccgacagcttaatttttaaaaagctatgttatattaacaatttaaccacatagatctgtcagctagaatacatgttgcatatttaattgacaataattttttttgctctctcagagagttgtagatagattttggggttatcaaatggttctgactttttttttttttttttttgagatggagtcttgctctgtcaccaggctggagtgcagtggcaagatctcagcttactgcaacctttgctccctggtttaagtgattctcctgcctcagcctcctgaatagctgggatcacaggcgcacgccaccatgcccagctaatttttgtatttttagtagagacggggtttcaccatgttggccaggatggtctcaatctcctgacctcgtgatctgcctgccatggcctcacaaaatgctgggattacaggcatgagccactgtgcccggctggttctgacatatttttaagaaagtttaggctgatgctatggtaactcagttattgatgatacatgtcatcttgtaagtaggagtattcaatattcatggttttgaagcaatttcagagtactataatcaccacacttgacagacttcagaattcattgaaaatctctggaaataattagcaatttgttatcatagactctaaacagaccttcaaaatgcattacatagatttggtaaaacagattgtcagtctgccaaaagtaatcactttggtttgatttgcattgaatgaaaattttaaaatgtaaagctaaactcttcaggatcactgcactgggtttctataggacaacactgaacagggctgccactgaaacaccttggatgagagcctcaaactccctgaacacagcttccagcacactactgggagaatgattgggactcaaaaatatgtgcaatgaatgtacttacgaccttgttggaaaggaagtaaagaggttgtatgtaattacctcaaattaatactgctacagataaagtagtaattagcactgacaaagtaatagtagcgctaaagtagtattaatagccctacactagtagtagtaataaagtggcatcgctattgattctatccgtctacctacctacctgtctggataggagggcataggatttgactgtaagattgggcttagcagtgaaaacaaaagagctcatgcatgctttggacaggtatgcactcaaacttggtatcatgtgactgttctgaattccagaaccaaggctaaaaggtggaagttttgtttgactgtgtctcacattttccttttggtctattgtctaacacatgttgctagaattctttttattctgactaccttttatgtatagacaacgccattattgacgagatcactcccaagcggattggagattgtcccaatacttagacctatagcaaggccttgggagaaatggtggtgcagcaggagagcaggaacctaaccattgccatcctaaggccctccattgtgcggagcaacgtcgcaccagcttttcctggtaagcccacttacctggattctgtgttttgctttcaaactaaggttcttctagcccaattattttctgatgtctttcttcttcttcttctcctcaggatttatagctaagtgcagccaatcaaatattaacccattatactagggcaaaattccactttgggatcatgtggctcttctggcagttaccctatcttagagttggatggagatcttaaattagcttctaactactctagtctcaaaattcccatgggtgatgttttcatatcttggctttcccactgtagcttaaacatatcagaatgttcttgatggccaaattggtagtattgcaactaactgccagggttacaaagctcacagaaggatctcagtttgggaatactaattttttttaacctcagtatactgctatgtccttttgaaagtactttgaattataccatcttcttcaaagcaagtccgtgaagctttgggggcagatacattccagctccaccacttactggcaatgcaacatttttgagttgttctttcggtagaacaggacagatactactttggagagttggtttaatgagacaatgtatgaggagtgctcagtctctagtaaaaggtagatccctactaaaaggctcaacgaatattagtcccttcatcttctcctcccgtatatctggtctcccattatatgcatttcgacttttatactgtaaggtaaagagacggcttagggcttaggaaacaaactcaaaaagacatttccctctaactactcttaagcataatctttcctgtaacatctttaagcaagtcaacacacattattaccaatcatgttttcaatgttctcctaaggaggctaaaatcaggaatgaggtgaagtatggttggtgaattgcttagcagatcatgatataaggacaaggtccattgtagcccttaagttgtcataaaacaccacaaaaccattcatgactcctgctacaaacaacaatcctggccaaattttaattcttgcacaaactgcagaaaatagccaacgctttgccattgatctttgggatcttaataatactgaattagatagttctatcggctggagtctcagtgcccttgtttgaaatttattaagattagacggcagatgttccaaagatacaacaattttctgaaatgtgtaaccaatggaaattttctttcttttagggttgggttgataatctaaatggatgtagctgactcattattgcggtatgtatagggatgaggaagtaactgtaatgtagtggaggaatagtaagaaaattcttagtgctggcttagcttcattgatccaaaaacataaatgctactttactatcaattgaagcatattatttcaattattctggttataatatggaggcaggatgaaattgtttttattcttttagaattttttttatcaggaaaacagaggtaaagtgctatcaattactatttaagagttctattttgaaaagtgagaattaaggatttttcttttctttttaaaaaaaacttttttaaaaattaaaaataaaagaagcaaaagtcttaggaaaatgaggcaagtagccctgccactctatgtacagtaataacaatatctgtcccagttattatgtacaatattataaaaaatgtcgcagacagtacaaattaaggcccttatttctcaaaggacatcaagtcttatgccccgtgggagggaagatgccacttaattattgcaccattttgaaaaacagaactcgtcaaggcggatagtggtcttttcccacctggtcttcagtcacagatgggggctggggcggtggcgccgtcttcgtcgtcgaggtagaccctatggagccacaccgccctgccgagttctctgggtgcaataaataccagtcacagtttgggagggggccgcgtgcaggtggggaggcctctgggctgcatgtgccgcttcctgtgcagggcaaggtgggcagagcgcaagaaggcgtggtggcaccaatggccctgaaatggccggtggcccctgtgcttgtggtggtggagcgttagcttgtctgagtgagcacacttccagctgcttccatcccagtggcagtggtcgggcttgtcacttgtgtgctgcgcagatgtgcctgcaggggagaattcnnnnnnnnnnnnnnnnnnnnnnnnnnnnnnnnnnnnnnnnnnnnnnnnnnnnnnnnnnnnnnnnnnnnnnnnnnnnnnnnnnnnnnnnnnnnnnnnnnnnaagggtaggaagggagaaaatggaaggggcgggagggtgtgtgggagattgtatcaacataagtgggcgggggggagttggggaattcggtgggcgataatgggggtggggggggggatgaggggatggatgttgggaagggggtgggatatggtatgggggaagagaaagggtggggggtgttggtatgggttgaggtgggggtattttgggggaggattgaggaaaaaaataaaaaaggggggggggggataggtttggaagaccggaattggggggggaagcattaggggggtcaataggagtaggcattctaggacggtggcaagagtcaaggtttgggccaaggcagggcgagctcggtggggacagcgggtcagtagctggggcctatgcatggcaggcaaggccaaggtggctcaaagagcaaccagccacctctgcaatggtgcaactggaccagttggaccagccaccagcttcacccactgaaggaagcagggatggccaggttccaacagccggagtggctgtctcctgatggctgatggagcagaggccttaggaaaagcagatggccctgtggccctacctttagggtagaagtactgatgtgccatgtccggtagcaagtgaggttggtggctggtgcagcggctcctggcacaccctcgcagaggtgactggttgctctttgagccagcttggccttgcccagcgtgaacaagcctcagtgcaacctctctgctacatatggagccacagagaggaaacgagcagcaggctcaggagcaggctgtgcgctgcctttggggctccagtccaagcctcgagtcgtatagcactgtgggcctcttggttgcctagaggcagaaaacaggccatcttgaggaggactttatgttcaagtgcagaaagcagccaggattaccatccaggggactcagccttctgtggccccggccagaccttgcagaggtggctggttgctctttgagccagcttcacctcccttgcatgcacaggccccaggtactaacacgctgctctgagtgagcctgtcctgccttggctgccacctaattgctgatggagcagaggccttaggaaaagcagatggcactgtggcccaccttcagggtagaagaactgatgtaccatgtccggccactagttggtgactggtgcacctgctcctggcacacccttgcagaggtggctggttgctgtttgagccagcttggccttgcccagcatgcacaagcctcagtgcaacaactgtgctacaaatggagccacagagaggaaatgagcggcagacttaggagcagggtgtgcgctgcctttggggctccagtccatgcctcgggtcgtatggcactgcaggcttcttagttgccaagaggcagaccacaggccgtcttgaggaggacttcatgttcaagtgcagaaggcagccaggattaccatccaagggactcagccttctgtggccctgtccagacttagaatttgtgtcaaggcaggagaagctcactcggagcagcgtgtcagtacctggggcctgtgcatgccaggcaaggccaagctggctcaaagagcaaccaggcacctctgcaagggtgtgccaggaccaggtggaccagccagcaacctcagctactcaaggaagctgggatggccaggttccaacagcctgagtggctgcctcctgatggctgatggagcagaggccttaggaaaagcagatggccctgtggccctacctttagggtagaagtactgatgggccatgtccggtagcaagtgaggttggtggctggtgcaccggttcctggcgcacccttgcagaagtgactggttgctctttgagtcagcttggccttgcccggcatgcacaagcctcagtgcaacaacagtgctacaaatggagccatagagaggaaacgagcagcaggctcaggagcagggtgtgcgccgcctttggggctccagtccatgcctcgagtcgtatagcactgcgggcttcttgcttgcctggaggcagaccacaggccgtcttgaggaagactttatgttcaagtacagaaagcagccaggattaccatccaggggggccttctgtagccctggccagaccttgcagaggtggctggttgctctttgagtcagcttggcctccctggcatgcacaggccccaggtactaacatgctgctccgagtgagcttgtcctgccttggctgccacctaattgctgatggagcagaagccttaggaaaagcagatggcactgtggcccacctttagggtagaagaactgatgtaccatgtctggccgctagtgggtgagtggtgcacctgctcctggcacacccttgcagaggtggctggttgctctttgagccagcttggccttccctggcatgcacaagcctcagtgcaacaactgtgctacaaacggagccacagagaggaaatgagcagcagggtcaggagcagggtgtgctctgcctttggggctccagtccatgcctcagaactcgtatggcactgcaggcttcttggttgccaagagtcagacaacaggccatcttgaggaggactttatgttcaagtgcagaaagcagccaggataaccttccaggggacttggccttctgtgaccctggccagactcagaattcgtgccaatgcaggacaagctcacttggagcagtgtgtcagtagctggggcctatgcatgccaggcagggccaagctggctcaaagagcaaccagtcacctctgcaaaggtgtgccaggagcaggtggaccagccaccaacttcagccactgaaggaagcagggatggccaggttccaagagcctgagtggctgtctcctgatggctgatggagcagaggccttaggaaaagtagatggccctgtggccctacctttagggtagaagtactgatgtgccatgtccggtagcaagtgaggttggtggctggtgcagcggctcctgccgcacccttgcagaagtgactggttgctctttgagccagcttggccttgcctggcatgcacaagcctcagtgcaacaacagtgctacaaatggagccacagagaggaaacgagtggcagacttaggagcagggtgtgcgctgcctttggggctccagtccatgcctcgggtcctatggcactgcgggcttcttggttgccaagaggcagaccacaggctgtcttgaggaagactttatgttgaagtgcagaaagcagccagaattaccactctggggactcggccttctgtggccctggccagacttagaatttgtgtcaaggcaggacaagctcacttggagcagtgtgtcagtagctgggcctatgcatgccaggcaaggccaagctggctcaaagagcaaccagccacctctgcaaaggtgtgccaggagcaggtggaccagccaccaacttcagccactgaaggaagcagggatggccaggttccaagagcctgagtggctgtctcctgatggctgatggagcagaggccttaggaaaagtagatggacttgtggccctacctttagggtagaagtactgatgtgccatgtctggcagcaagtgaggttggtggctggtgcaccggctcctggcgcacccttgcagaggtgactggttgctctttgagccagcttggccttgcctggcatgcacaagcctcagtgcaacaacagtgctacaaatggagccacagagaggaaacaagcagcaggctcaggagcagggtgtgcgctgcctttggggctgcagtccatgcctcaggtgtcatatggcactgcgggcttcttagttgccaagaggcagaccacaggccgtcttgaggaggacttcatgttcaagtgcagaaagcagccaggattagcatctaggggactcggccttctgtggccctggccagacttagaatttgtgtcaaggcaggacaagctcactcggagcagcatgttagtacctggggcctgtgcatgccaggcaaggccaagctggctcaaagagcaaccagtcacctctgcaagggtgcgcctgtggtctggagggtggtggctccctgtgttagtcctccaagcccatattttccttctgcactggcctcacagaggtttccgaagaagctctgcctctgcagcatgcttctgcctggaaacaatgggaggtagttttgcagggtggaagccttcaccaatggttaagcagcatcttcacgatgctgacctcgtgatagtgatttctcatgagatctgcttgtataacatgatgtggcacctctttcctctctctgtcttgctccttctcctgctgtatgaaacatctccttgccgcttggtcttctagtaagattgggagcacctgagtcctcccagaagcagaaactactatgcttcctttgcagcctgcagaactgtgagccaatgaaacctcttttctttttgatcatacagaaggttagtactgtgaagggaagctatgaaattccttcaaggtcttttccctatgaaatgccttcaaggccttttccccattgtcttggcaagcagcactcagcttcttttcatgcaaatatctgaagcctatgtgaattttttccctgaaaatggacttttcttcttttaccacattgccaggctgtgacacagagagctgataatgtagaagcaggttcagtagtgggtaaaagacagaggtcgggagagttgggaaagcttaaaagacagcaagatgaggaaaagcttggaccactgtagagaattgttaaatacttgtgatcagaaggctgacagaaggatggacagtgaaggccagacttaaaagttctcggatgaaaaccaggaatttcctgtgaataggagccaatactacatttgatttgcccaacagaggctgcacagtgaccttgccctggagatctgtgaaactatgaacttgggggtgatgatttaggatgtatcttgtggaatgaacatctgagcagcatagctcaagaggtgtcctgtctgcgtcgaacagcctgtgttgttatgtatgagctaagaaatgacctcaagttggaacttctacttaaatgagaagcggagctcaaaagtttggaaaatttgcagcctagtcaagtggtcaaaaagaaaagctgattttcagggggaaaattcaatacggcttagagtatttgcataaaaaggagcttagtgcaagtatccaagacaaagggtaaaaggccttggaggcatttcagagacctttgcagtagcccttgctctcacaggccctggggcctagcagagaagaatggcttcctgggccagctccatggccctgctgctgtgtgcatcctcaggacactgctgcctgcatccctgcagccccagctccagccatggctgaatgatgcacaggtacagcttgggtcactacttcagatgtggctccaagccttgatggcttccacatagtgttaaggcagcaggtgaagagagcaagagactagaggctttggagcctcttgtctggactccagaggatgtagagaaaagcctgggtgtccaggcagtagcctttccaagaggctcatggaaaacctctgctagggcagcaaagaagggccatgtagggttgaagccccctcacagggaggctccattctccaaaccccagattcatagacccaccaacatcttgcaccctcagtgtggaaaagctacaggcattcaaaacagccctgtccatgagaggcagctgtgggtgctgaacgctgcgaagccacaggtacagatctgcccaaggccttgggagcccagccctcacagccctgtgccatggatgtgggacgaggattcaaaaaggatgattttggagctgtcggattgaatgactggcctgctgggttttggatgttcatgtatcctgtgagtcccatctgtgttttgtttttctttctggcattttttttctactggctgggaatgcttacccattgcctgtacaatcattgtgccttggaattagttaacttgctttataattcagaaactcaggggcagatcggactgtagccttgtctcagatgagactttgggctttggacatttgagtaaatgctggaattatttaagatttgggggactgtagggaaggtatcattgtattctgcaatgtaagaaacaggagatttgggggaccagggacagaataatatgatttggctctgtgtccctaccaaagctcatgtggaattgtaatgggcaaagttaaaggtggggactggtggaaggtgatttaatcatggtggagagtggagtttggaaggtgggggtggttgggagcattgggggggattgtgttggggttgcggggaaaagcagaggtggggggcagattcttcacaaatggttaaacaccatctttgtaatgctgtccttctgatagtgagtttgcttcatggtttaggagctttgagatttgaatactggcctgctgggttttggacgtgcattgggcctgtggtcccatttgtgttatttttctgggaaatttcttccctttggagtgagaaagcttacccaatgcctgtaccatcatcgtaccttaaaagaactccattttaagttcagggactccttggcagaagagaccgtagccttgtatcaggtaagactttgaacttcttacatttgagttaatgctggaatgagttaaggcttttgtaaacatttgaaaaggcatgactgtattttactctgtgagaatgacatgagattcgggggagggggtcaaggtcagaataatatggtttggctgtgtttccctagaaaaactcatgtggaattgcaatcccgaatgttggaggtggagcctggtgggaggtgatttaatcatggatgggaggtgggtggggttggagggaaaaagaggtgggtagcgtggtgaggagtaagctcgctgtagggtggtgggagggtgggggtagtaggaaggaggagtagcctgctgcagaggcagaggctcgtggaaaacctctgctaggactgtgcacctgtggctttgcagggtgtagcccccatggctgctctcatgggctgggctggtgttgagtgccggtagcttttccatactgaaggtgcgagctgttgatgggtctatgaatctgggctctggaggatggtggcctcctgcacaggggctccaagcccaaatttttcttctgcactgccatagtacaggttttccaagaggctcaggctctgcctcaggcttctgtccggaaacaggagggggtggaggtgggttggggactgatccttcactaatgattaagcaccatcttcttgatgctgacctcgtgatagtgagttctcatgaacttcctcatagtgttaagccactggttggatggagcatgagcctaggggcttgggaggctctgtatagattttggaggatgtatggaaatgtctgggtgtctaggcaaaagccttcctaaaaggcagaacctcataagaaacctctactagggcagtgcagaaggaaaatatggggttggagcccccacactggaggccaccatcatgaagaccgcagattaatagaccccgcaacagcttgtaccgtcagtgggtaaaagctacaggcgctcaacaccagcccagcccatgaagacagccgtggggtataaaccctgcaaagccacaggtgcagagctgcccaaggccttgggagcccagcccttacatccctgtgccctggatgtgggacaaggtttcaaaaagggtaattttggagctgtaggattgaatgactggccttctgggtttggagtttcatggggcctgtgagtcctttctgtgttttgttctttctggcaaaattattccttttggctgggaatgcttacccattgcctgtataagcattgtaccttggaagtagttaactttctttatatttcagaggctcatgagcctaagggtctgcagccttgtgttagatgagactttaagctttgaacatttgtataaatgatgaaatgatataagactttgggggactgtagggaagctatcattgtagtttgcaatgtgagaaggacatgagatttggggagccagggagagaataataaaatttagctctgtgtccctaccaaaattcgtgtggaattgtaatggggaatgttaaaggtggggcctggtggaaggtgatttaatcatggtggagagtgggggttgggaggtgggggatagggagaatggggagattatgttgggggtgaggggtgaaaagtgatggtggctccttcacaaatgattagacacaatctccttatttctgtccttgtgatggtgagttctcttcatgattttggagcagtgagattgaatggatactggtctcctgggttttggacttgcattggtcctgtggtcccgtctgtgttattttgctgggaaatttcttcccgttggactgagaaagcttacccaatgggtgtaccatcattgtgtcttaaaagaacacccttttaaattcagggacttataggcaaaagggactgtaggcttgtctcagatgagacgttgaaccttttacatttgagttaatgctggaatgagttaagacttttggcaacttttgaaaaggtgtgattgtattttgctctgtgagaaggacatgagattcggaggggtcagggtcagaataacatggtttggctgtgtttccctacagaaactcatgtgaattgtaatcttgaatgttggagatggggcctggtggaaggtgatttaaccatggatgggagggggttggagttggaaggaaataaagtggatagtgttgggaggagtgggttgtcagtagggtggtgagaggatggtgggtattaggaagcgggagtagcctgctgcagagtcacatcctcatggaaaacctctgctagggcagtgctcctgtggctttgcaggctttagcccccatggctgctctcatgggctgggctggtgttgagtgcttttgcatactgagggtgcgggctgttggtgggcttatgaatctggggtctggaggatggtggcctcctgtgtgggggctccaagcccatatttcccttctgcactgccatagtagaagtttcccaagaggctctgcctctgcaggaggcttctgcctggaaacagtaggcggtggtgtgtgtggtggatccttcaccagtggttaatcttcttgatgctgatctgatagtgagttctcatgtgatctggttgtataatgggctgtggcacctcttttctctctgtgtcttgcttctatttctgccatatgaaacatctcattgccacttggccttctgatgtggttaggaggggcctgatcagtgtgggcctgctcagtggacctagtcagttgggacttggtcagtgaggcctgtttagtgggagcctggccagcaggggtctgcttagggagggtctcattagggggatccagtagtgggggttttggcgagtggggacctattggcagccagttgtttggtgtctggtcagtgcagacctgggctgtggggcttgaccagtggcgacctggtcagctgggcttagtggtggcctggtcagcatgggctgggtcactggtgaccaggtcaagggctgctattcagtggaggactggtcacatgggacctagtcagcagggcctggtgggcttgtcctcatcagtgaggcccttgtcagtggggccctgatcagggcagcctggtcagtggaacctcatcagtgggggcctggtcagtgatgacttggtcagtggtggcttttgtaccactggtctacggggtgacctggtcagcggggacctgagcagtcggtgcctgttcagtggggcctactcactagggtcccagtcaggggcatctggtcacctcaggcctggttagtaggggcctgatcagtggcagcctgttccctggaggcctggtcagtggggcctcatctgtggggccaggtagtggggtcatgatcagtggaatctgatcagtgatgccttgtcagtaatgaccttgtcagtgaggccttgtcagtggggccttgtcagtaaggacctggtcagtgaggccttgtcaataaggtcctgatcagtgaggtctcagttaggacctggtccatgaggccttgtcagtgaggccttgtcagtaaggacctggtccgtgaggccttgtcaataaggtcctggtcagtgaggacttgtcagtaaggagctcatccatgaggccttgtcaataaggtcctggtcagtgaggccttgttagtaaggactttgtcagtgaggccttgtcagtgaggcctggtcagtaaggacctggtcagtgaggccttgtcagggaggcctggtcagtaaggtcctgttcagtgaggccttgtccatgaggccttgtcagtaaggtcctggtcagtggagtcatggtcattgttggcctggaagcaggggtcttgttagtgggtcctggtgatggggatctaatcagtgagggtgtggtcagggaagacctgatgtgtggggtctggtcagcaggaacctggtcagtggggactgctgagtgctgcttggagaagccaggtgcattgcacgttatcgagggccctctggacagctgggatggcccagtgatgcccaacggcctggtcaaaagtggacaaagcagttgtttggatggacctgggagatgttgctcagagattctgacaggacaaaggtgaagaaagggtcagagtgtctggagagatggtcacagtctatgggctgcacaggatggagaaagccagggaacaggcagggtggacagtgcggtgcagggagaggtaggtgcatggtgggacgtcagaccctgtgaaggctgtgagggtgtcaggtgggttgggctccaggtgcaccctcagtgcactgggtgggtctcaccccaagctccctggaccccagccaggtgatgtggtcactccctgggggactgctctcaggtcccggctacctaccctgggcagcgctgtcccatctcaggactggacttcctcagatcctgtagagggcacagcctccacccaggaggggcaaccccatggtgcagcctgagctctccatgggcctggagcatcccctgccagccttgtgctccccattctcccaggtcccacttttccagtgtcagccagcagggatgccccgtcctcccttccccatgtgtctcctgggctgaaacttgtggcagattgggacagggatggtgcttccctcaggcccatttggggaggggactggctcccagactggtgcaggtcctcagctctgcctcgattggcttagagtgagatggatcagtcagttccctgaaggtgaagataagagactgtccctgctgttgggaggctagtctagggatggaggacgtaacaggtcctcccaggctgtcaggcctgggcagcactgtcttgtcttaggactcagaaagtccagtcctgagatgagacagtgctgcccagggtgggtgtctgggacctgacaacattcccccagtgattgaccacatcacacatccagggtccagtgagcctggcctcagacgtgcccagtacactgaaggtgcacctggagcccgctccacctgatgcctccacagccctcgcagggcctgacctcccagcatgcacctgcctcttcctgcaccccagctgtccaccatgcctgttccctgacttcctccatcctgtccagcgggatgggatggacatggggacagcctgtgtgcacatttcgtggcgagtgggagtgacacaccatctctgggaggcaccatggttcctggcaaacccgatcccaagactctgtccttgaggtggttttaccaaaccccaaacccagaactgcagttgtggctcaggggtcagctcctgctagtgccaggacactactgggaggctgggacccgaccaaagcccatggtgcctctggcctgaggacaaggtgtcttgggaccataaggccagcccaccaatggccattgggggctgagccccaaatcataggggctcagccccaatctttgtccttccctggctccttctggttcagtcccatcagggccctggatcccaagactcagcatccaaggtcccctccaggaatcctggcagctcagcatactttattctgtttcatctgagagcaaaaatgtaaaattggatgcacagaaaagtgactcaaagtgcttaatgactagaataaatctaggagcagcaagaaggtaatgtggagggagggacctccatgaccggtgtctgcagagccaggggtacaggcacccagtgctgtggcctggcaccacctgcatctcagagggtgggtggcacactccttacccagaggacagcaggcctggtcaccagcttttctacctgtccctgtaagcatcacattgctggaggaaaatctcatgccagagcttggaccatcccctagctcaggggttaggggttgtcccttggtgacctaaatgaaaaaacaggtccagaacagagttcctgatgctggacactcattcagtctttgaatcgtgggaggggaggcctggtactaggtagacctaacctctttgaggaaccacagagcccaaggctggaaacctccagaatcctccaccccctgatcctccctggggacccctgtggcctgtctcactgagcactcttccatctgtagatgtctgggctgctgtacaagggagtcccctttcaggtgtggtgctagacatggtcactcctgctggatgtctaggtggtagaaaccagggacctagggaaataccaggtacagcctttccatgctcatccagagcaggacaaacaggccaggcggtgtcaggagcccaggtctccagctggagggaacgtcaacccttcggtgggagcaggggccctttgcacatcctaggcacagatggtaatgtagacaccacaggtaagctgggcttggtacctacccctccccggattcagaaagaaaccaaacaaggagctttgtgcggaatgaaacctcctttcctcccagaagcactgctgactgtttggtggttgccatttgtggcagtgagcctttgtttgttctgaggttgggctggtttctcctcttggccctgccctacagatcataaaggagaagaacaagaggtccccagcaaacatccacagatggccttggaaataagtcaccttgtgagaaacatgtcatgttctgggagggataaggcatcaagtaaggcctatggggttggaggatccctgggcaggtggggcaatccttggagtcttcccatgggaatagggaggtcctgaggcagaggcaggggttccacaggaggagtcacagagctaccaaaggctctcctgtgccaggaagcagtcaacaccatgaactgaacacctgctgggctccaagccctggtccaggctggggcatgtggggccaggaggcagctcagagagggaggcagagagaagtgtgctgagagggcacccatttctgggtgtaatgtggtccagagattttggctgggaagggcttccagagtttcatatgtgttacggtgctgcttcctctccctagcctcaccctgcaggaatgccagtgaacttattgctgacatcttggagctcagtaccctcatagtgtaacggcgtcagcagatctgcctgtgctgggacttcctgtactacccattcctgaggggcgatgcttctgcagggtctgtgacttggtgcacaacttcagacaccatcatcttgcagcagcaccgcaccctcactagccagggtgttgatgacttcctcaaggccaaggccacattcaaggcttcggacttcattgatgcgcttgtgctgagcaaggtggcttctccgggatcttaattcaggaggtagaatggagcttgagatcaagtgtctgatcaaggtacttgaacttgatctggagggctctggggagccatggaagatgctggataaaggagtgacagtcagctatgttttcgagatgactgtagaaggctgcctggaaggagtgaacaagagccaggagaccagggagggagcttgtggggcaggtctggagatggcgagggagggatcctgcttggatgaaaggtcttcagggactgtctcaggttacacacaggtgtcctcagagctagtgtgttcagagtcttgcctccaggatgaaaatgggaaggagttgtcagatgaggacatataaatggaggctggcatattcatgagtgctggtggtggtcccggtgtgggactactgtgggaacaggggtctctccatccagggatatgatggatggaccctacatcactccattctgcccttcctttccctcctcccattctcccgaaagcctcagtgtatgggcgctgttcatcctctggtgctgaagcagccaagagacccaagtctgcctggctgcctcttaggatatgacagcagagccagtggcctctactagatcctgtacaacctcacaaaacacccagacatcgggagtgctgccagcctgtgatgcaagagtcctaatcctgaagacattgaatggtgggtgcagggcctcatggcctgttccccagcccctctcattggctctgctccaggtggtgaagggggaaaatgtttttgtcaattctgtcatgattgcctagcaagaaaaggagcagaacccagaagcagtaaaatcagttagtaaaatcagttttcttttctgaactacatttctgccatctctaattgaggggaattccttcgactccacgaggttgcttggagaatgactgacagtgtatgtagagcaggtgccagccagcaggcgtttggtgtccagaccactcttcccccttgattttctgcctatattttcattttgttcccaagaccctcactccccttaattttgcttttccctctgattcccaccttatcttctttcccatggattcaccaggatgtaagtgggtaacagtcatctatgcatgtatgtgtatgtatgtatgttctctgttggtgttggagtatggtgtgtgtgtgtgagagagaaagaatgtgtgtgtgtgtgtgtgtgagagagagagagaatgtgtgtgtgtgtgtgtgtgtgtgtgtgtgtgtgtgttggggtcactgagggactgaaactctccacaccaggctgtggtcctgctcactgctggaggcgctgtcagggctcttgccattgaccctccaggtctcattcttgcagtacaggcagggcattctggaggaatcatgtccttggaagaagccctgaggagtgactggtgtgtattggtggataaataacccagctcccttgctctgggtgggatgactctgaggcacatgttctatgctgtctctcagaggtacccggcagggctgagtcctggctgcccacagtggaaactttcttgatgaaggtccctttaactgctacattccattcctgtctcagttccccactcctctactggtgttgcctgcaattagtactctaaggaagaactggcagtagaattactgtcctggagtcatctccagataaaatttttatacttgaatctttgcctcaggatctacttccaggaaacttaaactaagacacacatttttctttcctccaatcttcatagacctgtcattctgctgtttttaccaaaaaggatcatgaggatcagagaggaaaagtcacttgcccaaagtcacacagctgaacagtggtggagttcaactttgaccgtgggctgtctggccccaaggtgtatgcttgcttctctcccaagagacaactttcttatcaggctcaaatgaatgaaaggaggatgttaaaggtaggatctctgaagcctgtgccagtggaaccgcagctcatggctggcacctgtgttctcattcttacctcattaagagtaaagtttattgagtttattgaatttaagtatctttagtgagatcatatattattagtaagaactgggaccaaacagattttctgactctaaaagagagattttcacagaaacagatatatacctgtaagtatacagacacgcatacacacatttctttactgctcataaaaattagtccttattagaatgtgggatgtataaatgtaagagaattttcatgttaaaattgacagatacatttttaaattgtcctaaaataaatttaattatttttcttttagaattttccattattaatgttatttttatgagaaactatataactttattgataatacatacaataaccctttgtttttcaaattgaaaatacagtgtattttgcaaataactaagtcctaattttgtattaaaattttaaattttcaatcttttttattattatattttaagttctgggatacatgtggagaacgtgcaggtttgttacataggtatacacatgacatggtagtttgctgcacccatcaacctctcatctactttaggcactcatctacattcggtgctacattatgatgtggagaaataggaacgcttttacactgttggtgggagtgtaaattagttcaaccattgtggaagacagtgtagtgattcctcaaggatccagaaccagaaatacatctgacccagcaatcccattactgggtatatacccaaaggattataaatcattctactataaagacacatgcgcacatatgtttattgcggcactgttcccaatagcaaagacttgaaaccaacccaaatccccatcagtgatagactggataaagaaaatgtggcacctatacaccatggaatactctgcagccataaaaaaggatgagttcatgtcctttgcaggaacatagatgaagctggaagtcatcattctcagcaaacgaacacagaaacagaaaaacaaacaccacatgttctcactcataagtgggagctgaacaatgagaacaaatggacacagggaggggaacatcacataccagaacctgtcagtgggtggggggctaggggagtgggggagggatagcattaggggatttaataattttaaaattcaattctgttgaaatgtttactccaagaagcaatgtgtttttgagagctaatcctgatatattcaaatcttaacgacttaagttgatggagtggacttcttttaaattagtgattccctaatttacctgacagttggaatttccaggccatgttgaaaatacagattatccagactcttacctctgcagatgtatttagtggttctaaaatggcacccaggagtctggatttttcccaggggccttgtgtaattcacactgatgaccaggcaagtttgggaaattgtgccttaaggagacttttcattaagcagtcttcatttgaaaagaggatcatttatcttctaataccccatgcttcctctttctcctgctctctttgtctcctgttgtctttcagttcctagaagctttaattgaatgaaagttcctagtagatctgtacctactaaaaaccacacttctgaagctacgtggccaccagaagacacagctagtctgccatgtaaaaaaggaaaggtggcgtgtgccctgaaggtgcaggggtgagaggcagggaaatggagaccccaacagccagcagcagtggccctcatcacagccctccaggagatatcaaaggaggtcagaccttggacagtagtcttgacttcctgctatagaacacattgttaacactgaaaaagatgatctgttctaggggaatggtgaaagctgactctagcacttgtactttttgtttgtttgtttgagattgagtcttgctcttgtttcccaggctgcagtgcaatgcgtgatctcagctcactgcaggctctgcctcctgggttccagctattgtcctgcctcagcctcccgagtagctgggattccaggtgcccgcaagtgtgcctggctaatttttatgtttttagtagagatgggatttcgccatgttggccaggctgttctccaactcctgaccttggccaaagtgttgggattacaggcataagccattgtgcccggcctgtgtttttaatttcatcgtggcacagcttcaaaatgacatctaagtagctgacataaaaatgaaaattctgtgtactttgatattagcaggcttcaaatacaaaccagaatatgagtaaattgtttcttaaccaaactgaataattttcacattggcaggccattggcaggccattcagcatctggctcatgtttgggccaagccgggtgcctcatgaaagtctggagggaaatacagaggccaattctccataagcattaggctcagaaatatcctgcttcccagtgaaaagtttaagttgactttcacgccaccttcatcaaaccgaggttggtcaacacttttcaccactgccactggacactttgacttccaattttgctacctgctctacaaagatacccccttccttcctttcctgcattctccctacaaccttgtctttttttgagtatatccactctgtctcatcattgtccatctctgcttcccaaaaccttatatagtacagaaattggccaatcaagattaccatgtggaagagcatccatttactgaataaggtagctggctcctgggggcagaaaagtgattagacacagagataaaaatcataatccctgctctcctggatgcactgtccagtggggagacagacagatgaacaaatacaacttgataactacaacaatcaagtgaattatataatttagactggagaaagagagagcaaacgttatcataagacagtgtgtccactacttactctctaacagatttcctcataaaccactaggcttgccaacttgttgaatgagataaaattggagggtcaggggaggggaaatgcatatgcttcttagtatttcattccataaatacataaataatgaaaccattaatgatatcatcatgttgattcaataagtttgaaagcaaaattgatagtaatctttggaagaaattgtatatgtgtctatgtatgtacatacatagacatacatattgctttctgaaattttcaatgactttatgcttcttctgaagcaattcgagtttagtatttgagacccctgggtcaaaacatcttcttgagtatactgaagaacatttggattaatttcagacatgtattttggtttatatagtgttttttatccatggtaacttattcactgtttaaaaacatattgagaacaaacaacagcagcaaccctgaattgaatgaaagtcctgagaagggctttgcccaatcagtgcatgtgcatgtttacactaatctcctgtctgaacctaggaactggctgaatgagctagcagatggcctgtctggctgcattataaatgataatttatttttatttgttttactcattcattcattttgagacagggtctcactctgtcatccaggctagagtatggtgacacaattatggctcactgcagccttcaactctcaggctcaagcaatcctcctgtctcagccttctgagtagctgggactacaggtgcacaccaccatgcccagctaatttttaaaactttttctgtagagactgggtcttattatgttgcccaggctggtctcaaactcgtggactcaagcgatcctccttccttggcctctcaaagtgctgggattacaggcttgagctaccacatatggccagaaatgacattttaaaaccaactattacgtacacagatatatgatgctctctgattgttttatctaaaaataggagtgccttaggtttattggctcattttgttttatcaaacaacttaaatgcagttgtgaatatttttgtttaccctcataatctgagaatttagaatgaatataattattgccattttcacaagtaaaattggaacgagaatataaaacagtggaatacaggtgcagctaagagtagcagaggtaagccatctatagaatattaaaatttcttccatgtgtgttgttagaaatctataaaaccaaaattttttcatgcctggaatcccagcactttgggaggccaaggcgggcagattacctgaggtgaggagttcgagactagcctggccaacatggtgaaaccccgtctctactaaaagtacaaaagttagccaggtgtggtgggcacctgaaatcccagctactcaggaggctgaggcaggagaattgcttgaacccggggagtggagattacagtgagccaagattgtgccactgcactccagcctgggcgacaagagtaagacttcatttcaaaatagcaacaacaacaacaacaaacaacaagaacaacaacaaaacccaacattttctaatacaaggaaactcactaagctttataaggcccccatccctccaagtattatcctttccggctgccccaacattaatgacagcaactggtactagccatctgacatacaatcccagtacatttttgggctctgatgttttctaggaattttttctttacagacttattgaaattaagctctattccctgaagacctggttttcataaactgtatagttttgcagttgaggggaaatggtcttaggtcagtcaatccactgttgacacagaaatgaaatgaggtaacggtaggattattgttaagattgagagatgtatgaatcatcctatgctctttcccagcccccaggtgaccatataattaaaatatccttgatatttctatgtagtttaagtttttaattctagaacccctcaatctttctctattcaacttaaatgaaaagacatttgagtatccagaagacactcagcactcagaagcaaaggaagaaaaatggaaacataatggtcaatgcccatgttctaccccaggatcaaatgaggcattaatattgagagttgtgattctgaatgagtcttaacctcatgtacatcttagttgttcaaaaatgtgtcatgtcagcaaggtggtaacagtgaagattttctacaatcaaaatagtatagttatgttctgttgtataaaatagaaataaatggaccacattgatcagaaaaatcaccctagcatattccgacagcttaatttttaaaaagctatgttatattaacaatttaaccacatagatctgtcagctagaatacatgttgcatatttaattgacaataattttttttgctctctcagagagttgtagatagattttggggttatcaaatggttctgacttcttttttttttttttttttttttgagatggagtcttgctctgtcaccaggctggagtgcagtggcaagatctcagcttactgcaacctttgctccctggtttaagtgattctcctgcctcagcctcctgaatagctgggattacaggcgcacgccaccatgcccagctaatttttgtatttttagtagagacggggtttcaccatgttggccaggatggtctcaatctcctgacctcgtgatctgcccgccatggcctcccaaaatgctgggattacaggcatgagtgactgtgcccggctggttctgacatatttttaagaaagactaggctgatgctatggtaactcagttattcacgatacatgtcatcttgtaagtaggagtattcaatattcatggttttgaagcaatttcagagtactataatcaccacacttgacagacttcagaattcattgaaaatctctggaaataattagcaatttgttatcatagactctaaacagaccttcaaaatgcattacatagatttggtaaaacagattgtcagtctgccaaaagtaatcaccttggtttgatttgcattgaatgaaaattttaaaatgtaaagctaaactcttcaggatcactgcactgggtttctataggacaacactgaacagggctgccactgaaacaccttggaggagagcctcaaactccctgaacacagcttccagcacactactgggagaatgattgggactcaaaaatatgtgcaatgaatgtacttacgagcttgttggaaaggaagtaaagaggttgtatgtaattacctcaaattaatactactacagataaagtagtaatcagtactgacaaagtaatagtagcactaaagtagtactaatagccctatactagtagtagtaataaagtggcatcgctattgattctatccgtctacctacctacctgtctggatgggagggcataggatttgactgtaagattgggcttagcagtgaagacaaaagagctcatgcatgctttggacaggtacgcgctcaaacttggtatcatgtgactgttctgaattccagaaccaaggctaaaaggtggaagttttgtttgactgtgtctcacattttccttttggtctattgtctaacacatgttgctagaattctttttactctgactaccttttatgtatagacaacgccattattgacgagatcactcccaagcggattggagattgtcccaatacttagacctatagcaaggccttgggagaaatggtggtgcagcaggagagcaggaacctaaccattgccatcctaaggccctgcattgtgcggagcaacgtggcaccagcttttcctggtaagcccacttacctggattctgtgttttgctttcaaactaaggttcttctagcccaattattttctgatgtctttcttcttcttcttctcctcaggatttatagttaagtgcagccaatcaaatattaacccattatactagggcaaaattccactttgggatcatgcggctcttctggcagttaccctatcttagagttggatggagatcttaaattagcttctaactactctagtctcaaaattcccatgggtgatgttttcatatcttggctttcccactgtagcttaaacatatcagaatgttcttgatggccaaattggtagtattgcaactaactgccagggttacaaagctcacagaaggatctcagtttgggaatactaattttttttaacctcagtatactgctatgtccttttgaaagtactttgaattataccatcttcttcaaagcaagtccgtgaagctttgagggcagatacattccagctccaccacttactggcaatgcaacatttttgagttgttctttcggtagaacaggacagatactactttggagagttggtttaatgagacaatgtatgaggagtgctcaatctctagtaaaaggtagatccctactaaaaggctcaacgaatattagtcccttcatcttctcttcccgtatatctggtctcccattatacgcatttcgacttttatactgtaaggtaaagagacggcttagggcttaggaaacaaactgaaaaatacatttccctctaactactcttaagcataatctttcctgtaacatctttaagcaagtcaatacacattattaccaatcatgttttcaatgttctcctaaggaggctaaaatcaggaatgaggtgaagtatggttggtgaattgcttagcagatcatgatataaggacaaggtccattgtagcccttaagttgtcataaaacgccacaaaaccattcatgactcctgctacaaacaacaatcctggccaaattttaattcttgcacaaactgcagaaaatagccaacgctttgccattgatctttgggatcttaatcatactgaattagatagttctatcggctggagtctcagtgcccttgtttgaaatttattaagattagacggcagatgttccaaagatacaacaattttctgaaatgtgtaaccaatggaaattttctttcttttagggttgggttgataatctaaatggatgtagccgactcattattgcggtatgtatagggatgaagaagtaactgtaatgtagtggaggaatagtaagaaaattcttagtgctggcttagcttcattgatccaaaaacataaatgctactttactatcaattgaagcatattatttcaattattctggttataatatggaggcaggatgaaattgtttttattctcttagaattttttttatcaggaaaacagaggtaaagtgctatcaattactatttaagagttctattttgaaaagtctttaataaggatttttcttttctttttaaaaaagacttttttaaaaattaaaaataaaagaagcaaaagtcttaggaaaatgaggcaagtagccctgccactctatgtacagtaataacaatatctgtcccagttattatgtacaatattataaaaaatgtcgcagacagtacaaattaaggcacttatttctcaaaggacatcaagtcttatgccccgtgggagggaagatgccacttaattattgcaccattttgaaaaacagaactcgtcaaggcggatagtggtcttttcccacctggtcttcagtcacagatgggggctggggcggtggcgccgtcttcgtcatcgaggtagaccctatggagccacaccgccctgccgagttctctgggtgcaataaataccagtcacagtttgggagggggccgtgtgcaggtggggaggcctctgggctgcatgtgccgcttcctgtgcagggcaaggtgggcagagcgcaagaaggcgtggtggcaccaatggccctgaaatggccagtggcccctgtgcttgtggtggtggagcgttagcttgtctgagtgagcacgcttccagctgcttccatcccagtggcagtggtcgggcttgtcacttgtgtgctgcgcagatgtgcctgcaagggagaattcttgctgtaggtctggccgtagccacataggtatgcccggtgttgcggttcccaggccaggagcagctgtcatgcttgggcttggcctccagcagctccagcggggacgccggtgccaccacaaggagactgcgggcgactgggggtgccaggcccagggctgtggcggtggcggccaacgcctaagagactaaagacaggggcgtggaggggcggagctgggtggggggcgcctcatgaaggccgggctgggtgtcccaaaccagggccacggaaaggcagcgggaaggaggcgtgcgggccgtaggggctgaggggcgggtgttgggggcggaatgggagggacccgggacctcgcatgcatgaagccgcaggcccggggcgccctagtgtttgaggacgcgcggtccatgcctgaacctgggtgcgcagccgcagctgccgccatctgcctcagggggttgggctttgaccaggcggctgggcagcgccagttgaaagcggttgagcaggccgggcgcagtggctcacgcctgtaatcccagcactttgggagaccaaggcgggccgatcacggggtcaggagatcgagaccatcctggctaacacggtgaaaccccatctctactaaacatacaaaaaaaaaaaagtagccgggcgtggtggcgggcgcctgtagtctcagcactttggaaggctgaggcgggcggatcacgaggtcaggagatggagaacatcctggctaacaggtgaaaccccgtctctactaaaagtacaaaaaccaattagccgggtgcggtggcgggcgcctgtagtcccagctactccggaggctgaggcaggagaatggcgtgaacccaggagatggagcttgcagtgagccgagatcgcgccactgcactctagcctgggcgacacaaggagactccatctcaaaacaacaacaacaacaacaacaacaaccagctgagcagcgcgggccttctggcagcgggtccagctccagggcgccctagggcagcggcgtgcagtgttcgggtaataggacgcagacggcggggtcgccgggggcttcggggtggcctcggccccaggccatccagccctgtggaccgaatggagtcccacacgctgttgaggtagtcatgggttcccctggcctcgggctcggcgcagggtcagcgctcctgcaggcggcgcttgcggtacgggctggcgaaagtggagacggacggcaggatggattcacttggcgacatggcggggagctgggaagacggacaccggtgagtggctgcccgggagggctggtcggggcgcggacaggcgggcatggttctgccaaggattttgctttatttatcgcaagatgggggtatttcctccttcctgcagtttataattgcatgaattagtgcagtgaattgaggatgcagtaaaaatatcttcaaagattattaaattcgttattataaaacacatagaagagtttatgtgtgtgtatggaaagcaggtatacatcaataattcttaatgaatacaagaaagaactaccaatattggggcaaatttttcaaatacaaacatcagtgaatataggcaaggccttttcttttttattattctattttaagttctagggtacatgtgcacaacgtgcaggtttgttacataggtcgacatgtgccggcaacgccttttcaataatgtcttacaaggagaaacgtggctcctctaggtgagcagccctcagtgcgcatctccctgaagtccacattgatccggcagagctgtggggttcacatctcacactgaggcatttagggcctaaaccccactttactcttttgtacaatgaatgggaaatcagtgatctaaatgagtttaaatcttattagggattcagactgcccttcagactctgtctctattcctcccagagctgggttcaacatgaattcaaatagaaatatgagacaatgaattatggtagtgacaaagaccttccttcgaattccggatttttctagcagcccctttctttctgcttcccacctgccttcaactctttctcctaaaaaagttcagttggggtgaagtttggtgacttagaacatcattattttaacgtgatcccaaagcagttttcattatatgcaaagctgcatatttattcacattttaaaaaatgttctaaattggtttcttatgtccaaaagaaggggagctagttataagaaaagagaactgagtaacataagaaagtgctaatcatttcaaattaaagcgggaaacatgcaaagcagaaagaatgaatttcataaactcaacaaattattaacataaataattccaaactcttgtatctatataacatcagtgatctgtgaggtgaaatgagattctgaagaaaaagtaaataataaggccatttttctaagccaaaaaagtttttgtcattagttgtggaatttcaccaattaattttttttcaaataaaactttcttaaacttttactgcctactattgcttgtaggttagtaaaccctagcagaaaacaaaatcattaaggaaatggaaaacaaacattaatgggaaatttatgtaatcttaattcttaacgtgtcttatgagttaatttttaaaatgtgaaggtttattcttggtgtttggtaattaagtttattaatctctcacaaatatgaggaattttattccctaaaggaacgtgaggaacacgagtagttcaagaaaatgctgaagatgcgcttggctgggaagctaggataggctgacgaagtcagacttagtgtgggaacctggtaagcagtggatcgatgttagctgttttcacttattgcactagtataatcagtttgatggtacatacttcagccccagctgttacttaagacctggtttcacattttatgttctttttctgtgcaggctgggaaagggtttcttctgtccataaaagctactccaatggctgtgggagacttaattccaattccaggtgatacagccgtcagtctcccactagctgtaggatggtgtgctgcagttcacaggtgtggatgctcaagtgggctttcaaagatgtcatgagagggaggggtaatgtattaggcacattttccaaatataggcatttcattgtacaagaccccaaatgtgagagggtgtttgtttcagtgttttatagacttcctaatatgccatcatatatacattcagttgttttcaaaatacagtttagtatttggctactcacaaagtaataaaacatttaaatcacttaaccatacaattcttgataaccaaaaggcttttctttctattcagtagtttaacattcagctttcttttttagggcaaaggagatagaattggatgaaatgagagagtatttttttaattgaactctgattaataccaaaagtgttcaatcactatgtgtggggaagtttcctggtacaaaggaaaaaaaaacaggttgttcatacacttggctgtgttagtaagtggtaaacagaattaaacttttcttatgtgaactcacacatatgtgcttcataatatgtcactcctatttaacatctctttcacacacacagtcatcccccccacacatacccttttgctagtcttcttccattttgcttattaacccaaagaaagaaaaaaatatggaagccttcttgcataggttgcgttaatcagatgaattattgaagccactctgtctaaatattattttcccttatttttccttcattagtttcccattctgttgtatttatttaatttttatttcattttccagacctaagtcaatgttagtctaccactgtacgtctggtaacctcaatccctgcaaccggagcaaaatgcgtaagtactttagccatgtaactgcataattactagtgtctgacacagagaaaaaatagacagtgtgtcatggagcttagagcctacatggggagaaagacaaaaagtaagcaaagaggcaaaataatgagaaattgtaaatgtgtggtagttaactagaatgtactgtggttaccaaggaaagcagtcattgggaacacatacgtgattgtaagcagtagggggtccattggctatagagattttaaaaaacaatgatgaaataaagcaaaagttgacaattataaaaaatctcagtgataaaatactgaaatactcctccctgctggggcagtgggtcctatacacaccccttcccttcttgatatgtcactaagaatgcaacgtgatcaatgaccaatgagatttagaaaagtcgggtgatgttattccttccttattgagtgtgtaatactgatcactaatttatgcaacttgtttctcttgggtgtgcgttaactactctactagtgatttgtaaaagtgaataggaatcactatgggaaaataaaaacaacacgcagattccttggaccctgggaccaaggtcttgggtgatgctgaggaaactatatttttaataagcatctaaatgattcttgatgcttggggaaatgctctttgagaaaccctgtactatacaaatgattaatttgtctgaatgtaagggatttaatctggtcaatgtacaaaaaccatggaaatcaatttgagtacaacttaaacatctaatgatggtagaagataaaagtagggagttttgctattctgtaggattacttagtacctactaactaacgcaccccttctatccctgttacataggtaccactagctcttcatattccaatgataagtcatggtaccgcactgaaagttctattgcagggcagctagacactgtggctcatttatatattgtgactttgaattggaaaatgctttccaggaatgaaaaatgcctggcatgcctgtttcctctacctctctcacacctatagcaaacactgtgggctgataagacattggttatccctgtgccaaggctctgttctagattcccttctaacagcatttctggaagctattactattaatttgatgttgcattcaaattaaactcattggtgtttcctatctgggactcttaggagggataaaaatgctgcctactgggagcagtagccatgttaacaggaggttgagcatatatagtctcaggtgatattacaaggagtgatagacagctgggtgggtgaacatgggctgtctctccatggaattgtctcctttagtgtcccttaagaagagtttttgatctcctgcatacaggtcttaagcatcttttatcagatttatacctagggcctaggtaattgatgctttttgtttgtttgtttttttactaatttaaatgtgttttgtaaaaatatattttctaattgtttgtggatgatgtcaaatgcaattgatttttgtatattgaccatatattcccctatcttgctaaacttattattgctagaaattgtataatatttcctcatgatttcctatgtagacagttatttaatctgcaaaaataccagtattatccccattttttcaagctttaggtctttatttttcttgttgatggcaccatctcagctcactgcaagctctgcctcctgggttcactccattctcctgcctcagcctcccgagtagctgggactagaggcacccaccaccatgcctggctaatttttgtatttttagtagagacagggtttcaccgtgttagccaggatggtctcgatctcctgatctcatgatccacttgccttggcctttcaaagtgctgggattacaggcgtgagccactgcgcccagccttcttgttgaacttctactataatggtgaataaaaatggcaagagtacgtattgttgtcttgctgctaattttaagcagaagacttcaaatattaaactcacctgccatttttaggataaacccaacttggtcataccatgttatctttttttatattttgtttaattcagtttgccaatcatatagttcccttgtttttctattctctgaaagtgcttgtgtaatagtggagtaatctattccttgaaaacttgggaaaagcacctttaaattatctggatttataattttttgtgagaagattttttattgcttcagtgtctttaatagttaaagaattttgcgggcttcattttctgctggaatcagttttagtaaattatatttgtctctttttctaagattttgtctgttttaaaatgtatttacattctttttttcatattcatatttttgtcctaaactgtatctgtaattatgcttctttttaaattcataatatttgtgtgtcttctcttttcttctcagctagtcttcaaaggttttattttatttctttttttgaaagaaccaacttcttcaggctttattgacttttttcttttttctttctttctttcttttttttttttttggagatggagtctcgctcttgttgcccaggctggagtacaatggcatgatcttggcttaccacaacctttgcctcccgagttcaagcagttctcctgcctcagcctcctgagtagagtagctgggattacagacacgcaccaccacacctggctaattttgtatttttagtagagatggggtttctccatgttggtcaggctggtcttgaactcccaacctcaggtgatccacccacctcggcctgcaaaagtgctaggattacaggcatgagccgccgcacccagcctattgactctttattatgctgctttgttttctattgcatagatgtattgccttatgtcttttttccccttcctcctgttttctttgattatgtttttcttctctttaacttagaaatatagcccatgaatatttggcttgtctaatacatcatttatggctttatacttccctcaatgccactttggctgtatcccacacattttgttgtatgatgtttatgttatcattactctctaatccttaaacatttttcatttgaatttcttctttgacctttgaggatgtagagtacagttttcaattgccaaattacattttctacatgtgcatgagtttctccttgtccctcacatcagaaagacagtagcttaatggttaaaagtcttgggctttgagatctaatagacttggattcaaatcatagctcattcactcactcctgtatttattaaatagacattattcttggtgctgaggacatatcactaaacagaaatccgtgctcacatagatgttatttgctggtatgcatcccacaatttagtagactccactacttattagttgtatcagttggaaaaagtctctcagtttctccctgtagatgaatttttttatctgtcagtgagaataataattattctattctagggagctcttgggagaacgtagtgagataaagtgcttagtacagtggttagaacagtgaacattttagtaaatgcttgctattaccatatggacagctttctcagaaagcctttcctaacccagccacactcctccccttcctggcacccagacagagctagatgcttcttttgtgttcctccagagcgtattgtaccggcctctagcagaatactcaggcaaaagattgtaatcatgaattgtccacatctcccaccagatcgccagttctttaaagacaaagaatatatcatatgtaatttttttttacctcagcatctaccacagtgcctggcaagtgttaaatgctgaataaatatatttgaaatgactaaaggaaggattgatacagatttaggaaaaggaaagtaagtgtattttgctgagatatttattcattcgtttagtcaaaaaatgtttattaggcactgattacctgtcagccacttttcaaggtactgtataggttcaaacaaaacagacaaaattttgttatgatacttaaatcttagaaaggagaaatatacatcagatatggttgagtgattgcagaaaaataaaacagattaaagaagtaaacagtattgtgggaaggctgctatttgataagtgatggccaaagaaagtctctctgataaggtgtcatcttagtagagacctgaaagaagtgagagggcaaatcagagggacacgtgaatgaaatattccaagttgaagaaacagtaagtgctgaagttctttaataatattcaaggacagcaaggaggccagtatggctgcagcagaagcaccgagagggagagcggtaagaggtgaagtcagagtggtgggcagagagagtgaggatgcagagagtgcaagcccttgcagaccatggctttgcctctaaatgagaagagattccattgaagggctctgaatggggacgttcctgtaatacactctgagttacattttacaagaatccctctggctgctacatggaggtccaactagggttacaggggtagtggcagagaccacttaggacagtattgcaacattccaggctacagtagtggtttggatcagagagatagcaggtggaaattatgattctgggtatttttcaaacagggagctgatagattttgttcaattgtgtgtgggttgttaaagagagagaagaatcaaggataaccccaaagtttttggctgaactactaaacaaattgaattagcatttggttagaggtagaagactggtgaaatagcaagtttgtgtatgtattgggaggggggtggttagcagtgggtgtatcaggaggcccattttagagcagttaaatgtgaatgtctcttacacctccaggtggaaatgttgaacaagtatatggatatatagatcagaacatcagtgttgagatcagaatctcttatgctatcaacctgtacataacttttttatttaccaccatctttttaaagtataaatccctatggaacagatgattcttaagaatcttctctgaagaggagttatatttttcagatagatttttagctggcatttttttaagtagggcaataatcgtattactataataactgacatcataattgaataatgagcttaggcatatgctttgcagaaacctacataccttaaataaaattgaattcaaatgagtatcttttcaaaagaactactgaattcacaaatgtacataaaaagttcttaattaagcttaatctaagtattaatataaaaagaaaaacactattatgaataaaaccctggataccagagtggacaactgagtctgacatattcccagagaaatatttaaagtaagctaacacaagaaaatcttgcctttagaatttttaagttaaacttttaataaagattcaaataaaacattaagaaactttctaaatggttctgaaagtaatggtccagccagggaaataaagtttctagcctgtgtcttgaggctttcagaatagactaggtaaccttagaattaaatgtggatttatgtttttctgaagagtacccccttttgttgactacatgtgtttccccaagaatttgttttagagtaggtgtttcaaataaagggtccaattcttaacccattcacattgtttcattttgcagataaccacttgcctagcataaaaatctttacgttgttctcagaaattgattcttgactctacacagcaaatccttcatctttattgttgtgacccattataaataccttccagtgtgatgggcttatattctcctattctcctctatcacttactctctttttttccccaggattccaggtcttggcaacctctgaaattccaattccatttgcgagagctttgaggaggccatatgctgatttcaccacaagcaacttcacaacccagtactggaatgccatcagccagcaggcccctgccattatctgtgacttctatctgtggctcattggaaggaaacccaggtgagaagctgagtcaatggccttgagaatgtcactgcatatgggagattgaggccccaaagtctttagggcttccttcagccaaagattaaaggagacaactgaatctgacccatatatacagattgaacacacctactctgaaaatccaaaatctgaaattctccaaaatccaaaaagttttgagtgctgacatgatgccacaagtggaaaattccacacatcttacctcatgtgatgggtcacagtcaaaacacattcaaaactttgtttcatgcataaaattatttaaaatattgtataagattaccttcaggttatgtgtatgtggctaagtgtgtatgaaatgtaagtgaattttgtgtttagacatgggtcccattcccaagatacctcattgcattgaagcaaatattccaaaatctgaaaacagttgaaacccaacacacttctgacccaagcatttcagataaaggatactcaatctgtgtaagttttgaacaaacaaagcagtcatagtgagaagccacagaagcctcctacattaaaaatactccagcataataaaggaaggtaaatgttaaagcgcctgcttgatgaattcagcaagtgatcattcacacaaaaagaaaaccaactgagacgctgtcactagggtttttcaaataggtagagaatcttaaatatccagtaatgatgacaacctcacttactgggagcttactcgtggggctaaggaggatgcgtgatgatcccatttttattgtcacagctaccgaaggaagataccctcatcaacccaattttacaaatggagaaatagaagctcagggaagaatctgaagtagtctcaaaggaagtgacaggaaggatgtggagaaagctgagtgtcaaagtcagtattcaagaccggatttactgctacttagagatgaatgaagaaatcagagggaacgcagtgtgctgatgctaaagcggctgtcaccacccagctgtgtgacataggacatcttctttctctgtctcacttgactaatatgttgtgtcaggggagacatgattgtaattgcctaaagcaattcttgtgatcaagaatcagaagcatgaacagtattgccctctgtgttagcccctttataagggaggaagtcatcttcagcatgctgaattgtcatctttcttagcagtgcaaatgactaaaacttagccaatgtagagtttgtccaaatttggagctcataactcagttcttgagcaaagtgaaaagaaaacattgtgattatggggaaaatatttgtacgggacttatcaaataaagataggaaaagaagaaaacccaaatattataggcagaaatgctaaaggttttaaaatatgtcaggattggaagaaggcatggataaagaacaaagttcagttaggaaagagaaggaagagacacaataaaagtcattatgtattctgtgagaagtcagacagtaagatttgtgggaaatgggttggtttgttgtatggtatgtattttagcaataatctttatggcagagaaagctaaaatcctttagcttgcgtgaatgatcacttgctgaattcctcaaggtaggcatgatgaaggagggtttagaggagacacagacacaatgaactgatctagatagaaagccttagtatactcagctaggaatagtgattctgagggcacactgtgacatgattatgtcattacatgtatggtagtgatggggatgatagaaggaagaacttatggcatattttcacccccacaaaaatcagttaaatattgggacactaaccatccaggtcaagaaaagtcacatgccatagccatggtattgcacatcattcatcttgcattctttgagaataagaagatcagtaaatagttcagaagagggaagctttgtccaggcctgtgtgtgaacccaatgttttgtttagaaatagaacaagtaagttcattgctatagcataacacaaaatttgcataagtggtggtcagcaaatccttgaatgctgcttaatgtgagaggttggtaaaatcctttgtgcaacactctaactccctgaatgttttgctgtgctgggacctgtgcatgccagacaaggccaagctggctgaaagagcaaccagccacctctgcaacctgccacctcctgctggcaggatttgtttttgcatcctgtgaagagccaaggaggcaccagggcataagtctactcacttatatctgtttgtctggaacataacccatgtttgtttttacaacaaataaaattgatcttgaataaaaactgagtggtcattgtcattaatctttgaacccagattaaccttttggtcatgcctagtctaagagaaaagagatattcttatcaataaatacagagcccagctatgtcagtgaagatctcaagtgcatggacagtagtatagggaagagtcagaggccaaaaagacaggaatggcagacattgaacagaggagagtgtggtgtttgcctctgcatcaactgagattatggaagaacacctgaggcttggggagagcacctacaagataccaataaagcattctaagaacatctatgaagtgagaaaatttgaattactgttgttcttgtggttatgattgtatttatggttgttacttcattcgtattaatcacctatgtgcccaagtgtaatcatgaagttagatttttcccagttttttttattagactcaagaattcccatagacaaaggcaatatcactatcctattcatacatttcttctctcagttctgcagagccaaaatgtagagtccaatgcaataaaggctgacttggattatctaactggtacatgaggccccgtgtggtagtttactccagaggaaattggcacttgcatataattgtagttaagttgatcccttgatatcagaaaagtttctgctatgcagtcctttttgatgatttcttaatatatatcctcattttagatagtagcagtggccatagatgcacttggcagcagagtattacagatggtaaagcttgaatctgcgttttagtagcaagagcatttggagtcttgtgcttcccttgtagacatcttcttcacatctacagcctatctttcgtctactgttgttactgctactagttccatagacattctaattttcatttgggatatacatttttgttatttgtaagctccctcttctttttcattttttcactccatttcagactgttctaaaatcagaaaggaaattctcctccatgagcatgtatatgtttttggctcttggaacttgagatggtgcaagtaaagtacaagcacattttccagataagtcatgtgaagtgatttacatttcataatatgatcatttctgattgatcttatctattatgaccacccatagagatggctgtaaagaattaagaacatcaaacaatgtcaagttgttcattgcatgtatttcagaacattgccaagataaagccaggtggagtcattaatttcaccagctagttatttccttgctgcagtaccaaagattgttattttagaattaaaacctctggtttttctaactcatctttcattgttgatcatggcaagtgaataattagtgaatgtatatgtttaggttatgaggaatttaaaacacaccctaagagttgtaatgttgattgcttttaaatgttgtaatggttttgagagtgtctgctaatgattccttaattacatacttgcttttcttagaaaatcaactcatttcattattagtgattaattttctcttaaatatttaactttatattttaataatcactatgcctgggattccattagatatttgaaaagatcaagtttaatttttttacccaggtaacatatacaatggctgaagatttgtgttctttgatctcacaatttaaaaaaatacacattaagcaccatggaaatcccagcaacttcagcaagaaagagtctttgttccacagtttctttgcttgataaatacgtggaataaaataaatggaatatcttaattcagtttttgcttcatgagactggttgagtgaacataggcctagtgctttgaaaattggcctattgtagaagattgatattctagtagcctaaagagaatccatttcttataagaatatatatattttggaaaatgtggtatttctcagaaaactactgaaatgaattatgtatcttttctatctttatctttacttctattactttcaaagatctaaaggtttcacttgaaaattagtcttttggaaaaaaaagacattgaaactagtgttaaattaatttcattgaggtaatgaatatgaagattcatttgctgtaatctccttgtgatcttttagtttcttgtgcttttaaaaataacaatataatggtctatatgtttatcagtttttacaataatttgtctaaacttcgcttataccagtgtgcatgaagaaccaagtgcagtctgaattagcacaatgcaaatagaaaaccgaccttttattttcctcacaaaattaatataaaccttatgtaaaagaatttttaagtgcttgtaaattaataacaaaatcatacataatgtcagtggaggagaaaagttaaggattttatatcgcagtaaaatgcatttctaaatttacttagtattgttataaaacatattcttgaatattgtatcagagtttatcaccactactgaagtcaaaataaagatgaatctctaaagtatgcaatttatttgggaatcacagaattgtagttctgaacaaaactgaaaaccacggtggtcttctatatgtgtgaaggacaaagagaagattgggggtttactagcgagggaaatgctacatattgttttgaaagaaagctcacagacactagagaagattttgggagctggtcaaacaagcctaatgggagacaaatcttttgagacttcccaggatcccaactagaaaatcccttagtcaattttaggtgaaaaagagttaaatttgaatttgattctggggaagtttgtcatttgtttggattcaaaaagcctaaaaatatttaattaaagtagaattacatatccttgagagataatggtcacttatttagccagagtaataatggaaagacttcaaaaacaaattcaaaagttacatagtcaagagaaaaaaaatagttagacctgtattagagatgacttagttttttcaggtggtcaaaacccgaataaagacagcccaaaccacaggaagctatcttgaaacataaaatacctgcttattaggtggattacttagagagagagaaaaaaaaccttttgtagtatgaccatttctcttggtatatgcccttttgagtaagctggaaattaaaccccatgaaaaactactttaattcaattagacactggaagagtgtgtgtctaaggttataagtaaaccatattataggataataatacacacacacacacacacacaagtagtacctccaccaggtggaatggatggcttttagaaaaagtaagagcatgtgaaatttcctggttacatagaacaatttggatacatcaggaaaagccgagtacagaattcgtctatactggaaaaacattgtttttccagtttttttgaggcaaacattctcagtgtcaggttataataccagagtgcgaagtggggaaaaatgcaataggaactgacaaaaaaaaagaaaaaaaaagaaaatgagagagagagtcaccactttagttaagcaaaaagatgtaatgttttaaggagagaagtaagagcagaaggcattgatgtattaactgcaaattacatgtagtgagatgcataaaaagccaaacccttgagataaaaatctgaaaaactttaagaggaaaactctacctcctgaaatgaagcgatcatttattttcctttattgctgcttctaaaaagaggatacatgtacagaatgtgcaggtttgttgtataggtatacgtgtgccatggtggtttgctgcacctattgacccgtcctctaagttccctcccctcacccccatatcccccaacagaccatggtttatgttgttcccctctctgtgtccatgtgttctcaatgttcaactcccactgaatgagtacatgcagtgtctggttttctgttcttgtgtttgtttgccaaggatgatggcttccagtttcacccatgtccctgcaaaggacatgctctcattcatttttcatggctgcatagtattccatggtgtatatgtaacacattttctttatccagtctattgttgatgggcatttgggttggttccagtctttgctattgtaaattgtgctgcaataagtagaatgatttatattcctttgggtatatacccagtaatgggattgcagggtcaaatggtatttctggttttagatacatggggaatcaccatgctgtcttccacaatgattaaactaatgtatatcctcaccaacagtgtaaaagcattcctatttctccacagcctcaccagcatctattgtatcctgactcttttaaataatcaccattctgactggcatgagatggtctctcattgtggttttgatttgcatttctctgatgatcagtgatgttgagctttctttcatatgtttgttggccaacttcctttgagaagtgtctgttcacatcctttgcccactttttaatgatattgctcatattaattttgaaatgactgaaaattcaaaataaagactaaagataaaattatatttttaagttacaggtatgaagtatttttgaaaggaaagaaacctccagattatatatatatatacatatgtgtatatatttatatgcatatgtgtgtatatatgtgtttgtatatataatatatagatattgttttcaacaaaaaaattattagagccgaagtagtaccatcttgagatgtttttattcagcttggtatctaaaatcatttaggtgactcattcccatgtttggaaaatttttaaaatttgttgtctacatctgtgatattcagtatagtagccactagctacttttaatcagttataattaaatgaaatttaaaattcagttcttccatcatactagctacatttcaaatgctcaatagacgcacttggctagcggcttctttattggacagggcaggtatcacagaatatttaaccagacagcattgatctaaatggttggtttttttgtttgtttgtttgttttttaaactggagtgcagtggtgcaatctcagctcactgcaacctctgtctcccaggttcaaacaattttctgcctcagcctcccaagtagctgggattataggcgcctacgagcacacccggctaatttttttatttttagtagagacggggtttcaccatcttggcggggctggtcttgaactcctgacctcatgatccaccagccttggcctcccaaagtgctgggattaggcatgagccactgcgccaggccaagtatcttgtagagagagtttatattatgattcagatttccatgttgcccatctttttaattaatcttacagacacttaatggagcccttattatgtcttaagtgcatgagaagtgcaaagagtgtaaagacaaaaatcatgtagccaaatcaagtggtggagacagacatttaaaacataattgcaacccaacatgaattctccagggagaggagagcaaaggacaatgaaggcagaaagaatcacgcttgcaaatccatgaaagctgtggtgtgtttgggaaactctgggtaatttatttagccctagactagtaaaaataaggactagaaaggtatgctgaggccagatcttgaaagatttcaaataactgcagtcaggttacattccaatgaatgaaaagccagttgaaactggtttaaaacacaaaggtggtgtattgatgtacaatggaaaaaatccagcactagagtggtgagcagctgtgattcaactagagctctggctgccttggtctttgagtctctcaactctgccactttgttctggttttatcctcatgatgaataagatgtttgctgtagcttcaagctttgcacacataatatggcaatctttggatgaagagaggctggccctcttcaagattttctcccaagattgatgaaacttgttttctaaaaaccctcagcaaatttccctcccatcgcatcagcttagttaaggttacctgtccatttctggccagcccctgtggcctgagattatgccatgtactaatttgttgagaaacctcagacgtaagccaatcactgtctagaatgtaagagtgcatggagatcaatcagcttttctctgaagctggggtgagattatgtgtttctgaggcaaggtcgctactggagaagggtgaatacctgcgtgataattcagaactcatcaagagatagaagactgggtgttagggggttagcattctgagtggagcatggtttctgaagtcagacctgagttggtgtcctttatccaccactgcgtggtgtaactttatgtaactgagcctcagtttccaaatggagattataatggtcattctctttcataccattgtgagatgtaaagaggttaacataggaaaggcacttagaatagtgcctgaaccacagtaagcgctcagcaaatattagctttaaattcatactcaaatatgggagggagtttgagctttatgttttagagtctgacactcccattgaaggtcttttgtatcttgacagctagaagatttcctactacttaaataataataaaagattagaactcaagtgatgctgatgatgacaggaaatgtgaattagttgagtagttgggacagaaatcacatggcccgcaaagctgagaatattatctggccctttacagaagtttgccaactcctgaaatagaggaccagaaaaatgtcttctgatataaaacacctaaacatgttaagcctggtgcagtggctcacccctgtaatcccagcactttgggaggccaaggtagctgaatcctcccatctcagactccccaatagttccatatcagcctggacaacatggtgaaaccctgtctctaccaaaaatacaaaaattagctgagcatggtggcagttgcctgtaatcccagctacttgggaggctgaggcaggagagtggtttgaatccaggaggcagaggctacagtgagccgagatcacaccactgcactccagactgagcaacagagtgaaactctttctgaaaaaaaaaaaaaagtttttataaaatagttttaatgcatagctgaacttgaagcaaaataaggaaattcctaagtgtcccaaaatgacaagaaagtacacacctacacacaaacagagtgagagaagttgaacaagcacacacacaaatatgacaaatgtgtattgagagccaaatatacgtcaggtacatattgctctgtgcctggggagcaggggcaataaggtagaaaacaaaacagacatgggattaacctcatagatcttaaagtccagtgaggtaggcaacttctataagaaataagtgtatattaaatattttgaaaagtactgtgaagaaaaagagcaagatgctttgaaagagagtaacaagtgacacctgctttaggattatgtgccttgaaaaggactccagaaatagtgccactggaactcaggaggagttaatgtgttcacggaaatgggagagagcatttcttttaggtagatgcctaggctctgccaactttgcttgattctatctgattctattagacaagttatagaagtataataatgcctttgctacaaaaccagaaatggataaatacttaagaataaattttcacatctcatcaaatgtgcgttttgatgctatagtaattgttccaatttaaaacattcatttatacatattttcttcttttcttttctttttctttctttctttttttttttttttttttctttttttgagacaggttctcactctggttcccagattggagtgcagttcgcaatcagctcactgtaacctcaaattcttgggttcaagggattctcttgtctcagcctcctgagctgctgggaatataggcacacacagccacagctggctagttttcatactttttatacagatagggcctcactatcttgcttatgctggtgttgaacttgtggtctcaagcaatcctcctgcctcagcctcttaaaagtgctaggattacaagtgtgagccaccacacctggtttatacatatttcaatcattttaatataacagcaaagtccgtttgaggcagaggacagacttttatttttttaattattgaaacatctgtcttgctcttatcaccaaggctggagggcagtgcatgaccatggttcactgcagcctcatccaccaggctcatgtgatcctcccacctcagcctcccaagtagctgggaccacagatgtgcaacaccatgcccggctaattttttttttttttttttttttttttgtagacatggtggcctcactacattgtacagggtagtcttgaactcctggttttaagcaattttctggtctcagcctcacaaagtgctgggattacaggcatgagccatcacacctggctagagaacagacttttaataataaaagaaaagtcctttttatactaaggttgactttaggggcctgtctaaagtaaaggtgggtagatgagactgcttacagaaagctagctttgtgtgctgaacttgatactattagaggtttcttgaaagacgtgggaaaaaagtttaaaattgcaactggaagatgtttgctagactagaaatggagagtcctaagcactcaggaattcagcaaatggctgctggttaggtttttgtttttattttttggatttaagataccctcaaactttagttatttctgaattgaagatgaccaattgatgggtatgtttgtattagtaaaattgaaaagcttattaatttatatttcacattatcaaaacccataaagaaattatactttgcctttgtaacccatatgtcagcttggatatccctgccctttaataaaatgtaattaatggcattccccaagaattgttgaggattctcaggtggctaattgttcatggtcatctctgctgttgctggggatggatcagttttgtttatgaatcattttcatttcacgtgagctccataacaagtcgatccagaccaggtaaaggcctcattcttcatttgtcataaattgagaatcaaacaacaaaaaagagagaacacgtgcctaggccggcctaacactcataggacctgcctttacataccacacatagacatccaatctttcaatgggtcctctaccctgtcaactgaaattttctgtctttatttttctcatcttttaaatcttccatttactgaaatttaggagaaaatgaggtcactgagtttgttaattcattttgctgagtttagtacacaaattctaggcaacatttcacagacctggctctttcatggtgtaataaatgtgggcttttgcaaactgttttcctctttttggtctcacagctatgttttggataattaaagttgctaaagttctaaacagtcaatagcaggttactagtaggttttgttcttacatctgcactgggtggtagcatagggcggtagaaagaacactgaagctctagatactactatctcctcaatcagagaagtagagcttggtggagagaccatagcctagttagctaacccatatgagtcttgtttttagtatgcataaagtggatctgataataatagctatttcacagggatttgcaaaaatcaaatataatcctaagtataaaataatgttttatattgtgcaatatagatattagttttgttatcagtaacctctcatttcttttacccaggtatgttcttttgttcattatccgtaagcaagactctctacattgcctgtgtcagtttcacactcttatcaaggatgtatacattcctacattttcttttctacagttagtcatcatttcattagaaagacatttaagtattcacatttatattataacatttaatttgaaaaaagctttttgcaagaaaggagagtataatcagaaattcatctataaagtcctaggtttcaccagcctgtgccacatgtgttcacagtcactctccattctgcatgagttgtactaatgtgggagctgaaggagataaaccccccaaatcagtagcttaatacaaatgaaatgtgattgtcaatcacagtagttctaactggtagaaggcgttgcactccacagtcactcaaggatccatgctgatggaaggttgccatcttctgcacgtggcttctaagtcatccatctctctggatgacaatatccagctgccaatggagtaaaagaggcactgacataatgtggaaggattttatggtccagtcccagcagtgcccatcacatctgtccatattccactctcagaagtgtcactgggctacatctaagtacaaggatggctggaaaatacatagctgtgtgcccaggaggaaaggaaaataggattgctgaatagctaatgaggttctgccatggccttctttttaggtcaccaaatatctgctttcctgtctttcccacacatacaagacactcattcctacccaagggtctcataccattattgcatccagttcaaagtccaaggtccaaagtccaaaggggaatagactatcctttgtatcagattctgatatgtcagcttctggtttggcattcttgaataaaaaggccaattttctgcctcccatgtaggggtaaaaaatgtctctcttctacctcttgtcatggtagaacagtgaaaagaccaccataattgaagaaaaaaataaaattaaacaaataaagaaacctgctatgcaggaaagagaagacaggcaggcaagcagcagtccctagattataatcataaggaaatcctgagtagcaagtagtgagaagctccctacactgggcatggagaaattccttaaatagcctctgaatctactctctgggaggaaccctcttttctgtcatttttggtggtggctccatcctctggaaggttcttatttcttattcgctggctgtcacctctgaactggctgttaaggagtgtgcttttcttgaggtctttggctttataactcatgctgcaagagtaaaggtgaaaactaatgggtgttttatgctgatctgtcccgcagactctggccaagcgatgaatgaaaggagttccctgacacaggtatttttcctgacagtgagctaggggactgcaccactcagcactgccaatgagagagtgcagcagccaaaaggagtgcagccccctaagctggccccacttgaatttatttagtacagatttaatgacaagggcttggagcaaacacaatttgtgggtaattaacattgtcaacccccgcaagtagagagcagtcctgcacatgaatgatcaaaggttggtttccagagatataagtagaacaatttatctagataagtttctttacattcccttgttatctaacccttgctcttaagagaatttaactgccttcagctaaattctcctttgaagcttttgcaaaacctcccattcttccaagaagatttgtgtctttccctataaccttttcttacaacttttcccaccaccctgaccaaactcctacagttttaggtttaaggtcagtcatttgctggctctggggctgtggaagaaaaactaaatccctcagttcatgcacacagtgtgacagcttggcataagtaaaagacatgaacaaaaggattaatgaaggagtgaaagaaggaaggagtgtgcattaggcacaacatcatctaaaaactaaaaaaactagaatgcattaaacttgttcactcaacaagtattggttgagtgcctactaagtgtcaagtgctgggcccaatgtgggggatacagtggaggatacagtggcaacacatggaaagtaaaggcagtgaaaaggccatggatttaaaaattaaaggaaaaaaaggggtaatacatttgttattggtcttagcaaatcgaaaaaatgtgagaaaatagtgcagcgtttgccaaatctacaactctttcaccctcactgagtctcaaattaagaatgcacaaaagcagaattactaggaaatcaaagttttatgggtgtattccctgaagtaatagcactatactgcaaaattggtggaggccgtctgcacatttgaaataaccaacctgcacctttaccccctcccccagattctaaccaaataaagtatgaaataaggcagaactcaccatgctacaccaacttaccaggaatgaagttgatgctgattggaaaagtgtcaagcaataaagaagagtttggatttatctttaacattgtcttcatgtcactcaagactttaatctcagccaaatctacttccaaaaccaatctcttgtgcaatgatcttgtctgggtccaggccaaggcttacttctattgcatagccactctcacccttcttgattttcactctgaagaactttcctgtctgggttagagtttcctctggtaggcatcagattctgcaaatatttattgtctcatgttaatcaagaccccctctagattctgctatttaactttaactattttgacataaacagagtgatttaaatgcagttgtaacttgttcctaagtagggcctggtatagcttttaagcaatatatctctccagtcacacgtaataatgaatggattctaacttacgctaagtactaccgtgttcctgaaggtaaataaaccatgtcagctgtgtgaggcttataaatttttctttaaagcatagtaaccaaaaatgttaccagttttcctttgattactactatattgcccaggaagtgtgatcaaaagacatctgttgtatgtatcaaaattcatacatctgcttcattcatttccttttatggtatcacctctgacttccagtttccctactgtcagagagaaacaattaaatgggagctgctttggacaacaggatttttaaaaatccagtggccacagagaattggaactgaagaatcagaagagaggattaattttctttcttcttactaagtttcttaagtattttcagagctcttaaagggacatatcaatagcagggaaagtatctgaattaatggcaggattcttgaggactttctcacaaagataattaaggtggcactctaagaaaacaaccagagacatcacaaataatgtatagatatttttattgtattattacttatggtaaacttggatccaatttgaatgttccacaatagaggaaagattcaatcaacaacaatacatacaagtgttagaaaagtattcaggcattaaaaatcatgttttatcaaatactaaatgacacaaaaaggcttgtaatatattcaatgcaaaaccatattcagtataatctcaactcttagccctaaatgttcatatgatcttggattaattttttttttttacattttcaaattttcaaattagaagtatgattattctacttctatggtgtggaaaaaattaccctctgtaaaagtgaaaaagtaagaacagtcatcttctactttccacgttttccaaatacaatgaacacattacactttcacagtggtagaaaagaaacatctatcttttaaaacagtaaataaatcagaataagacaaattcatcatgaatttacaaaattatgtcatcaagtataagttcagttcatgtttagttttgaaactgtttatcaaaattaaatagtttgacttatttttattagaaatatgattctaagtattcaacattgctttttaaaaaattatcttctagtttttcacaaaatctgaggagctgatacggaaagcacaccagatctcatgtgttgaaatgtgaacatgctcaccacagaccaaggacattcaacctgtcaatccccaggatttccaagccaggagtttcatctcttacttgtggaaaatttgtccatttaattgtgaaccaatcagcttttcattgtgtcaaaatcaaatctggatagtgaaatatatattttatctttattgttatcttaaatatatcttggcttaaagagacataagtagctcttccccactacaccagataatgagttgcaaataaatcattcagtagtaaagttcaaagaaagcttgaaagcattttgaatttcctagtgtcttacagatttgtttctttttacaacaaccatgtcccatgtatatctgtttaggaccttaagttgttaataatctactctgaataattccttaagaaaacattaaaaggacaatgtctatacctgggaaataaaacccaaagtagtagaaattatattaaaaatcatgtagttaattacaaatgagtgtgagcttagacactgaaaaatgtgtcactgaaaaaataccaaaaatggtcagccttttcctgttaagttacagaaaggtatataatataagtacttagtacataagagaagagttagaatgagattgtaccaggttcagaattcctcatccgagaagaccagacaaaattcaaggtttttagagagggactaccctgaatgatgtcaccagtaagtgagtttataaacaaagacagagcttggcaagttgcactggatacttcaaaccagtttctctggaaaaatttgagttactcaataaaccctcagttttcctgaggtaaatcaactttgaaatacagtggagaactctgggtgataaatcacgccgtgctacacactaggactgcagttcacagaacatgattagatttaaggcaatagaagataggaacattttttgaactagtttattgaatccttttgagaatatcactgtttggcagttcctagaaagcttagacaaattaatcttcaagaggcaaacaaattaactttgaactaaaaaacaaaaacacaaccaaaaactttgaattagaaaacatctgctaagaaaagcccaacaatctgacatgttgattattattttttaacacttcaggaatgcaaagatgattttactattcagacctttacatatcacacaacagaaaaatccttcagttgactagtttccataaactttgtagcgttatggcaaaacaagagtcatctgtgaaatacacaaatgttttgtactgagggatattttcacataacacaggagatgatacacttaaatttagaccccctcaatctcatcgtcatactgattatactgtaagcagtgattggggtgcacacactgtaaccttcgacaccctggttcaagtgattctcctgcctcggcctcccgagtagctgggattacaggcacgcgccaccacatccagctaatctttgtatttttggtagagagggggtttcaccatgttggccaggatggtcttgatttcctaaccttgtgatccacccacctcagcctccttaagtgctgggatcacaggcgtgagccaccgcaccctgccaattaatctttaaagttaagtgaacacaacaggccgggacctgcaggagtgctccaggcagaggggcagcgcgtgggtggactctgggctgggcatgggcggggtgtgctgagcagaggacagtgggtggggcagctgccgccctgcagggagggtagccacagggctttgcagaccaggacaccagctgcgatgactttaattatcatccagacttcatggaccttcaggaggcttcagtggggggtggacatggtggtcagaagagaaatatggtcatcgactaaagaggcttttcaaaggcttcacatgtgtgccaaaatccaataaaataaactccaccactcaagtcagtggataaataaaaagtcactctgccatgaggagaagggtgatagagatgctagtgtgtgtaggaggagagcctacgcacactaggaggagcaggaggcaggccagttgcatgccaggaagaaggaccaaacaccattatcatccttgccagcgcccccaggtgcatacaatcattatatttatcctttccagaactgactgggcaccgctctgagccagcagccaccatgtgaagtgggactggggcacagggccaaagagacccagcctggcaaggagctcagtgtggtagagggggtctagccagaaattgaaagaaaggagggagaaatattgggggactatgggagctgtcagaattagtttatctttagcagtatatattacttaattattttttaaaatccaggtttaaccaagagatgcagcaacattccaatatcctttgatatggattggaaatctaattgcaatgatgtcaatatgctcaagatctctcagatctcgaggagtgttccagaaaagcaccatacctctgacactcctgatcaatttaaaacctggctttggaggagcactcctcttccctacctctggcccatcacaaggacacttccctctgcttccaggactcctctagcccatcgtctacctggatgttcactctgtccttgcagatgctgagtttagtcttgttgctctgcagtttaagttgcttctctccaccttcctgtcacagccaaggaagcccatgtgaaatgccatggcgtggccctggcctctgctcaaactgagtctttggcctcagatttcctcttcatcttttccccccatctaaatccgctggccttaaagacaagccgtttaataatcttgagtctggcatttgcctctctgcacaataggcactgagggtacaccagtgggcaggacagacacagcccctgccttcatggagctgatcctgatagcaaggttaggcataacattaaacattaagaaaaattgtagtaaatggtgtaagaggaataaagggcaatatatgagtacaggcataccttagtgcatacaaggtatgtaccataataactgatgaaggtggctacactaaacaacaaattttccacgtagatgaaacagctttctatcgaaagaagatgctgccagcctgagcaacatggagaaactccttctctactaaaataaaaaaaaaaaaatggctaggcatggtgatgcatgcctgtagtcccagctactagggaggctgagatgggagaatcacctgagcctgggaagtcaaggctgcagtgagctgtgattacaccactgcactccagcctgcatgacaagtgagactctgtcaaaacaaacaaacaaacaaacaaacaaacaaaaaacaaaaaaaaaagaaagaagatgccatctaggactttcatagctagagagcagaagtcaatgtctggcttcaaagtttcaaaataacagactgactctcttgttaggagttaatgcagctggtgatgttaagttgaagccaatgcttatttatcattctgaaaatcagagggcccttaagaattatgctaaatctactctgcctgtgctctatcaatgcaacaataaagcctgggtgagagcacatctgtttacagaacggtttactgaatattttaagcccactgttgagacctacttctcagaaaaaaagattcctttcaaaatattactgctcattgacaaggcacctaagagctctggtggagatgtatataaggaggttaaggtttatgtgcttgttaacacaacattcatttttcagcccatggaccaataagtaatttcaacttttgtcttattaagaaatacatttcataaggctatagctgccataaatagtgattcctgtgatggatctgggcaaagtaaatcgaaaactgtctggaaagaatttaccattttaaatgccaataggaacattcattattcatggtaggaattcaaaatgtcaacattaacaggtgtttggaagaagttgttttcaacccccatagataactttgagaggttcaagacttcagtgggggaagtaactgcagatgtggtggaattagcaagagagctagaattagaagtggagtctgaagatgtgactgaattgttgcaatctcatgataaaactgtaagagatgaggagttgcttcttatgaatgagcaaagaaagtggtttaataagatgaaatctactcttggtgaagatactgtgaatgttattgaaatattacatccacttcattgataagacagcagtagaccttgagaggattgactccagatttggaagaagttctatttactgtaggtaaaatgctatcaaacagcactgcatgccatggagaaatctttcatgaaaggaagggtcaattaatgcagcaaacctcattgtcttattttcagaaattgccacagccaccccagccttcagcaatcaccgccctgatcagtcagcagtcatcaatatcgaggcaaggctctccaccagcaaaaagattatcacttgctgaagcctcagatgattgttagcattttttagcaataaagtatttgaaaattagggtatatacatttttttttagacatagtgctattgcacacttactagactacattatagtgtaaacataacttttttttattattatactttaagttctagggtacatgtgcacaacgtgtaggtttgttacatatgtatacatgtgccatgttggtgtgctgcacccattaactcgtcatttacattaggtatatctcctaatgctatccctccccccttcccccaccccatgacaggccccagtgtgtggtgttccccaccctgtgtccaagtgttctcattgttcaattcccacctatgagtgagaacatgcggtgtttggttttctgtccttgcgataatttgctcagaatgatggtttccagcttcatccatgtccctacaaaggacatgaactcatccttttttatggctgcatagtattccatggtgtatatgcgccacattttcttaatccagtctatcattgatggacatttgggttgagtgtaaacataacttttacatggactgagaaactaaaattcatgtgacttgctttcttgtgatattcactttattgtgctggtatggaaccaaacctgcactatctctgaggtatgcctgtataaagcagggagctgaggtccattctaagcatcaggagacattttccagaagagtcattcaaactgagatctggctgagcagaagtgaaatgtgcgaagagggtagcaatgtccccagataacaaaggttgtgcattctttaacgagtagaaggggtgcaagagagctggagcacagaggattgatgtgggagggacaagggatagtgatatagtttggatgtttgtcccatccaaatctcatggtgaaatgtgattctgaatgttgaaggtggggcctggtgggaggtaattgggtcctggggcagatcccatgatttggcaccatccttttggtggtaagtgagctctcactcagttagttcatgtgagatctggttgttttaaagtctaggacctccccccacaccttgcttccactctcgccatgtgacatgccttctccccctttgccttccaccatgactgtaagcatcctgaggccctcaccagaagaggacactggtaccacacttcctgtacagcctgcagaactgtgagccaaaatgaaactattttctttataaattacccagcctcaggtatttcttcatggcaatgtaagaatgtgctaacacagatgggctgctgtagggcttgtgcattaagaccaagattttggtttttatctatcttaagagtgatgagaaatcagtggggagtttgatttaatatgggataatcaccatcacaacatgatatgatggtggtgatgataatggtgaagaggaggatgatgatggtgatgatggtagtgatgatggtgctgatgatagtgatgtaatgatggtgatgatggtgctgacagtgatgatggagttgatgatagtgatggtgatgatgataatgatggtggtgatggtgctgatgatagtgatgatggtgttgatgataatgatggtaatgaagtgctaatgatagtgatgatgatgatgatgttgacagtgatgatggtgctgatagtgatgatgataatagtgatggatggtgctgatgaagatagtgatgataatgatggtggtaataacaaaagtggtggtgatgatatggctgctacggtttggacgtgtttcttaaagttcatgtattggaaacttaatccctaatgcaacagtgttgagaggtgggacctctaagtggtgattaggtaatggaggctctttcctcatgaatgaattaatggtgttataatggaagtgaaagtgggttagttatcttgggagtgggttcttgataaaaggatgagtttggcctccttcccttctctttctcacatgtgctgtcttgcccttccaccttccatcatggcatgacgagcaagaagaccctcacaagacactggcaccttgaacttgaacttcacagcctcaaaaactgtaagaaataaatctctgttttttataaattacccagtctcaggtattctgttatagtagcattaaacagatcatgacaatggtgatggtgatggtggtaatgtgatgatggtgatggtgatgatgatgagataagggtgagggtgatggtaatagtgatgaagacatgaagataataaagatatgttgactgatattgatggagactatgataatgatgaagagtccagtaccaatgccagccaggaaggtagaggtagaaagatcatccagggaacagatggagcgaggatggaaataacacaggatttggagtgagacatgcctattctctgccacttatttgctaggtggccttgggaaaattaattggcctcatatgcatgtcaatttcctgatcctcatcagggttctggaggatgaaaggaaatgtaaaatggtacccagaatttgccacgtcagttctttgtgtattacctctgccacacatgcatgtacccaggtgcaatgatgagggcccgggggcgggggggctggagattttctctgctcctgcagctaggtcaggtgacatggccagttgctgagggacattgcattgctgccaggaaaccaagaacccctgtttagataatccttttcaacctggctgccagctgcctttgggagctgctgtgtgatgggaggcccagctgggagtctcagtcacctctgccagtgcccactgcccaccctctgactccccgagccttgacctgacaccacggtgagtaactcctgtcctgctgccaccattgggggccatagcaacagggtctgcatgtctcaggaaagagagcttttttttttttttttttttttttttatggagttttgctcttcttgcccagactggagtgcaatggtgtgatcttggctcactgcaaccttcgcctcctgggttcaagagattctcctgcctcagcctcctgagtagctgggattacaggcatgtgccaccacgcccagctaatttttgtatttttagtagagacagggtttctccatgttgatcaggctggtttcaaactcctgacctcaggtgatctgcctgtctcggcctcccaaagtgcaaagtgctgggattacaggcgtgagccaccgctccccgccaaaagatggcttcttactaacactgaactctctcaaaaggtgaccttaggcagggcacttaacctccctgggcttcagtttcccacagagcagcatgtcatttctgtgagtgtgctcagtgcctgcacagaaggtgctccacgatgaggctgtgggtggtcactgttacctcatctcagccggaggacccaggagcatgtccattctgtggtttaaacatgtttgcattaggcacgcctacagcctcagtttacctccaccttcctagagggcagggacactccagcatccccaggctcttgaagggccacggatggctgagattcaacttccaaagttatgttcagattcactagcctgtgctgcacacccaccccgcgtctgcacccaaggccagcaggcccgtcctgacccataatgattacaggaacggggcaaaggagttaaaggctgcagggtcctaaccagggaggccagctctgtgaccccagagctggcactgggtgaccccacatctggggttgattacagtgtagaaactaagggtggttctgagaaagcccatcttccctttcggagaaaccgcgatgccatagggcggaccccgcctccctgtccccgcgccctgggctgcactccctagggccccggactgcattttcccaggagggcagcctggatagggaacctcggcaagtgagaccaaactgatgttcccttaggggcagcacccgctcggtgctctgagattgttgtatgggctatttaattcctaagatgattctcagcaggaggcaggctctgtatcatcccagcggctttttcaccttgggagtttcgcgctttccgattccatgaagttgctgcttgtcaccccgtcaccggctataaggatttagctcacaaccacatttttactgagggattgtcatttaacgagtttccctctcccagggaatctgcattctaagaccccaaaggccggcgagggtcgttgtgctgggctggacagcagagagaggctcggccttggccctcagccctgcagcacacagggcacccgcgcagagagcgtggcctgcgaatggctctgctgcctctcccggcctggggccgattagaccggtcagagcatctgtaaagtacaaggggcccctagggagtgcaggccagggcagctggggcagggaggcggggtccgccccatggcatcgcggtttctctggaaggggtgatgggctttctcagaaccacctttagtttctgtaccgtaatcggccaaaaaggcgcaggcgctgctgctcctggcagctgcgtaacaggctctcagaggaggacgcggttccgggctgcggcgggcgtggtccggggctgttctgggcgtggtctttggctgtgatgggcgtggccttgggctatggagggcgtggtcccagggctgcgatgatggtggtccggggctgtggtgggcgtggccccgggctgcggcgggcgtggtccccgggctgcggcggacgtggtcaggggcggttctgggcgtggtccctgggctgcggtggacgtggtctcgggctgtgacgagcatggtccctgggcagcagtggacgtggtctcacacccagagtctgaaatttctgcctcttcctggccctaaaaatatcctgcctgttcccacgcggctcctgccttctggagcagtctgccaggccggcggtgggtgttgggcaggggtctcaggctgccagcagccaagtgcagcccgttctgcagtgatgacagggatctgtgggcagaggggaccgagcctcggaggatgctgtaggtgggagagctaacattgactcagcatttacttcaggctatgcactgtgctgagtcccttacctctgggcttccgcaacgtttccctgaggtcagtgtggttggcattcgtgtttcacagataaggaaactggaacaaagcttttcaaggccacgcagccaacacctcgagagagcgggagagcttgttcacttgaactggatccccaaacaccaacagccaccctggccactggctctgactgagctcaccccacccccgacaagccaggtgcctggggaacctgccttccattcctccccactagctcctatgaggtctctgcctgccaggcctcctcctccccagaggaagggacgtttctaccacacagcgaccccacaagtcagctgagattttgggggcaccgaatactcacatggagccctgagtggaaggggtgtaggagtcacactcacacgcatgcacagggtcaccctgagctggagaccatacccaaggctctgtgaggaaatgtgagtgcgcccaggcccctccagcctggtccaatttgctgagcctctagctcgacagaggtcagaccaggtctacagcccagcgatcctagttccagacagctgctccttcctttctaggagggcagcccggaatataatccagtgtggtgagaatccattgcacactccctgtgagccaagcagacaggtttgggggccactgagataggggacacttctggaggggtcagtgactgcaaaatggtggcagtgggatgatctgttatgtctacccacgcacatgcagctgcacagttgcagagatgtgaatgcaggaagccaggtgtgagtctgaattcacattggtttttttatctttattaagcagtcattcctaaggcctgcccgagcctggcatctctacagaggagtggtgccatcaggacccctgtggggcagatcaacactcaaggcaggtgcagaatcaacaacctgtgacaaagccagccatccctgccaggaagcatgggggatgagctggcaccttgccctgtgggcactacagcttggccggccctgatccagctcatcagcaagacaccctgcatgccccaagcagccagcaacacttccttgggcctgggggacctcagggtgcccagctccatgctgtactggcttttccttccctcaagcctgctggctgcagccacactggctgtcagccccctgctgctggtgaccatcctgcggaaccaacggctgcgacaggagccccactacctgctcccggctaacatcctgctctcagacctggcctacattctcctccacatgctcatctcctccagcagcctgggtggctgggagctgggccgcatggcctgtggcattctcactgatgctgtcttcgccgcctgcaccagcaccatcctgtccttcaccgccattgtgctgcacacctacctggcagtcatccatccactgcgctacctctccttcatgtcccatggggctgcctggaaggcagtggccctcatctggctggtggcctgctgcttccccacattccttatttggctcagcaagtggcaggatgcccagctggaggagcaaggagcttcatacatcctaccaccaagcatgggcacccagccgggatgtggcctcctggtcattgttacctacacctccattctgtgcgttctgttcctctgcacagctctcattgccaactgtttctggaggatctatgcagaggccaagacttcaggcatctgggggcagggctattcccgggccaggggcaccctgctgatccactcagtgctgatcacattgtacgtgagcacaggggtggtgttctccctggacatggtgctgaccaggtaccaccacattgactctgggactcacacatggctcctggcagctaacagtgaggtactcatgatgcttccccgtgccatgctcccatacctgtacctgctccgctaccggcagctgttgggcatggtccggggccacctcccatccaggaggcaccaggccatctttaccatttcctagagttcttgagtccacagtctggcaagctgaggttaaaaatcatatgttgaatgcagcagtgtccacttatgactaacttcttagaacagcacaatataatagtggaattgggcctttcagaagacctcaactgatgattttcaccattttgacagtttttaagtagagaaagctctcttatgacactgaaatcctacttggaaacggaagcaagtaaaggcaatcaagcagggctctggtctaagtcaagccttgatctgcgtccctccaatggcttgctgcacaccctccctggccactgtggatgcatccttgctgaccaacacacagaagccaaaatgttgctgacagtgagaaccacagaggtaagcaagcagagctgctgagtcctgggaccatgagctctatctgagcagccgctcaggatgtgggagggaggaaaggaagccaacgatccacagcagtggagagtgtcatggagataccactataaagctggagtgtgcaagggttacactctcacaataaaggtaaatgataacctaaccttacagaaggggtcagcaagggagtttgcctgccttgactttcgtgctgtgtagaagaagaaaattcctcgagaattcttaagtagaagccactcttcagacagttttagagctaggcttcaaattatgttagtggtaaaaagacctcagtctgtggttggtgtggttctcctggacgatctgagcttcaccttaggctgcagagaatttccagagtcaaagaacctcaaataatggagttgcacatggtcaaatctcacaaaaccacatagggagataaggcaccatgaatgagagcaagaagaaacaagaagacagcagcgtcataccacagctccttgaattatcaacactgggttaatataaaaatgttcaagatgttttaagacattaataatgacatgaaaatatgagcagggataatacttttttttaaataaccaagaaaatttggaaaatatttaaatagaacttcttgaaacaaaaatattagaattatgagttgaatttaatatggattaaagagcatgttagacacaactggaaacagactctgcaaattgtgagagaggtccagataaattacctaaaatgcagcccagagggacaaagagacaaccatataaaagagagattaagagacattgaggttgggatggaaaagactaacatacatttaatttgggaacacaatacagaaaatgtaggaggggaaatatttgaagcgataacagctgaggattttttcagatttgtttaaagatatcaaacttcagatccgagaaatctaaccaatcataaataagataaatgaccaataacccacgttgaagcacatgatgcgaaactgcaaacagctaaatacaaagacaagatatttaaagcaggcagagataaaagacaaaagaacatcaattaaactcaccttgacttctcaaacaatggaagagaccagcctgaccaacatggtgaaaccccgtctctactaaaaatacaaaaaaaattagccgggcttggtggcgggcgcctgtagtcccagctactccagaggctgaggcaggagaatggcgtgaacccgggagacggagctttcagtgagccgcgatcacgccactgcactccagcctgggcgacagagcaagactccgtctcaaaaaaaaaaaaaaaataataattagccaggcctggtggcatgtgctgtcagctacttaggaggctgaggcaggagaatcgcttgaacccgggaggcggaggttgcagtgagccgagatcacaccactgcactccagcctgggcgacagagcgagaccccatctcaaaaaacaaacaaacaaacaaaaaacatggaagccttggcaactggaataatgttgccaatgtgctgagaaaataactgtcttcctagaattttatatacagaaaaacctttccagaccttgatagaacacaaaagctgaaagacagtattcctagcaatacacattaagaaaacttcaagggatgtatttgttgcagaagaaaaattattccaggtggaaggtttgagatgtatgaagaaatagaaaagtcactggagactatgcacataaataggaatagttattgtctagttgcctacataaaagcaataaaaatgtctaatttcggcccggcatggtggctcaatgcctgtgatcccagcactttgggaggccggggcggggcccatcacctgaggtcgggagctcaagaccagcctgaccaacatggagaaaccccgtttctactaaaaatacaaaattttgtattgggatggtggcgcatgcctgtaatcccagctactcgggaagctgaggcaggagactcacttgaaccccggaggcggaggttgcggtgagccaaggttgtgccattgcactccagcctgggcaacaggagtgaaactctgtctccaaaaaaaaagtctaatttaacggtttagaaaaaatggaaaaaaagaattacataacagtggtatatgtgtcagaaaggtgtaattgtacttaaagcattctaaagtctagcagtcttcaggaggaaggtagagatattaatctaagactttgttaggcatgcaagttgaaatgaggtaaccactaacagactagacaaaacgaggatcactctctaaataatctaaggaacaaatgaaatgagtaagagaaaagatcactcagccaaaagaaggcaagaaaaaatatatagaaaagtcaggacaaatagaaagcataaagtaatatgatagaatccaaacaactaattcaaatctactaaaacaataaatttaaatgactaaaatttgatggtggggaaacaatattgtccatttacttttaaattggatatatgttatttataagagattatgctaaacaaacaacagagaatgggtggaagtaaagcaatagttgggagtatagaaaaagacagaaagcctttcctggatcctccaatcaaaacttaactcaggctgggtgcagaggctcaagcctgcaatcccagcactttaggaggcagaggcgagaggattacctgaggttgggagttcgagaccagactggccaacatggtgaaatcccgtctcttctaaaaatacaaaaattagccaggcatggtagagggcacctataatcccagctactcaggaggctgaggcagaattgcttgaacccggaaggtggaggttgcagtgagctgagatcgcgacattgtactccagcccaggtgacacagcgagactccatctcaaaaaaaaagatagaaactcgctaaatgaaagccaatagaagagacaaagctgaatttaaagcaaaacagccttactaaagagggtgactacatgataagttccaatttatcaaaggagataaaattaacataataagataatgaaaatttataaagcaaacattgacaaaattttgaggggaaattaacaaaccaactttcatagagaagtttaagagtgctctctccctaactggtagagcaaacagacaaaataaataaggatattgaatattgaacaacacaattgacaagtttgacttagtgaataaatttaaaatatggcacttgactattggaaaatacataatatatataagtatgcctggaattattaagaaaattgaccacatgcggaaggccgcagggtcctctgcctaggaaaaccagagacctttgttcacttgtttgtctgctgaccttccctccactattgtcctatgaccctgccaaatccccctctgcgagaaacacccaagaatgatcaattaaaaaaaaaaagaaaacaaaaaaaaaaaaaaagaaaattgaccacatgctacccccataaagcaaatctaagtaagatttcaaagacctgattccaatgcagactatatcatctgggtccagtgtaattaagttagaaataagtaacaaaaagataattgaataaaatatgcttggaaatgtaaaagtcacattctaagcaattcatagatcaaagactaattaattaaaagcagaaatcagaaaattgtttagaactgggtgataataaaactagtacacatggaaatgcatgagatgcagccagcaacatttagaggcaaatgtacactcacgtgtgttctacccaaaatgaaaaaggctcaaaattaatgagctaggatccaaattaagaaactggaagaacagcagatatgtgttagttagctctgactgtgccccacaggggctttacagatatgactgagtgaaggatcctgaaaggagggttatcctggactatcaggtgaaatgatgcaaccccaagggcccttgcaagggaaagaaggaggcaggagggtgggagagatatgtgataatgatggcagccaggtcagagaccaggagagatgggaagatgctgtgccgctggctttgaagatggagaaggggccaccaccctaagaatgtgagcagcctctagaaaaggcaaggaggtggattctccctttgagcctctggaagaacacagtcctgcctgcactgattttaactcagtaagacccatttttaacttcttatctttagaactgcaagataatacatttgtattgtttcaaaccacagatttttggtattttgttacagcagcaacaagaaactcatccagtggccttggcttggatgctcttctctgcttcccaatgttgtcactgccagcaggttaacccaggctcgttcacaggcttccaagagaggttcactggtttccaagagagcagacgtgccagaagcttaaaagcagcacgccatgactttgctgcactctgctcgacaaagcaccacacagcacagcacagcaccaggctcatgaaagaaacagtagacactatctcccataaagggagttccaaggccactcagcaagggataaggatacggggaaggggaatactaaggctattgtcgtaatcttcaaccacaaatacagcaaagttgaggatgcccttactttagcaattacgttcccacatatattccctagagaaacacttgttcatttactccatgttcacagaagcactattagctaaaaatgagaaacaacccaaacaaccatcaattaaagaatgggtcaatgcatatggaagagtcatgcgatggaatactatacagcattgaaaaataaacagttgtacacatcagtatggatgaatctcataagtatatggtttttggaaaaaggcaagtcccagaagaatacatactaatatgactgtatttggagatagggcctgtagggagttaagtaagttaaaagaggtcatgagggtggggtcctaatctgataggattggtggccttaaaagaagacagatatctctcccttctacagtgaaaaagacagccacctgcaagctgggaagagaggcttcgctgggaactagtgccgcctgcaccttgatctcagacttctgaagcctccagcacttcgagaaagtacacttctgttgtttaagccacccagtgtgtggtattttgttacggcagcctgagtaggctaatatagtgggaaagtacaaaaaaaaattaaaaaaagataatagtgaacacaaaattcagtacaatgtctattgatatgtggtggggaggacaatggggagttctaaactgtggttcatatatttcttcagcggggtgatgggcatacagcatctgttcctttgttatatttaaaattgcataaagaggccaggcacagcggctcacacctgtcatcccagcactttgggaggccgaggagggaggatcacgcagtcaggagatcgagaccatcctggctaacaccgtgaaaccccgtctctactaaaaatacaaaaaattagccgggcatggtggcaggcacctgtagtcccagctactcccccctcagtagctggaggagtcccagctactgaggcaggagaatggcgtgaacccgggaggtggagcttacagtgagccgagatcgcaccactgcactccagcctaagcgacagagaaagactccatctcaaaaaaaaaaaaaaaaattagccaggcatggggcacatgcctgtaatctcagctactcgggaggctgaggcaggagaatcgcttgaactcgggaggcagaggttgcagtgagccgagatggcaccactgcactccagcctaggcgacagagtgagacttcatctcaaaaaataaataaataaataaaataaaatatgaaataaaattgcataaagagtttatatacaccatttaatgtatgatgcgtaccaaataaaataattaaaccacatagcctacagcctccccccagccctcccactttccctctcccctgtgcacgggagaaaataagacccaggagggacagaacgtgcccaacgtcatgggctgctcatgaagaggccagcctgccagctcctggccatgtgccttgccagcttacagccagcagcaagctgctgtggcgtggtggcactgtgatcatccccaggctcaccctgctcagaagccagctcggattgatttgttaaataccccacaaaattctgtcaatgtttgctttataaattttcattctcttattatgtgttaattttatctcctttgatattggaacttatcatgtagtcaccctctttagtaaggctgtttggctttatttatttatttatttatttttgagacgaattctcgctctgtcgcccaggctcgagtgcagtggtgcgatcttggctcactgcaagctcgacctcccaggtttacgccattctcctgcctcagcctcctgagtagctgggactacaggcatccgccaccacgcccagctaatttttttttgtttttttagtagagacggggtttcaccgtgttagccaggatggtctcgatctcctgaccttgtgatccacccgcctctgcctcccaaagtgctaggattacaggcttgagccactgtgcccggccgctctttggctttaaagtcagctttgtctcttctatcgctttcatttagtgagtattcgctttctttctttttgagacacagtctcactctgttgcccaggctggagtgcagtggagcgatgtcggctcaccgcaacctccacgtcctgggttcaagtgattctcccgcctcagcctcctgagtagctgggattaagggctccctttaccatgcccagctaatttttgtatttttagtagagacaggatttagccatgttggctaggctggtcttgaatcccaacctcaggtgatccatctgcctcagccttccaaagtgatcaggagccagctggggataatgtgagtgagcatttctcaggcaactgttattggtccagagtggcaagtactgtaagcagtccatcgacagaagtcttctctcccatctgcgggctccgtggcctgtggctgccatctgtggccactaggacagcagaggtcccagctctcctgataagaggccagtgagatgcctcaccccagacccggaaccaggagccagtgatgccagagccggggcagccgtcgtggtcgctgcaacaccatcccccgggcagcagagcccctctgagcccgcccgtgtggtcagccaggcaggctgcagcctcactggccagcaccaagggtggcaccgtggcgactctgagacctacccaggatctctcggtacacctttccttcagttaaaccagccagggttggattgttgcttgtgactaagaacttggatttatacagaatttgatataggaagaggcagagtcattacatgtttaaataatacggcttaaataatagcaaaagaagaagtgaactcatgagaagccctgtcctggtgattctacatgataaacaattctccctagcaacttataaatgtaacatgatcccaatccacacttgaagcaatattgcttttacaaaaacatgaatgaacaaggatagccaggaatatcctggaaaagtaacaagcaggcactggcctgccagctacaaccatggggtactagcacaggatggaacgggatgctcagaaattgctcaaagacacaggtcatgcaggtatcgagccatggtcttcagcagaagcccaccctctgtactcctccttgtagcactggggctgggctctgcacaccccgcttgaccagctgtcctctggttaggctctgccaataagggtcacaagaagccagctggaggggggtgagacactgggccttcctgttttgccccgtgtctgtctgcatcacccaacagcagcccttcccctcagcaggaaccactggttccagcttccacccttccaggttctctctcactgtggcagcacccacgggagagcgcccctttctctggctatggtaaccacagcctcttccctatgtcccacagtgcttggggaagagctgcttcctaaggtattatctctgcgttactctctcagggtcccctcccacccgtttaaacatgttcaaacaattccctatgtctagttcttttttttttgagacagagtctcactctgtcgcccaggctggagtgtagtggtgcaatctcagctcactgcaagctccgcctcccggaggttcacaccattctccggcctcagcctcccgggtagctgggattacaggtgcctgccaccatgctcggctaattttttggtatttttagtagagacggggtttcaccatgttagccaggatggtctcgatctcctgacctcgtgatccgcccgccttggcctcccaaagtgctgggattacaggcgtgagccaccgctcccggcctagttctattaaaagaatagtgtggttttgtttttctggctggtccctgactgatagaattaaagagatgatagatacatagcttgacagacaccattccatagcagtgggaaatgatggattatccaatcaatcatgtggaacgcccaggagaccatccagacaaagacaatttccaggctaatcaaatatttaaacatcaaaatacaatcataaagagctagaagtttttacactctttttttttttttttttaatggagttgtactctattgccagactggagtgcagtggcacaatcttggctcactgcatcctgtgcctcccaagttcaagcgattctcctgtctcagcctcccgagtagctgggactacaggtgcgagccaccacgcctggctaattttttgtatttatagtagagatggggtttcaccgtgttggccaggatagtctcaatctcctgacctcatgatccacccacctcggcctcccaaagtgttgggattacaggcgtgagccactgtgcccagccagttgttacactctcacagtatggaaggtttctcagtacaataaagaatactgaagtgttataaggaaatattaactgattttcccatagaatactagagagttctgcagaagggaaaaatgccgtaagtgaagtaaaaaggcaaatcaaaaattgtgacaaaacatttactactgatatgcaaaagggccagttttcaaaaatatataaattcaataagtttaagatgaataagccaattaaaattgtcaaagaacacacacacagtccacataaagagaaatggccatggcccataaatatatgaaaagatgattggcctcactcatacaagagacgtggaaaataaggccacatggacatgccatttctcacctcttggtttggtaaagacttagtaaatttaagaatattttccattgacaagtgtgataagtctggcttgtgagaatgtaaactgtttaaactcttagggagggcaatgtgcaataactaacaatattttaaatatgtataataatgatcctatgcgatagataccatatcgcttctcattttacagattaggaaactgaggcacacagagggttagtatcttccccagggccatagatctaataaacagtagaactggaattcaagttcaggcagtctggcactgaatacaatatgcaagaacagtccaccacacgagtgatccactcatgtgacccaggggttccactcttaggtctttatcctacatctctcattgcacatgtacaaactaaatatgttcaaagatattcactgtagcagaatactgggaaataacctatttcgctcctagagatatgttcatataattatactgcatccataaaatggaatacaatacagtcattacataactgaagcttataccaaaaaaaacagacaaactgttgagtgtgaaaaacaaggagcagaggggttccagttctggcagcaatggcgcggcctctccaggtctccccctcacaccatatgattgataaaagctggacaaatcccttgaaaccatagtatgcattacaaagagcaaccaaagcagccgagacaagggtctgaaatccttgaatgaaaggaaactcatgagttgcgttccatatctagtctggctcttcccctggaagttattccgcggcccacagggaacagagcccaagcacagcacaacagcataactgccctgagggtagaagggccagcagcacagacagaggggagctagggagagggaaccccaaagcctgcatgcgcattctcttcaaggtgtgcagcggcagggctgaactccaagaaactaggcaaaaagcaaccactgggaggaaaagagctggtgggaagttgttgccgacacggtgcaggggaaacagaagctggagtcaagtccggccgtgggggagaagagttgcgaacatcccaggctctctgtggcatgcccgaggagggaggccatgcaagaggtcaggtaaattacagcggcctgtcccagtggacagtagaacatattcagactgaagcgcagtgagaaggatagcaaatgcagaaagggcacgggagagatatgggatgtggcaaaaaaaaaaaccggaatatatctatatctggaatcccagaaataagagattgggagagaagcaatatctaaagaaacactaagtggccgggagcagtggctcacacctgtaatcccagcactttgggaggccgaggcaggtggatcatgaggtcaggagatcaagaccatcctggctaacacagtgaaaccctgtctctactaaaaatacaaaaaattagccaggcgtagtggcgggcgcctatagtcccagctactcgggaggctgaggcaggagaacggcgcgaacccgggaggtggagcttgtcatgagcccagatcatgccactgcactccagcctgggagacagagcgagactccatctcaaaaaaaaaaaaaaaaaaagaaacactaagcaacaattttcaaaatcaataaaagatgccaaaccacagattaaagaagccctgtgaacaccaaaggggataaatacaaggaaaaccacacattatactaaaactgctaaaaataaaggatagacaaaatataaaagtaaccacagaaaaaaagacatgttactttaaaaggagcaaaaagaagactggcatatctgagaaataatggaagccagaaaaaaatgaagtaatatctcaaagctctgaaagaagaaaaagactgcaaacctcaaactttatacctgaggaaaatatgctccaaaattaaaagtggaataaagcatattttgttttttaaaaaaataataaaattgttcaacaaacctgaacaagtaacgaacaaaaatgtcatcttgaacaaagggcccttcaggatgcacagagcacagaaacgaacaaaggaaaccggaaaagaaaagttagcagtaaatgcactgactgcctacaacaacaataataaaagtatctttagggcttaaaatacacacgggaaaaagacaatagtcgttacacgaagagtctttaactatgactatttaaagtcatttccacagttaattgcttaattctgatgcagtttctggtaacttcacaagcacacaaaaatcctataatatatggtttcttttaggagttccataaaaggatggaataaaataaaaacatattttcagactggataaaaaaatataaagtcaactacacgttaaaaaaaacacacatgaaatggagaaacacagaaagactgagcagctggacccaatcgagggtgaggaaagtaaggtctcagatccctcaggggtgaagctctgggccacctctacctgcaaggctgaaaggatctagaatgggtgacagggcagggagatgattaatactgtctacaatcttgggaccagctaaaaccctaggattatagctcttgtttggtcttgctgctttcttcaagttacttatttatcatttgttattattattattgttttttgagatggagtctcactcactctgttgcccagactggagtgtagtggcatgatctccactcactgcaaccctgcctcccaggtttaagcaattctcctgtctcagcctccggagtagctgggattacaggcacccgccaccatgactggctaatttttgtatttttagtagagacagggtttcatcatgttggcaaagctagtgttgaacgcctgacctcaggtgatccacccgcctcagcctcccaaagtgctgggattacaggcatgagccaccacgctgggcctatttatttatttatttatttatttgttaatgacaggatctggctctgtggcccaggctggagtgcagtggcatgatcatggctcactgaagccccgacctcctgggctcaagcgatcctcccatctcaggctcctgagtagctgggaccacaggcatgcactatgtcccacgaatgtattttttattatttttagtagagatggggtctccctgtgttgcccagtctggtcccaaactttggagcacaggagatccgcccacctcgacctctcaaagtgctgggattacaggtgtgagctaccgtgcccagcctggttctgctttttttaactccccttgttgattctcttcagagaccatcgctttccactccgtgacaggggctctgtggcttgctggatttgtctcttcgccgtcagggaagaaatgacattgtgttcccagatcaatgcagtgtagccaccgtcaatgactggacagaatgagagggcatgagccagccaggcagtttcagagaggcctgcaggagacacagcctagctgccaccacggctccccagggtccttggacgcctgctggtccccactgggctacaagcagctttgtgagagacatgggggcgggaggatccactggcttggtacctctgcagcctggaaatggagatgttaatgttctgtgggttcttcccctgtgagatgcggcagttcacaggtctttcagaaaatgaaaggtgaaatgggagcttaaacacagtatgcatgtcctaccacgcagccgccagctctttggggcacaattccggtcgctttccttgcttgtctgactcattctccttttcttttctcctgcttccctggaactgcgttcttcaaaagatatagcatatatattttatctgagactctgctttctgaggaaccccatgtaagcaaaggtcaaagaggaaaatccagaccgctgttctgagagtccaaatatccctatgttttacctcttgaatagaaaaaacatctgaagaggaagtcaaatcaatctctgaaaatgtagttgcatgtaaaggtaaaactcttggctccaatgggttatatgtataagatgccattccaggagagaggccatgctctacacactgttgacataaaaaataatgtttaaccttcttcaggttatattttagtaaatgttaacatatgatccaaaattctatgggatttctaaaattctaatatgcctgagtatatgctatcaatcataattatggttatgttgttattgcagaccacagaaataaccaaatttccttgtcaactgtgtctttaactaagactatttaaagtcatttccacagttaattgcttaattctgatgcagtttctgaaaacttcacaaacacgcaaaaatcctagaatatatagtgtattttaggagtttcataaaaggatggaaagaaccctgaaaagcactcatgaacaaagtccaggagcaatccagggagcccaggcccagacgcggcaggcaagaggcaaggctgcagcaagcaactctgcaggaaggacgacctgcgcatgccaccacctactgactccccagcacagacgcggcttcccctccaccttggcataggtggcaggggcccaggatcccttccagggaaaaggtgttcccttggaaggtgcagaggcaggagaaacaatccctcccttgactggctccaggggccaaagtcctctgagagctctttgtgcttccctgacaaccccccatggctgtcctgtcgccagagccctacggagcagcagatggttgtgcgcttgatcaaacacaggcagagataagacagtgtctgggattgctccagaggtgccatggctggcaggagtcaaaggacacttgagacagtgatgtgctctcgcagaatctattgagctgagctgactgagcggtctgtttttcctcccgaggccagcaggccagcatggagactgagaggagaagagcacttagcctagggcggccggggagcagcaggcccaccgcccttcccgagaggcttagctggggcgggggtgaggccagggcccagtccgctctccaggctgccaggagctgaggcttcatcccaaagggcatgaacctgaggatccgtctccagagaagctgagtgggcccagactctgagtgtgtgggggtgtcagcaagcaacgggctgcacacaccaccagtggcgcccccgcagggctcctcacccaccatccatgggggaagcctccaaagcgaaatgcacagatcaaagcaaacacaagagaggatggaacacagaggaaaaatgcaatgcaagggcaaaaggaaactggactctacagaaaggaaattataggaaatagggaatccgggactccaggaagaggggctctgagaaaaggaacaaccggggccccagaacacttctaacatctgccaggagctcttagaaataaaaaattatgcgcgagaaatgaaaagctcaaatagaataggaacatgaatttgagaaaatctattaggaagtagagaaaataataaaatcaaaggatcaacccaggaagtccaacttataaatactaggagttcagaaggaaagaagaggaaaggaattacaaagatattcaagaaaatttcccggccgggcgcggtggctcacgcctgtaatcccagcactttgggaggccgaggcgggtggatcatgaggtcaggagatcgagaccatcctggctaacaaggtgaaaccccgtctctactaaaaatacaaaaaattagccgggcgcggtggcgggcgcctgtagtcccagctactcgggaggctgaggcaggagaatggcgtgaacccgggaagcggagcttgcagtgagccgagattgcgccactgcagtccgcagtccggcctgggcgatagagcgagactccgtctcaaaaaaaaaaaaaaaaaaagaaagaaaatttcccaaagtttggttttcagatttaaagagcccactgagttttcagcataataaatggaaaaaaaaaatcccaccaagttatattaccagcacatttcagaacagcaggaataatgctaaaagtttccagagagaaatggggcaaataggtgacagatatatatatatatatatttttaatggaagaaagaagatcaattcctttataattctgagggaaagttattcccagcctagaatttagcactcagtcaaatctaagagtagaataatctcagatatacaaagtctcaaaaaatttacctaaggaagatactagaatacagattacagcaaaaccagtgaattagccaagaagtaggaaaatgacccattccaggaaagcagccagaatcccccaggtggtgaaaagaaatccttgggctggggctgtgcagctggtcccacaggagtaggagaggcagtgccagggaggagatattcacaaagaagaagtgaaagaaattgatagatgaggaatgcgtttgaccatgtgagaaatatagtttatttacagagttgttgaagagtttgagcagccacagatatatgcccggctaatttttgtatttttagtagagacagggtttcaccatgttggccaggctggtctcgaactcgtgacctcaagtgatctacccgcctcagcctcccaaacaaaagctaggattacaggcatgagctaccgcatctggcccctcacgtttttaatttgtgtttctctagtgacccaagatagatacctctacacatgtataaaaaagactgaggttttggttgttgttttgttttttggcctaactgaagagaatctgctcatccttaatcttaaagacctgctggaccatagaagggtcccttggattcctatagttcagctgagcctaaactaaaattttaaaataaccctgacaaaaggaagtgatcatagccgaactacagcactggatgtggtatcgggagctcatttctgttcagcctgacgtgcagtgctgctcctgagagctgactgtgagcgaggaaagaggttctgggaaaagcaagtgtgcatcccccccatctctgagagatggcagcaaacactttaagccaccctcctcttgaaaatagtttacatagcaagattcaatattgaaaatgcaccttaaataagtcatctatcaagaccaaaaatgaagagaaacatggattcctggaaagtcattatcagttttgccctaagggcatctgcaaaacctcaaggtctaaccactgagaggggcttggagaggggacacagggtcccagagtgagaagtctgggaggaggcattggcagagagctggaagactgtcttagatcattctcgctgctagagcaacaaaccacagcctgggcaaggtatatggaatagaaatttatttctcacagttctggaggctcagaagtctaaaatgagggcaccagcaggtatgatgtctggtgaggacccagtctctccgtgtcctcacacagccaaaaggacagaatgacaaagggggtcacatgctgagggaggcctccttgataaaggccatcttcccacccacagtgaaggggccctcacgacctaatcatctccccagggacccacctctccatactgttgcgctggagattatatcatttcaagaggaatttgagagggaacacaaacattcaaaccttagcagaacctaagtgtgaaacaggacgtaagccttgggaattgaaggagtccgcaaaggcaccttcctgtgttgaacagtggctggaggagaaactcagctgagacttcatgagcgtaagtcagtcactgtgtggatttgcaccccaaagcagaaaaaaccctcaatcataatttgattttttttttttttagacggagtttcgttcttgttgcccaggctggagtgcaatggcacgatctcagctcactacaacctctgcctcccaggctcaagcgatcctcctgccctagcctcctgagtagctgggattacaggcatgcaccaccaggcccagctactttttgtatttgtagtagacatggggtttcaccatgttgaccaggctggtctcaaactcctgacctcaggtgatcctcctgcctcggcctcccaaagtgctgggattacaggcgtgagccactgcgcccagtggataaattttaaatttaaaaagtgatgccagatgggtagagcccctagaagactagaagaaatgaattcaaatgaaggaagtcataaagcttcaagaaattccaacagataaagttcaaggaaattggtcagcttactgtgaaaaaaatgtcaaaactcacaaggaaataatatgacagagaaccaagagaaaaggcagaatcagacccagacttcggatcagacacagaatgtgaagtaagtttaaagggtttaaagaaataaaagagagacttagaaatatgaacaattaaaaagacactataaaaattaacaggcagacttgaagggggaacagatagacgaacaacccttctaaaaatgaattatatagtaattgaagttaaaaactcaatggacagcagaaaagctgccacaaaaaaataactgaggaaatataagatatatctgaagaaattatgcagaatccaaccaaacaataaatcaaaaagatttaaaaatatattttgaagagggagagtcatggaagggagattgagaagatttaacataactagattccaagaaggaataatagggaaatgaagaaaaagcaaaatttgaagagataaagcctgagatattctacaattatttgaaggtgctaagcctcagatccaggaggcagttggccctaaaaagggataaataaaaagaaatctgcaatagacatgttaccagggaagttggaagcaacagaaagaaaagatcaaccatttacaaaagatcagcaaataaccgatgacaggtatgtatttttcagaagacgagcaaaccacccagtgacctttcacgttgttaggggtctctcctaagacctttttctgggcattgcagcatcctcagttcattctcaggataggccaggagtgcgtgacacttacagcctctgaaagcagccctcggcccatgatgaatgttaaatatatggcccaacttcctttccccaggtgtggataactcaggaatgctctagatagcctcttggagcctcacagggagactgaaggccacccctgataggagcaaatggcctaatagtgtccccatccgctgcctcagccccactcactgctagcgcttcctgccatcacatcccaaactagtaagcacccacatcatcacggccggcttctgggggaatccaaacaggacaggctctagcacagtggcgttctgcacccctcatcctctcagcaggccacttttcctaaggaagccctccttccacctcagtctttttttctttttttttttttttgacagagtattgctgttgttgcccaggcttgagtgcagcggcatgatctcggctcactgcaacctccgccttccggattcaagcagttctcctgtctcagcctcccgagtcgttgggactacaggcatgtgacaccacacccagctaattttttgtatttttagtagagacggggtttcaccatgttggccaggctggtctcgaactcttgacctttaaactggatcactttaatcactttaaagttgacttttaaagtggatcacttgcctaggcctcccaaagtgccgggattacaggcgtgagccacctcacccagcccccctcattctttagagtcatggcctggccgtgacaccagcccccaaaggcatggtggccaggtctgtacacatccagcccattccctgcatagagaccccaggaaaaggtgtccccactagtgccttcttctgaggaaaacagtcatgcagggtgagagcttaactaaggacattagggatccgctcagccagtagggctctgggcagttggggcaggcgtctgcctcttctttcagtgagctgcaggggcccagtgagatgatgcgtatggacatgctcagactttccaggagtgtatgctccttcacacatgagccaatgctggctgcacatccactatgcacacaacactgttgagaagaaagaagagcagtcatttgacccaaagcagaagcagatgacaatgatcgtgacaattattacagcaattatgagagtagagaaaagcaaattgtaattaaaatcataggtaaaaactacatggaatacgtcgggaagggctggaaggaagttaatgtatgtgaaggcatttgcgctttcaggaagggggagggtatattatacctcctagccatcaggagataggaatttttcagctccattataatcttatgggactaagtctgtcattgaccaaaatgccattattatatagcatatgattctgtgtgtgtgtgtgtgtgtgtgtgtgtgtgtgtgtgtgtgtgtactgtacatgtgtttttaggttttttatattaaccatgttggtttataaaaacttagaaaaaaatcacaaggccgctataattccaccacctgaatacaatcttttaaatattttagtatacattttcaagttgttttgttaaatatatttattttacagaattaaaacaagattatatgtattcttctatgctgccatttatttagaaacatttcatgaatatcatttcatttcccaggttaaaaaatatggtgtccaacgtattttcaatggctgcataattccccactatatggatgtaaccaaaacttatttaaccattatcagtttgggggccagaaagctatattctgttttagactgcattataagcaaggccatcataagcatcctcaaggttttgtgtctaatggtttcccagcctcttagcgaccttatttttctccataactaaccaaccatcttgcttataaccaacttaccatacatttattttacttattgtccatctccctcaatcaaaatctaagccccttgaaagcagagctttttatctgatttattcccaatgccaagtacagtgcctcggatgtcatagtcaccaaataaatacttgttggatgtggatggatgcatgaatggatggatggatagacacagggatgacatcagagaaatacagaatatgataaaatcctggaaaaatgggccaacagagccaaatgttttgatggagggattagggagaggcaggagtttgtgtgagttctcttggtgacaggaaacagtttatacttgtggatgccaagtgtgggtggggttgggaatctatgctcgttggccaggggctctttcaggcccctcccccacccttgttggagtagacaacccccaggtccaaccagtttcagaacctatcattttgctaacccaagccttttttttaagacagagttttgctcttgttgaccaggctggagtgcaatggcgcgatcagcttgctgcaacctccacctcccaggttcaagcaactctccggtctcagcctcctgagtagctggaattacaggtgcatgccaccacacccgggtaatttttgtgtttttagtagagacagggtttcaccatattggtcaggctggtctcgaactcctgacctcaggtgatccacccgccctcagcctcccaaagtgctgggattacaggtgtgagccaccgcacctggcccccaagcacttttataggttaaatgagattgtgccaaataaactgtatttcattatttttttcccagtgtttaagggcatggttgttaataagagtgataaaaacaagaaacatagctaagccagagaacctccacataaaattttaaaataaaagggttagggcccggtgcagtggctcacacctgtaatcccagcactttgggaggccgaggcaggcggatcacgaggtcaagagctcgagatcatcttggctaactcagtgaaaaccccatctctactaaaaatacaaaaaattagccgggcgtggtggcgggcacctgtaatcccagctactcgggaggctgaggcaggagaatggcgtgaaacagggaggcggagctggcagtgagccgagactgcaccactgcactccagcctgggtgacagagcgagactccatcttaaataaataaataaataaataaataaataaataaatgggtttgaatgcttacaaaagtagactgggacaaagctacagtaatcgaaacagtgtggtacaaagacagacatacagaccgataaaataggatagagagcccagaaacaaatcctcaggtatttagtcaaatgattttcaacaaggatgccaagaccattcaatggagaaaggacagtcttttcaacaaattatgctgggaaaactgaatagtcacatcaaaaaatgaaactggactcttaccttctgccatatacaaaaattaactaaaaattgatcgaagagctaaaagtataaaacttttacaagaaaacctagaaaatctttgtgacattggattttgcaatgatttatttgatatgacaccaaaagttcaagaaataatacacaaaataaataacctggactttatcaaaattaatgaaaaccactcatcaagagtgacaaggcaatccacagaatgagaaaaaatatttgcaaatcatctactgggtaggggattaacatccagaatatataaacaactcctagaactcaacaataaagacaaacaatctaattaaaaatggagaaaggacttgaatagatacttctccaaagaatatatacaaatggccaataagcatatgaaaagatgctcaatatcactaatcattaggaaaatacaaatcaaaaccacaatgatatacgacttcacagccatcctaatggatggctactatttataaacaaataacaaacaaacaaaaacacacagaaaacaacatgttggcgaggatatggaaaaatgctctacattgctggtgggatgtcaaattgtacacagtggagaacagtatgatagttcctcagaaaattaaacatagaaaccattatgactccaatatggcacttctgtggtttatattccaaagaaccaaaagcaggaacctaaacaggtatttgtacattgctgcttataatagcattattcacaatagccaaaggtggtgcaacccaaacggtccattgacagatgaatggataaacaaaatgtggtctctacacacaatggaataatatccactcttaaaaaggaaggatattctgatacatgctgcaacacggatacaccctcaaaacattatgctaagtgaaataagccagccacaaaaagacagatactgtatgattccacttctatgaggtacctagagtggtcaaaatcagagaaaagtagaatagtggttcccagcagctacggggagaggagaatggagttttagtgcttaatgggtacagaatttctgttggggtcaggaacgtgttttggcaatagactgtggtgatggttgcacaacagtgtgagtgtaaatgccactgaactgtacacttaaaaaggggtaaatggtaaatttcatattatgtatattttaccacaataaagaaaaagaaaccggccgggcgtggtggctcacgcctgtaatcccagcactttgggaggcgaggagggcagatcacctgagattgggagtttgaggccagcctgaccaacatggagaaaccctgtctttactaaaaatacaaaattagccaggcgtggtgctgcatgcctgtaatcccagctactcaggaggctgaggcaggagaatcacttgaacccgggaggtggaggttgcagtgagccaagatcacaccattgaactccagcctgggcaagaagagtgaaactccatctcaaaaaataagataaaaatttttttaagaaaaagaaaccaactgttcactgtttggaaatatgaaataaaaaagtttttaaatattgaaaattttaaaagaaaaagaaacagctcaaagcagtaggtctgatggtaccccacaaatgcagctgacgtgactggcacagtggatggccgactcatttgtgcccacagtcaactctttggcctgccaagaaagcaaggggtggtgtggccagaaggtctgagaccctggggacaaccaagtgaccagaaagctagttccaggaaagaaaaggtttacagccactgctcaaaaacacagatgagaaatctaagtcagtgttttgtgtgtgtttttttgtttgttttttttttttttttgagacagagtctcgctctgtcacccaggctggagtgcagtggcacaatctcggctcactgcaagctccacctcctgggttcacgccattctcctgcctcagcctcctgagtagctgggactacaggcgcccaccaccatgcctggctaattttttttgtacttttagtagagagggggttttgccatgttagccaggatggtcttgatctcctgaccttgtgatccgcccgtctggacctcccaaagtgctgggattacaggcgtgtaagtcagtgtattgtaaaaataaaatgtaagttcacattagaataatatttaagaaaaatcattcagtggtatctgaactgggtagcctagtgtaaaagatttttccaggagtccctggggaagacctgatcccacatcttggggaaataaaaaatttgaaatatatattttcatgttacccaaaagttaggggtgtttgaaaactgtctgaaatgacaaagtagaagggttggaacagtttgcagtggccgaacgatgaccatgtgagcatcgaaaatgagcaattgtcactcactggaagaagctgaatctgtaattatcctcacaattacatgattttataagacacattaaaaaatccttaaatgcaaaagcggggagagcctaataaggaaggctaatgcttactaattttaacaagaggaggactgtggggtctgcgggagtcctacccctgacttggggtgtatgtggcaacgaggcagaaactgccttctgtcctacctaagagaaagacagggaactcccacagccaggatctgccaaaaaaggtcaagactaccagcaacatgggcgagggggcctctggggtcacgttgagttagtcgctgcatagaaagagggctcaaatctaaaaaatgcaagagggtaggtcacccaagggtggggaaggtcttggctggaggatgaaggggcctcttgtctctggggcgaggcgatgtcaaggggaatgacaaaccaaaccagtccaaagcaaggggactctgtgtcctgggttctcagacaaggtgactgggagggagcccaccaagctcagggaaaggcctggcctccgtcatccacctgagctctgccttcccttcagccttagcctcagcgtggacccgggactcctgcatcctcccgtcctgccccgcctgggcacaccacggccgagagcctcctgttggcatcagcctctccccagcaccgactgtgcgctcccgctcccccctcctccccacaaccccgccccacactactggcactgctgcctgagccttcctggagttacttaatccaccccagccccaggcactgaaccacgcgtgcagacccctcgtcctcagttctgcggagacagagtccccacagcatttctgctcctccctcaagactgcggcagagcacagcaccagtagaccccacacagtgagtacctgtagggcaagtgcctctttcgttctcttaataatagagtcaggtcccttctccaagggaagaccctgccttgcagccccagcctggcctgccccttcttgcaggcccgctccgaaccctgggtaagactcgtgacgaggctccgggtggccgagcccttccgagagtgctgcggtcggcagggctgggctggctctctgggctgagggggaggggctcccacacctgtgcgctcccggaagaggggacagcggcgggggcgccgtgcgcacgggggcgaggggagacgactgcacctgagggaggcgcagccgcaaccgggtgggaggcagagacacccagaaacagagacggggcgatacgaacagacaaagccggctcgagcgcggcccgagcggcggcgcagggaggcggcagcctggcggagcagcccccaccgcggccggcgcgccccctcgccacccctgcgcgccagcgccggcccgcccctcccgctggcctctggcggcttaaccctcgcctgcccgaccccgcggggcccctggagccgcggtgggtgggtgcgggcgccgggcctccccctcccggccgcggcgcgcggcgccgggagctgaccgtggtgctgagcgcggctcgcgctccgacgcggtgcccgagcctgtcgcggccgcgccctgctgcactgcgggcccccagcggtaagtcgccaaggccccgagaggctgcgttggtcctgccccgcggatgtggacccccggggagggcaaggattggggaatttggtgcattctctggcgcgatggacgggctgagggcaggaagcagggtcgacaccctccacccagcggttcccggcgcagtcaggggcctgggagcggtgacccttttaggtctgggctagggaagcggagaaaccctccgccggcggatgcaggagctgagggagagccaatatcgctgtgaggcccatctccttgcccctgggcaggccaggaccgcccagaggcgccctccaaggaggtgggccaggaccttccctccccagagggccctttgtctccccagtgtgggggttgggtggcttggtggtgctctcaccgcagattctatttctgttttattccccattcccacccccaccccagagcacggtcgctttccctccgcacagtggccctcactccagccctcccatgacaaggcagcctactactgagaacgctattgccccatagctctaccgccagcccagtttccagaggtccctgggcctgcgcttttttatcaccatacactcctttgtatcacactgctgtgactttcctgcataccggggaaggcatagaaaataccaaaactattagccaaacgtttttttgtctcaaggcgtttctgtggcatgtgtattcctccagggtttttattttgctccatgaaatcaaacaccgggacactttcaggttaagaaaggaaaaaaaaagccacggaattaccttctcaaaggaaaaagaaaaagctgggcagctaagcctgagttggtcatgtagaaaagcaaccagtagaataacttcatttgcccaatttgcaataaatccatgtctgtgtgtgccgtgtaaaacactgtgatgggaggtgcacagacagaggagtctctgccaccaccttctctcccctaaaccctgcttgggctcctaactcgcctctgtgtctccgctgtccattttcacctgcatctttgaaagtgagaattggcccgtcacttgccctggaaggttggctccctgtggcttgcagataaaagcacggccctcgctgagacctcaggccgggtgtggtgtgtacagcccatctccaggcctcatccctctggcttgctgctctggtcacttgagctgctttcagatccttaaatattctacttctcttgctcctcggggcctttctgaagggtgttctctctgcctggaatatgtgtccaatgtcttttgcctggctgtcctcttctgtcttttaagtttggtttaaatatcacatccctgtaacagaattaattaagtaaatacattgtgtggtccctgttcccatggaacttgcaagttcgtcttagagatgaaagactcagcccagggtcctggtgtcaatgctgtcttaaaaaatgatgcacataggccgggagcggtggcttacgcctgtaatcctggtactttgggaggcctaggtgggaggatcacaaggtcaagagatcaagaccatcctggctaacacggtgaaaccccgtctctactaaaagtacaaaaaaaattagccgggcatggtggcgggtgcctgtagtcccagctactcaggaggctgaggcaggagaatggtgtgaacccgcgaggtggagcttgcagtgagccaagatcacgccactgcactccagcctgggcgacagagcgagattccatcaaaaaaacaaaacaaaacaaaaaacccaccatcctggccaacatgatgaaaccccatctctactaaaattaagaaaaaaaaaattaactgggcgtggtggtgcgtgcctgtagtcccagctattcaggaggctgaagcaggggaatcgcttgaacccaggagacggaggttgcagtgagccttgatcacaccactgcactcaagcctgggcaacagagggagaaaagaaagaaggaaagaaggaaagagagagagagagaaaggaaaggaaggaaggaaggaaggagaaagaaagaaggagggagggaaggaaggaaagaaggaaggaaggaaggagagaagaaaatgatccacataaactgtatcacagaattaaaatctcagactctgcatcctgtttagggaacttaggtgtaaacatttgactaagatatctcaaatataaaatagttcatttaactaagtaatagctcaccgcctactatagttggagtcctggaccttaaagaattttcaatctcgttggggagtgcaatcaagcaccagaatgaatagttggtggttgctgagccctgcagacaagaaggcacccgaagggtagggacgggtctgaaccctccttgggggagggatgtggcacttgtgggagtggacctgtcatgtttcttgctggggttccactgacgggtctatagccacagggttacaaaacagtgtgcatttttgcaactgagaacctggacacatttggcctctgccctcaggcagtgacaaggccagcatctggctgtccacataaatcccattctgccccagagaattgtcacagaagttgacttctcagtctgcctccagccaggcagtgggccctccaaccacccagggagttcccacccccatcataggtcacacatttccaaagagacaggttccgataaaacattttaatatggatttggactggaccgaacacagactagagttcatgggatgctccagtattgctaagcctctggttcctcattctgtatcctacacttattgtcctgtctctatgcaaagtgctcaataaactcaggagatgggcttggcattgttagtgtcactgagtccagccatctatagcaatgacagttattttaaaggatcatttttcaagttcagagtggagtgaaatttccaactgttcatgattttaaatcagttgactgttatgagaactgagaaactggtagttttatttatagacatctatatcaaataaaacatttttgttcttgcagttgcaaaattctgcacaaggtgaaataatccttgctgtgcctggctgaagttatatccaacagaatgtcaatcaaaagatttttccaaaacatagaaaagaataagggaaatagagatctcataatgaatatttccaaaatttcctgccataggaattattattaccttcaattataatttttctaaatctgtgtgagctacccttcttgcttttaatcttcactttcattgtgttttacaatatttttcatgaaaacacatttattattctacttttagatttcccacaaaagagtctgagctgtcggtttatagactgtcaggttcagaatcagatagacctgggttcagatcccaactctgtcacttaacacctgtgtgacttgggtcagttcattgacttttctgaatctgaatttatcctttgtaaaatgggggttacagtagtttgcccctcatacagttatgggccaagctgtctgcctggttaggtgggtgtaaccaagactccagccagggtcatctgagccacagcttggagagtaagccctgtgctgtgtgcagcaaagcccagcagagcttcggaggccttatcacggctgcaaaggattgtgcagagtagaaagtctgcaggtgcagggtgggaaagacttaggcatacaccatctggcatgaggcagaaaagccagtgtggctgctcagggcagtctccctctgtccagggtgccactagcaacagctgagctgcagctggagcccagcccaggttctgtggctctcctggcatggtgcctacttcttctcatcctccaaccaaaagtctgaggtgcttccgaggaagcacttcccttgggtgggagcgggtggagcctggtcagcttgcccctgccagcccctgcagtgtcagctcttccaccccttcccattttcttggcctcaacgtgcccactgggctatgaggcagtccctcgcccccctgggtcctcatgaagaagcatttcagggtctctggcaggtagctgcaaagcttacttggggtggggtgtgaaaggcacaccggctgatggagccccaggtcatgttcatgcctgctgcaggcttcctcacagccaggagctgggggatgagtgcagggttgcctccgtgtagtccttatggagaggcgaaggagccagccgcagtctcttcctggccagactgacagagtactgactgtcaggccactcactaccaagaaaggtggagaccctggcagacagaggtattttgggtgataggagcaggctgagtccagggcctgaggacatggtgaggggaacagaggggagggactcagtctgccctctcttcctgggtactgaaggtctccacaacacaccccaaggcagcatgtttaaaaactaaaccctagctcttctttcaccttggctcagctccctcctccttcgctcatttccctcctcgagctgtcccacgctgttggtgtagatccaagccttggccttcagaactccctgcctgcttctctatccctgctgtcggtgagccctggcattcttccctttggaagaccctacattacccctgcagccgccatctgccttgctccccatcctcagtccattgggactgcctctggcaagtcctctctgctcacaattcattttttctgtcctccactcggaggtcaggtgcgtggccctagaccgccaacttcattaaagtccctgctcctacccacccacaggaagatggctgtagctccccactgatctcagtgtagggccggatgccctaactgggccgggacagtcaattggctagcactgctgccatctttccacctccatgcccagggcagatcccaggaccctttcccattgaactcagaccaggcatcagaaaccttctctgcatggcactgcaggcatcagtatgcctcggtgatgtgtgcacaaaaggtggtggctgcctacccttgcagctctgcctgcccaccctgtgtcccatgctcacctcccaccacgatgctctggttcctctgtgtccatgctcttgcaccatgaagttctgggctgtgtcttgcctgatggcatctgtagatagagtcttgcctccctgcacaggcacacagtcctggagtctgcaatatgcacacccccatagccccagctgagggccagctgccttcagcccaggaagcaggcaggtgtgggtgtccctttagctgcctgatgaaggaggccactgccctaattggatcctccgcccatccactcagaagggccatgacacccactcctaaggacctgctacggatacactaaggagctgtttgtagaacgctgggcactctacacagaacacggagtctgaatgggccaaatgagctaaaagggggattgggagagtcaagcactcatgggtgcagcagtcaccaggccccaggcagctctcattttggctcctactgtgtgctgttagggctgctcccatctttctcccccacctgcaaggaggatctcctgggacagaggcccctgcagagagtgagctgtgtgagaggggtaggcagggtcttccagagcccagggccctcccgtctatgatactgagtgcctcctgctttcctccacagcagctggggcactggcagcatggagctgaagagaggaaagaccttcatcaagtccagcctgcaggtttcccacgagaaacccccagacccagcagccgtggctgcagccagggaggggacaggcccctggtcagtccttccaggagggcaacagaggccccacagtgagaagggcccccaagccagccccagtgcccaagaatacgacagatgccccaacaaaggggcgcagctggaccccaaagggggacccgcagccctctgtggagccaccttcaaaccggtgcgaaagtgcaagactcacgacagcatgtctggggcaggcagggccacggctgccacagggcagctggtgggcagtgcaagcttcccgggctccccgggcagccggcgcatgatcgactaccgccactttgtgccccagatgccctttgtgccagctgtggccaagagcatcccgaggaagaggatttccctgaagaggcccaagaagtgctttcggaacctattccacattcggagaaacaagactgaggacttggcctcgctggcggccgaggggaaaagcctgccctccccaggggacccgtcagaccctggggggcggcgaagcaaagccttcctccccccgggtgaggggccggggctggacggcctgtgccaggacctgttggacagcgagctcctggccgatgcatcctttggtctctgcagggccctgtgtgaggacgtggcctcactccagagcttcgactcgctcacgggttgtggggaggtgttcgcagatgagagctcggtgccatctctggagctgaacgagggcccggagagcccaacccaggctgctcagggcctggagagcaaggttcccaggggccctctccagggcagtgtggagcagctggcctcgcccgcccagaatgaagcctctgacttcaccaggttctgggacagtgtgaatcgctcagtgcgtcagcagcagcgtgccctcctaggcccgtggctttcaggcccccaggggacagacagggaccaaccccggctggacacagctgggctcgctgagctgcccctctgcccctgcagggaccctcgcagcggctccaaagccagctccatcgacacaggcacccccaagagcgagcagcccgaatccgtgtccacaagtgacgagggctactatgattccttctcgccaggacttgaggaggacaagaaggaagctgagagcccaggcactcctgccgccaccttcccacgggacagctacagtggggacgccctctacgagctcttccacgaccccagcgagggtcctcttggccccagcccagatgatgacctgtgcgtgtctgagagtctgtcagggccggccctggggacgccactgtccatatgcagcttccgagtgggggccgaggagaacttggccccagcaccaggccctgacctgctcagccagggcttcctacagagctcctggaagggcaaggagtgcctgctgaagctgtgtgacactgagctcgccatcaccatgggcatcgtcagctggctgcgccgaggccccacgccccgtgccccacccacccctgggcagcctgcagctccacctggttcccagggagcccctagggcacccacagagaagctggggggcagggagggcctggcctcagatgcagggggggcgacagtttgctcagcacccagcaggcaggagctgtgggcacacccgggcaccacaggcctgctcgccggagagagcaaggccctcggaggggccacacaagggactggcacactgtccagggatgcctctcgagaggaagagacacgaggtcactctgaaggcttgttctcctctatggagtctgcagccacttcgacaacagatacttccggtaaaaataaggccccagttccttctacctggccctgctcccagaaggagcctgggccaccaggggtcctggggtgtttccgaggcccctggaggccaggtcacggaggtgacactctggatgcagagcccatgctggcaggctgtgtggcccgtgtggcagccctgaagatcagctcaaacgaacagcccccggccgcatggcctccaaggcaagacatgggcagtgggctctttgggcagcgctgggccaggggccctgacatgctggagcagaaacagtccagcagctcccccagcatgaccaccatccatggcctaccctactcagccagcacacaggaccagaggtgtcgagatcgtgtccaggacctgagctggctcagggtggagcccaccgggctaggtgtccaggcctgggcctctgtggaggaccagcccttgcagctcagcacagaggctgtggagcaggtggcacacggcagccagctggactctgagccccgctcagcccctgctgcccggtggagttcccagggccaccatccagaaagcctgggcctcactttgaacagccagcaggaagggggggtctctgcaagtgccccagaatgccgctgcagcctcctggcccgtgagggcctcctctgtggccagccagaagtgggggcctctgggccagccatggctgagccccatctgtaggacaggctcacatgcaccaggaactgcatgtgtcttcatgaccactttcaggagagcctaggactcaaatctctatcttttgtccctgatgtggggactgtgttgggggtggggggtggcaggactcaggcatgcagagggtagcatgttcatgtggaggcatccttgcctgaacccaccagctcaggcagcccaccgccaaagacagcgcgaagctgcaaccacctagctgctcctcatgcaggggctggagagaggggctagggcttgaaactgagggggagaaagagctgcacattgtaaatgggaagcagagagccaatgagtctgcctgggatgtgtgtgaatcccaaaagacgcaatcccaaatgccatagtcccaagtgttgagaatccaaaatattaaaattactatactctaaaatccgaaaatcacaatcccaaaagatctaaatcctggaaatataattctgggaaaatttttttttaattttttaaaagatacttacattttaaaaggatttatttgagaaacataaaaacacaacagaacacatcagccacttcacacaataaaataggcaataatacatatttttggaagcataaacaggtatacagacagttacaccggtgtgagttattagcagacaaactatattcatgaagaaataggtcaaaatgggaaatgtatacatgcatgtcactatgcttggtaattgtgtgcacctcgctttatacttgcagtcatatcatgaccaacaacctaagtcttttgacgaagtcaatctatgatgcgtcaccaccacacacacagttgcccaaagagcggagatggcaagaactttcatctctcacaattgcagatgtacaaaaattacatctcttcatttattgaggaagttttgacgtttttatacacacgcacaatgcttacacacacagtcaacctgggatgccggcagggtggctcaggacgaaagcctcaggacccaggagggccatgggtgtaagttccagagtccaaaggccagcgagcctgaagctctgatgtcaaggcagtggaagaaaagcctgtcccagctctgagagagagaccagtttgccttctttatttgttctccctgggcctcagcagattgaatgctgcccaccaacattgaggctggatcttccacacctaggcccctcagattcacacactaatctctggaaacacctcacagacatgcccagaataatgatctcccaggtctctaggtatcccttaacccagtcgagttcacacccaaaatgaagtccacaggtccaccccttgtcaacttggcatccatccgcatccccttaaaccattttcagtctccaaataaagccccaagcaaggcagtagctccacctaacatgatgcaactatcccgggattgtgatttttaagactttagatgttagggatttgaaactttagagatttgcgtctttcagtatttcaatgttggggaccagtgtttgggattatgtcttttagaataatgatccaaacttgtgtgaggactgtgaggctcagggtgggagacgggtgggggagccgaccttaggagggcccactgaaccggcctcaatctggccccagtctggcctactcgctgccccaggacaggtggctacaacatgctgagggcctgaagggcgtcccctcaggaacattgtattactgttttgtgttgctataaaggataactgtgaccagatcatttataaagtaaagaagtttatttggcttgtaattctgcaggtgtagaggcatggcaccagcatctgctgctgctttttttttttttttttttttttttgagacagggtctcactttgttgcccaggtgggaatgggagtgcagtggcacagtcttggctcactgcagcctctacctcctgggctcaagcagtcctcccacctcagcctcccaagtagctgggactacaggcgtgcgccaccttgcccggctaatttttctatttttttgtagagacgggttttcgccatgttgcctcagctaaaatgtctcaaaatctcctcaactaaaatgtctcaaaatctcagcctcccacagtgctggatgacaggagtgagccagccagcatcatgcatccctgtgcgccctgccagggctggcgggaccctcccacccttgttgatgggcagtgctagattatttgtcacgaatcatcccctacaaacaatgatttccctccgcttgcactctctaactagagccatggatggccaaatgctttttgggaagaagccaatggattctcctcggctctgcctgcaagtaacaaaggcttttgactccactccctccacgctgtcagatcgccattccccttcaggaaaacttcgaatggggctgtggacctcactccccaaaatgtcacaacacatgtgcagcaccccgacattcagaaccatgaagggagaaggtggctggtgtctgtaggagggacaggtgtccgtcctgggccagtgtcaggccagcaggtgcagggacagatgggccatccacattctccaagattagcttctacctcaaccagcacacctcagcaagatgccaggattgggctccacaggcagccatgaaatgggtttctggaggaaagatcagcacaggaaaaggggtcagtcaggtcgcaggcaaagtgctagggaaatcccatctcatgcagagctcccaccaagaggagcgtgagttgtgctgtcctggctcgagaagaaggcagcacaggatctgtagctgagggtggccctcccaccaggggacgctggtcagtgcctctcctgactgcctgacgcttggtctccggtggccctctctcaccagggctccctgaggcctgctgcaagcaggacacaggctgcacatcacaggttccaaagtgtgcagcaaggcttctgaccaggcccgtccagatctggagcccctgtggagccacatctgagccctcctcccaagactcacacacaggaccacagcagcatcactgagccgagctgggggcaagtttcaccagattcgcttacctgatccttgcatcaacctcaatgcagttgtcagccccatttttcagacctggacacggaggcacagggtgctggtgtgacttgcccacagttattagtgtgtgaggtgatgggttttgtcccgtcccagctccaaaggccctgctcttcctcaagctccagaacctctcactgagctcctgcagtgaagtcccccctcagagccctcagcccttcctgctttcaggctccagatgtcagagcacccttgggtgccagccacaagtggccctccagcaggctgagcacccagggggaggctgccctgactcaaccccagcctggggctttgtgctgcacctgagggagtagccgctctgtaaatccttgttgaaagaatgaagtgtcaaaaggttgtgcgtgcttttctgatttcttgttgaccataagccttgtgtctggagggcgactctggcctgagtgccagccgcctccccgctggcagagacagaacactcccttgtgccatgctgtgatgcggtgactcgtggtgatggagagcccagccaggcccaacggcgctgggaagggcaggaatccaggcggtcagggagtggtcaggagggcctagggtccagagaggagcaaagggtgcccaggacccgggccatgtggaggcgtggtctacagtgacccggctgcagggccatgcctcctgggaggacccactggcctcggctctccacttgggggcactatagacaacctcagaaccccagattcgaattcagcatctgggcctggggtcccaggagtggcctgctaggcaccctgctgggggatggagggggcagcgtgagctccctcagggtgatctctctctgtctgcaccccaccctcagcctgtttttccctgcaggcctcagggtgacccactgtggataaagaagggaacttcaagcccagctcccgggacacgtgcctagcccagtgccgggagcagaagaggctggctgggcatgttcagacctccctggtcatttccagccctctcatccacacatggatggctgtagaggtgacagcagatttccccacgtgaaataaaatcctgagaagtcagtccagttgccctaagctcacagctgtcccacagagcttgagtggctcgcccaggctcccagagtcccacaggttgtggaaaaggggtttgcccaggggccgtgcactggggcttccaacctgccactgccacgttgtgctgggaagctgggaacattgggtagggccaggagggagagagggaagaggacagggaggacgggcaggaagcgctgaagaagagaaggggcgaaggccagcacaggcagggagagactgcagaccacatcccaggatgcttcatgtctttcttggtttcctattttattttattttctggaatgggaataaatacacaggatacaaaactcagaaggcacagcagggaaacagtgaaagtcgaatctccatccttccttcctcagccctctgttgttacaaaattaatccactctgacagaagacaaagttgcaacaaatttcattacagatctaattggcttttatttgtgattggtgaatgcggcagcctccattctacaaaacagaatgagagctgctccaggcaatgacggaacactgagttttgtaaggtgggggcaaaaaaacagtaacaggaaagaagctgatcagttaacaacaggctacttcaggtgacttcattgtaagggctgaagcagaggggcttgcttatcacacggactccaggacactggaatctctcatttccaggaaaaactggtctgttttggaatctatctgcttaaagtttcagtttggtgatgtggcatttagcacaagtgactgcattggggtttggtctggtctgttgggatctggggcaggagctcagtccagagccagggccacctgggattgtgttttcacaacagtgactacacccaatccaaacagccccagtgcacaggccccttccctccttttctccagccctggtgggagacgtcagactctttgcattcccgtgacatacatactgttaacggagaaatcatattctgtggaatatcttcaagaggcttaccctgagccaatatgagtgactgcgggcccaggaaaacacaaacccaagaagtccggagtcagtgggcctgaagcagtcggattacagtttggttttatgcattttagggaggcagtgattacaggcaaagacataaatcatacttgcctgaaaaatctacctaaaataataaaacatgaaaaaaagggggggggagatataaatcaatcagggaagtatacattggtccagcccaaaaaggtgggatgtcttgaagtgggagggagggcttacaggttataggtggctttagagattctttaatttgcaattggtgaaaggaggcaggctctgtgtaaaactttgagacagcagaaaggaaagttttcagttcaagtaagaatgctatctatgtagcaagattgctggcctgcaggctgacttaaccctggccttgcatggccttaggtcttgcttataatttggcatcttattgccccaaagagtctgttttggctggtgcagtggttcacacctgtaattctagcattttgtgaggccaaggcaggaagattgcttgagtccaggagtttgagaccagcctggacaatatggcaaaaccccatctctacaaaaaatacaaaaattagctgggcatagtggctctcacctgtggtcccagctacttgggaggctgaggtgggaggatcacttgagcccaggaagttgaggctgcaatgagccatgatcatgccactgcactccagcctaggggacagagtgagaccctgtctcaaaaaaaaaaaaaaagtctcttctgtcagttttatggtttctgtttcaacattaatgctggtcagttgtaccgaaactccaaaagggagggggtataaagaggtgtgtctgccctcccttcttatcatggctgataatttagattttatgggttttctggggtccccttggccaagcagattccgttcagtcagtggggggcttaggattttatttttagtttacaacacgtgaactttaatgaatttttactgcccaggacatcctccctagcttagcaggcaccgcagtgggcagctcccccatccttctgcacagctgctctcctggagggagcggttaatttaaacattcccctgttgatggacattcaagttacttcccatttgctgttaaaataatgctgcactcactccttcattcctggagtgtttaccactaaagtcctcttcgagattgtaaaaatgaaactgacttgtcgaagaaaagatgcatttttttttttttttaatgaagagcgcctcttgcctccgcctcccacccactgaccactgttttggggccctggcgtagatgcctggaccgcaggcctatacgaacatcacacaccctgcctttgggagcggagatgttttttattattacatgtaaaggctttggaagtggccattctcatccttcaacaagaaaaagctggacacaccagctttttttcttgacccctctgaaaaatgaagtcccagggcaaacaaccttccagaaacctggagagacagaccatccagagaaattcaacaaccaaggcctgtggttgggagcaaaagtctccagatacccaaagctggtagaaacactgaaattacaatgttgacacattgttgcaggctgaagaagctgggggatgggcagtaaaaggcagtaagaagctgggggatgggcagtgtcagaggcttttcctccaggaaccactccacattttcagtgaggatcaaacaaagacccttccttccacccctacccctgcaaggggaggtgggggaacagggtcctcttttttttttttttttttttgagatggagtctcgctttgtcgcccaggctggagtgcaatggcgtgatctcggctcactgcaagctccacctcccgggttcacgccattctactgcctcagcctcccgagtagctgggactacaggcgcctgccaccacacccagctaatttttgtatttttagtagagatgggctttcaccttgttagccaggatggtctcgatctcctgacctcgtgatccacctgcctcggcctcccagagtgctgggattacaggcgtgagccactgcgcccggccgaagaggatactccaaacttctccttaacaaagtcttccctgagggctattctgaaaccttttcaagctaaagggtttctaccccactccagtcctctccatccttcaggtctcaactaagggaaaataaagcgatagtcaacaagggagaggacttcaagaaagcaagcaggaaacactggccagggaagggaccagggctatgaaggattagccccaccctgaggccgaggcacagaaactaaaagaatgaggcctgattggaggttagaagacaagggaggctgggcgtagtggctcacacctgtaatcccagcactttgggaggccgaggcgggcggatcacgaggtcaggagatcgagactatcctggctaacacggtgaaaccccgtctctactaaaaatacaaaaagccgggcattgtggcgggcacctgtagtcccagctactcaggaggctgaggcaggagaatggcgtgaacccaggaggcggagtttgcagtgagccgagatggctccactgcactccagcctgggcgatacagcaagactccatctcaaaaaaaaaaaaaagaagacaagggaacacccctctccccacttgccagcacatggtgccaccacactaacaaggcgccagtaataacagtgggtcacagctaacagagctaagagacaaactctctctctgaggaccagaatgaaaggaagccacagagacaagaaagaagaaaaagtaagcccattagaatgatttgaagcagctggtggcctaaagctatgacaaatattacaactcctagccagattaataaaccctaacattgaaagcctattgacctcagtgcctatggcccaatatgtacaacatgtctggctttagacaaaaaaattacaaagcctgttaaaagcaagaaaaaccaaagcctaaagagacaaatcattagaagctgattcatatatgacacagatgttggaattattagatggaatataaaataactatcattaatatggtacaagctttaatggaaaaagtagacaagttacaagaacagatgggtaatgtaagctgacagaattccaagaaaaataaaaaggaaatgttagaaatccaaagcactgtcttaggaatgagtaattactttgatgggctcatcagtacccatgacatgggtgagtaagggaccagtgagctttattaaaaatgccttgaaatgaatgaaaatgaaaacacaacataccaaaacctgggaggcagacaaagcactgttaggagggaaattcatagccgtaatgcatacattaaaaaaagaagaaatctcaaattaataacccaactttacaccctaaggaactagaaaaagaaaactaacccaaagccagcagaggaaaaaaaataataagaattaaagtggagataaataagatagagaatagaaaaacaatagagaaaatcttcaaaaccaaaagttggtactttgaaaagactaaattgacaaaccttcagctagattgactcagaataaaagaagactcaaatcactaaaattagaaatagtggagacattaacaccaattttaccaaaataaaatgaattatagaagaatgttacaaacatttatatgccaacgaattggataacttgatggaatggacagattcttagaacgcacatctatcaaaagtgactcatgagccaggcgtggtggctcatgcctgtaatcccagcactttgggagaccgaggcaggcagatcacttgagcccaggagattgagaccaacctgggcgacatggcgaaaccccatctctactaaaaactacaaaaattagccagccatggtggtgcgcacctgtaatcccagctgcttgggagactgaggcaggagaattgcttgaacccaggaagtggaagttgcagtgagctgagattgtgccactgcactccagcctgggcaacagagtgagactctgtctcaaaaacaaaaacaaaaacaaaaacaaaaacaaaaacaaaagaaaaggaataatgataaaatcgaaaatctgaataaacgtataatgagtaaggagactagatcagtaatccagtctcccaacaaagaaagcccagggcaagatgagttcactggtgaattccaccaaacctttaaagatttagcagcaattcttctcaatctctccaaaaaaaattaaagaggaatacttcctaattcatttcatgagaccagaattaccctgataccaaagccagacaaaaccactacaagaaaactacacactaatattccttaagaatacgtagattcaggccaggcatggtggctcacgcttgtaatcccagcattttgggaggccgaggtgggcagatcacgaggacaaaagttcgagaccagtctgaccaatatggtgaaaccctgtctctactaaaaaaaattagctgggcatggtggtgggcacctgtaatcccagctactcaggaggctgaggcaggagactcgcttgaacccaggaggcagaggttgcagtgagccgagatcacgccactgcactccaacctgagcaagaaagtgaaactccgtatcaaaaaaaaaaaaaaagagtatgtagatgcaaaaatcatcaacaaaataccagcaaagcatactcagcaatatattaaaaggattacacaccacgaccaagtgagttttattcttgaagtgcaaggatgattcaacatccaaaaatcaaactatgtaatacatcactccaataggatgaaggagcaaaatcacatgattatttcaaaagcagaaaaacatttgacaaagtctaacaccctttcatgattaaaaaaaataacgtaccaggaatagaagtaaacttcttcaccatgataaaaggaatttctgaaaaatccacagctaacatcactctcaacagtgaaagactgaaagctattccctaagataaggcataaaacaagaatgcccacattcactacttacactcgacatagtattggaagagccagagcaaagaggcaaaagaaagaaatacaatacatctaaatcagaaaggaagaagtaaacctatttctgttctcagatgacatgattttatacgtagaaaaccctaaagactccccaaaaaactattagagctaataaattagtttaatggaattgcaagatacaaaatcaacactcaaaaatcatttgcatttctatacactagcaatgaatgatacaaaaaggaaattaacaaatacattccatttataatagcgttaaaaagtacttaggaataaatttaaccaaacaggtgaaataattgtacactaaaaactataaaacatgggctgggtgcggtggctcatgcctgtaatcccagcactttgggaggccgaggcgggcggatcacgaggtcaggaaatcgagaccatcctagctaacacagtgaaaccccgtctctactaaaaatacaaaaagttagccgggcgttgtggcgggggcctgtagtcccagctactcaggaggctgaggcaggagaatggcctgaatctgggaggtggagcttgcaatgagccgagatggcgccactgcactccagcctgggcgacagagcgagactccgtctcaaaaacacaaaagaaaacagaactatgaaacaggcgaggcgcggtggctcacgcctataatcccagcacttccggaggctgaggcgggcggatcacccgaagcaggagtttgagaccagcctgaccaacatggagaaacccggtctctactaaaaatacaaaaattagctaggcgtggtggtatggggcatgcctataatcccagcaatttgggaggctgagacaagaaaatcgtttgaacccgggaggcggaggttgcagcgaactgaaatcacaccattgaactccagcctgggcaacaagagcgaaactccatctcaaacaaacaaacaaacaaaaaactataaagcattgctaaaagaaatttctttttttttttttttttttttttgagatggagtcgcgctctgtcgcccagactggagtgcagtggcgccatctcggctcactgcaagctccgcctcccgggttcacgccattctcctgcctcagcctcctgagtagctgggactacaggcgcccgccaccacgcccggctaattttttgtatttttagtggagaccgggtttccccgtgttagccaggatgttctccatctcctgacctcgtgatccgcccgcctgggcctcccaaagtgccgggattacaggcgtgagccaccgtgcctggcctgctaaaagaaatttaagacataaataagtgaaagatatcccacattcatgtactggaagactaatattgttaaataacaacgctaactaaagtgattgaatgcaatccccataaaagtcccaatggattttttatccagaaatagaaaaactcatcccaaaattcatatggaatctcaagggatcccaaatagccaaaatgaccacaagtgtggacaaagctggaggactcacacttgcggatgtgaaaacttactataaagctatgtaatcacaacaaggtgctattaagagaagcattagccagcttccaagcgggaatcttcatagtgtgagtgataaaggagagaatttaacaggagtaacgtagtaaaaggcaagaagattttgttcacaagggtacccagtgccacactgtggaaaaaagaggcaagcacagactgggccagaactccatgggctctgggcagcagccaggtcaggccattggatccccttacacagacgccaacagaacacagcatcacctggggagaggagacaccggtggagtatttgaagaatccagagaattacatccttggaacaaaaacagtcttcactggcattaacaagaaggtagaaagaacagacttgataacttatctcaaaaaagccactaatgagtaataattggccactgcctttatttattacaaaacaaaggtctcataacttcatgtgcaccaaaatttaattgatctcatacaccagaatttagatcatgaatgagtggcagaccttttttgttggacagtcctgatttaagtcacactagcttgtggttaaatgaatatgactgtttttttgaactttgatagtaatttcaattcagtaaatgttatcactgttttccccttctgaagatatgattggacttcattagtaacgttcaacttttcataaaggtggtgaatgccgtctcaaaacatattggggattggttttatatttagagttctataactgtctttatgaatatatttaaatactgtctcagaaccaagcaagactcacctatgttttaatttgtgttcattaccctgtaaaaggcaagggctgaagataagacagcaatgtctactttatatttttggtcttaactatgccaatccaattagaattccctggatctaaaatgctgccttttactaattgaaatgcattttatgtgtaatatcaaataaagaatagttaaaacacttctcaaattttatagatgatctataaagtcagatgcttctgaaaatcagtgtaacaagaaatagtagtaaggtaaaatttacttttgaattctttgctatctaaatctgactaagttataatttaggattgcctttaaatgattcaagcacgtaaaactgtagaagtactgtgtacgtgtgattggtaatggtgcttttgtcaatgtattagaaggattaaagtggagaagatatacattaatttagaaattgtgtgtgatcataagactttgataattataaacaaaatgacagattataacaaaaccagggtgttactggcataaggacagacatagtggccctcaatttatagtcagttgatgtttgacaaggttgccaaaaccattgaatggggaaagggccatcttttcaacaaatgatgctgggaaaattggatatctgcatgaaaagtatgaagttggacccttaatttatgccatatacaaaaattaactcaaaatggaactaagacttaaacataagaaccaaaactataaatatcttagaagacaacagagagggaaatctttatgatgttggattttgccatgattttttgtatatgacaccaaaaatataagcaacagtaaaacaaaacagttattgaatttcatcaagattaaaaacttttgtgcatcaaaggacactatcaagaaggtgaaaagacaacctaaaggatgggaaaaaatatttgcacttcacgaatctcataagaaattaatattcaggatatgtaaagaattactgcaactcaacaacaaaaagacgaataattcaactttaaaaaatagacaaaagccttgaatagacatttcttcaaaggagacacacaaatgccaaataagcacatgaaaacatgcatatttgcttatccctgattactagggaaatgcaaatcaaaaccacaatgagggccgggcgcggtgtctcacgcctgtaatcccagcactttgggaggccgaggtgggcagatcacaaggtcaggagttcgagaccagcctggcaaatatggtgaaactgtctctactaaaaatacaaaaattagccaggcgtggtggtgcacgcctgtagtcccagctactcgggaggctgaggcagaagaattgcttgaacccagcaggcggaggttgcagtgagcagagatcatgccattgcactccagcctgggcgacagagtgagactccttctcaaaaaacaaacaaacaaaacccacaatgaggtaccacttcacacccagtaggatgactgttggaataaaaaatggaaaataattgttggcaaggatatgggaagataggaacgcttgttcattcctgttgggaaggtaaaatggtgcagccactgtggaaatcagcttagcagtttctcaaaaatgaaacatagaaattatcataatcagccgggcgtggtggctcatgcctgtaatcctgtcactttgggaggccgaggcgattgcctgagctcaggagttcgagaccagcctgggcaacatggtgaaaccctgtctctattaaaatacaaaaaaaaaaaaaaaattagcgaggtgtggtggcatacgcctatagtcccagctatttgggaggctgaggcagaattgcttgaacctgggaggcggaggttgcagtgagccaagatggtgccactgcactctagcctggtcaacagagcgagactctgtctcaaaaaaaaaaaaaagaaagaaattaccataatcttggacatagaaaatacacaatactataccataaacatagaaaaaacctcatctattctatccctaagtatattcttaaaagaaatgaaagtggagactcaacaaagatatttatactccattcttcactgcagcattaatcacaatagataaaaggtggaaacaacccaaatggtcttcgacacaaaaaagggtaaataaaatgtgatataagcactcaatggaataaaaaagaatgcaattctgatatatgctagaacatggttgaaccttgaagatgttatgctaggcattaaaggacaaatgcatgattccatttacatgaggtacctagaataggcaacttcatacagacagaaagtagaatagtggttaccagaggctagtggggagggcagaatagagtgactttttaatgggtatagagtttctgtttggggtgatgaaaaagttctggaactggatagtggtgatagtttgacaatattgcaatcacccacaggttcatcttgtccactgcctggaaaagctaatgcactgagaacagcaaggttttgcagcaaaaataaaataaataatttaaaaaagagtttaattaacacagggctagccaattggaagatggagtttattactcaaatcaacctccctgagaattcagaggctagagtttttatggataaattgtcaggcagggggctagggaatggatgatgctgactggggatgaagtcatagggatgtggaaaatggtcctcatgtgctaagtcaacttctgggtgggggccacaggacctgttgagtcaggaatcacgggtccaggtggagtcagttggtcaccagaatgcagaagtctgaaaaacagtacaaaaggccaatcttaggctctacaataatgatgttatctataggagcaattgggaacattataaatcttgtgacctccagcacagtaaatgactatagaaaggcaagttatgcctacatcttagcagaattcaggctgctctcataatcttaatcttgtggtctctttcaatagtcataaaaaggtggttttagatccctgagcaaagagaaggttagttttagggagggactgttatcatccttgcttcaaagttaaactataaattaaattcttcctacggttagcctggcctacacccagaaatgagtaaggacagccagcctgtgaggctagaagcaagatggagtcagccatgctagacttcttgtgctctcataatctttgcaaattcagcttcaatattgtgaatgtacctaatgccactcaattgtacacatataagtgattaaaatggtaaattttatgtcatgtatattacaccacaataaaaaagaaagcaaaaaaaatcagtgagtatgaagacagagaattgaaacttccaaaattgaaatgcgaagagaaaattaactgggtaggtgggtgcagggaagagcagagaagaatacagcatccaaactgtgagacagatcaaaaagtgtaacatatatgcaattaccagaaggagcagaaagagaaaatgggactgtattagtctattctcacattgctataaagaactacctaagactggccgggcacggtggctcacgcctgtaatcccagcactttgggaggctgaggcgggcagatcaccaggtcaggagatcaagaccatcctggctaacaaggtgaaacctcatctctactaaaaatacaaaaattagccaggcgtggtggcgggtgcctgcagtcccagctactcgggaggctgaggcaggagaatggcatgaacccgggaggcagagcttgcagtgagctgagatcacgccactgcactccagcctgggcaacagagggagactccgtctcaaacaaacaaacaaaagctacctaagactgggtaatttacaaggaaaagaggtttaattgactcacacttctacagggttgggaggcttcaggaaacttacagccacggcagaaggcaaagggaaagcaggcacatcttatatggcagcaggagagagagaaagagggaaaagggaagagccacccacttatcaaacaagcagaatgtgagaactctatgacgggaacagcacgggggaaactgcccccatgatccaatcacctcccaccaggccctcccctgtcatgtggggattacaatttgagatgagatttgtgtggggccacaaagccaaactatattaggcatataaagagttttgggctgggtggggtctctcacgcctgtaatcccagcactttgggaggccgaggcaggcggatcacaaagtcaggagatcgagaccatcctagctaacacgttgaaaccccgtctctactaaaaatacaaaaaattagccgggcatggtggcgggcgcctgtagtcccagctactcgggaggctgaggcaggagaatggcgtgaacccaggaggcagagcttgcagtgaggcgagatctcgccactgcactccagcctgggtgacacagcaagactccatctccaaaaaaaaaaaaaaaagagttttgaagaaataatggctgagaactttccaaaattaatgataggcaaaaaaccacggatctaagaacttcagagaacatcaaacaccccccacccacacacacaccctggacgtgtgtgtgggattctggattcggtaatatccaaattgcagaaaccaaagacagaaaattttaaagaaagccagaagttattgagggtggacactttaaccacaaaagatcaagaataagaattataataaacttctcatcagaaaccatgaaagaaatattaaaatgaagctgggcgcagtggctcatgcctgtaatcccaatactttgggaggctgaggtgggtagatcacttgaggtcaggagtttgagaccagcctggccaacatggtgaaaccccatttccactaaaaatacaaaaattagcctggtgtggtggcgtgcacctgtcatcccagctactcaggagggtgaggcagaagaattgcttgaaccagggagacggatattgcagtgagctgagatcatgccactgcactctggtttgggtgacagaatgagattccatctcaaaaaaagagaaatattaaaatgagttatttagacagaagaaaaataatataaggtcatatacttggatctacataaagaaagatggagcccaagaaaaggaataaattagggtaaaataaatagttttatttttattattctttactgatctaaaagataattgtctgcttaaaacaacaatagtaacaatgtgttggtttatagcccatggataagtgacacgaataactgtaatgtcatcaggcacaggagggaagaattggacaaccctgctgtaaagtagctgcaatccacagataatgtggtttgaaggtggtcgtagacaattttaaaatgtatgttgtcaatcctagggaaaccactaaaaaacatttttaaggagtgttaatgatgtgttaagatagagctaaaatgtaatcatataagatacttaaaaccagagaaggcagaaaagagaaggaaaggctacaaagagcaaatgcaatgaatatatatacttaacaaaatggtagatttactccaactatatcaacaattactttaaatgtgaacacccgataaaagaaagtcatatgtgattggatttttttaaatgtaaaagacccatctacatgctgtctataagaaacacacatgaaatatcctgacacagacatgtgaaaagtaaaagtacagcgaaagatatacaatgctaacactaagcaagagaaaatggagtagctatattaatttcagacaaagttgacttcttttatttttgagacagagtctcagtctgtcacccagcctggagtgcagtggtgcgatctcagctcactacaacctcctccttgcgggttcaagcaattctcctgcctcagcctcccgagtacctgggactacaggcatgcaccactatgcctggctaatttttgtatttttagtagagacaaagtttcaccatgttggccaggctggtcttgaactcctgacctcaggtgatccacccacctagggctcccaagtgctgggattattggcatgagccaatgcgcccagcctaaagctgactttagaacaaggaagattatgaaagataaaaaggaccattagataattataaaatagtagggcatcaaaatatgtcaggtaaaaactgataaaactgaaaagagaattaggtaaacccactattataatcgaagccttcaacagtcctttgtcaataattgatagatcaaacaggcagcaaataagtaagaatatagataatctgaacaacactgtcaatcaacttggtctaattgagtttataacatactccagtcaacagtggcagaatacatgtttttctcaagcacacatggagcattcacaaaaacagacccacacctggaccatgaaatacacattaaaaattgaaaataataataatcatgcaaagtatgttcctgtgggggcacaaactaacaattctgaactcactgtacttgcatactgggattgaattttggattaactagtaaagggatggtggtatggcagatgcgggagccaggtttctcactgctgaaggtggaggtcgcagataaacaagaagggaaggctacagtgaaacatttggccatggattagaatcagagacagcagaatgaactcatgtttagcttaatgtactgatgggtaaatgtggaagtagttataggtatatgtgtatatttgggtcagtgtacatacatctatttcctagctcagtctactaaaacagcctagaagcagtgacaccctgtagcaataagcacacccagcctccagatctcttgtaaaaggaataagggtctttggagatatggctgattgtagaatatatgagatgagcctggagcatatggtaacgccaggaattaagaaagtgctaaacacacacacacaataatgagagtatgttaaagggacacaggcgccgactgaaagagcgtccaatggccaaatgaatggctggagcgatttaagcagcaacagaaaataatgtgatattgagttatgcccaaagggtgtctgggctgtacttggttactttcttctagagtacagtgaggaaaggggataaaaagtagttttaccatagataaacctggcaaagatgacctcagctgggcgaacagggccaacattaacagtgattgagtcatgttgagctatccttgatatgatgtggggagaatggtacctcacctctatggtcttcctcccaaaacctgtaagcccagtctaactacaagaaaaaaactataagaaaaatgtcaaaccaacccaaattgaggggcattctataaaatgtctagccagtacttctcgaaactgtcaaactcatcaaaacatcattttaggctgagaaaatgtcacagcccaaaagagaataaggagatatgaccactaaatggaatgtggtcatttggataagatcttgaaacagaaaagggacattaaggaaaaactaaggaaatgtgaacaaagtatggagttgagttactaataatgatgtatcaatactggtgaattagtcatgacaaatgtaccatagtagtatgagatgttaatagcaagagaaatgcctgaggagtgtgggcaaactctgtgctatactcttaagctcttttggaaacttttctataaatctaaaacttctaaagtaaaaaaagtatttatacatatatgtgtgtgtgtgtgtgtgtgtgtgtgtgtgtgtgtgtatatatatatatatatatatatatatatatatttttttttttttttttttttttttgagacaaagtcttgctctgtcgcccaggctggagtgcagtggcacgatcttggctcactgcaacctccgcctcccaggttcaagctattttcctgcctcagcctcctgagtacaggcgcccaccaccacacacggctaattttttgtatttttagtagagatggggtttcaccatgttagccaggatggtctcgatctcctgacctcgtgatccgcccgcctcagccttccaaaatgttgggattacaggcatgagacactgcgcctggcctatatatgtatttttaagtcagcactggtgccacccccacccacccacccaaaaatgacaaccaagaacagctttgcgacactgctcacctctccttatggctccgtacgtctcaccggtgctccaggcaggttgggcgtgatccctgtggctggtgtgggcagctgctgggaagcacaggcaggagctcagccgaatgtgtcagcacagcctcctcctccatcgccatctgtccagttaggtcagtcaagaaggccccagttttccacaatgacagtcagctcaaggttggcgttcaccctgagtgctaagggagattgttttctttttggcttgattacacttctctgaaacaaatggttcacttctcatggcttcagtgtgcttgttggccaaactccagtggctgtgctagttcactccagctgccataacaacatactacagactgggaggcttaaacaacagaaatgtatttctcacagctctggaggctgcaggttcacaatgaaggtgccggcagagtcggttcccccgaggtctccctctgtggcttgcagatggtcaccttctcgtggcctttcttctgtgcacacacagcctgtggtcctgtgtctttctgaatgcccaaacattgtcttcttttcaggaccccagtcacactgaatggagggctcaccctgaaggcctcgatgtaactgagtcacctctctaaaggccctacctccaaacacagccccattctgaggtactgaggctagggcttcaacatgtgagttgggggacatacaattccaatcataatggtggcatttacagctagtgagcaggtcgctgtgtggtccctgtgcttgttggctggtggcattcacatgccacccttgattggccaggcaggcaaggggccacctgggctgctgcggccagcgcactcctcacatcttcagtgaacagcgaccttgggaagaaacagagcccagatcttcttttaaaataatcgacaatactgtcttattcacgggagttattgaacagacatagagggctcttaggactgaagactattgtattagtccattcttgcacttctataaggaaatacctgagactgggtaatttataaagaagagggcctgggccaggcacagtggctcacgcctgtaatcccagcactttgggaggccgaggcgggcagatcatctgagatcaggagtttgagacccgcctggccaacatggtgaaaccccgtctctacaaaaatacaaaaattagctaggtgcagtggtgggcacctgtagtcccagctacttgggaggctgaggcaggagaaccacttgaacccgggaggcgaaggttgcagtgagccgagatcgcgccactgcgctccagcctaggtgacggagggagactctgtcccagaaagaaagaaaggaaggaagaaaggaaggaaggaagtaaggaaggaaggaaggaaggaaggaaggaaggaaggaaggaaggaagggaaggaaggagaaagaaggaaggaaggaaagaaggaaagaaagaaaagaaaagaaaagaaaagaaaagagactattggctcagggttgtgcaggctgtacaggaagcatgaccccttctgtttctggggacgccttagggagcttcaatcatggcagaaggcaaagggggagcaggagcagcacatggctggagcagcaagagtgtgggcgaaggtgctgcacacttttaaacaaccacagatctcgtgagaactgtatcatgagaatagcatcaatgtggatggtactgaaccattcatgagaaatcacccctgtgatcaaatcacctcctaccaggccccacctccaacactggggattacaattagacatgaggtttggtcaggaacacagacccaaaccatgtcagctatccacaaaggttgccttttctactagtctaagaagtcagcgactcaggcagggtgctgccctgagctcccgtctacactgcctcccaggtgcaggccactgttgagcactaagcacctgctgactgcactgccctccactgcactggattcacagcggcctctccatcttcaaccccggcccatttgttttgaaaatctatatagtcccctgaacatttttaaacagcagccccaacttccttttatctcaagaatgtctaaatggttgtaaaggatatactcacccgtgtatcctaaaaattaatattttaaaacaaaaagtgaatatcatgcttctaaatttattcaacagaatcgaagcaccatagcactttggtggccattgtccgattctaaaaagcaagcaaacaagcacttgtttcctttttcattgtttctttttcttcctccacttccttgacaagactctattataaagtcatatcttctaattgctctccgtctcacaggcattctcaggcagttttagagtagagacccatggagactgaccgcctgggcccaccccggggaggtgtgcattggttggtactggtcagcatccggcaggtggctgcaagcccaggcgacagaaaagtctggtcaggactccccgcggtgaggttaaggcaaagaaccagaagaaaaggcaccgtggtgcggggaggcggtgtgccaggcgcggtggcttgcacctgtaatgccagcactttgggaggccgaggtgggtagatcacgaggtcaggagatcgagaccatcccggccaacatggtgaaactctgcctctcctaaaaatacaaaaatttagccgggcatggtggcgcgtgcccgtaatcccagctactcaggaggctgaggcaggaaaatcacttgaacccagtaggcagaggctgcagtgagccaagatcgcgccactgcactccagtctgggtgacagagggagactctgtcccaaaataaacaaacaaacaaacaaacaaacaaacattaaaaaaataaaagagaaagaaaaggcacggtggggggcactagtttcaggcagaaataaacttggagaggagggcagagaaggactggcacaggggtggtgctcctgccatgggcagaagacagcatcatgggagaggacgggaagagccagcctcaggatgctggtagaaaacggacagaaggaagcctagttctaaacggcatcttgtctggggcaccccgtggctgtgttcgcatgtgtgtttctgtgctcacggagaatgaagatagagatggtgctgcgcttttacagtgaatatctggtaactggggagaaaaacctgaaggtatatttcctaagaagcaagagtatttaagcaatttaaatttagaaggaggaaatgataacaagaacacgaggtgatggtcagtgggttaattacaatataggcgctgagcaaattcaatttctggaggcaaacagttgctgccttggagggagctgacaaatattctatagcaaacagtgacaaataaatttcctgtaacaatcatgcagggtttcatggatacaagttagaggccatggaacctgagtatacatgtaataataatcgttattaccagggacttccccatccttccagcaagacatccggcctgtatatcaactttacgatggcaggatgggaaaaacattaaaattgatgtcaaataggtccctcaccccacgaattaatacttgtacatttcttaaaatagtgcctaacttataataaatactgtataagagtttgttaaataagacacaattatacgataaaatatttaaaggataaactttttatccctgtgcctttatagcaactaatcaatattccccaccctgtacttattaaagagggctggtgatttgggctgaattgtgttcccccaaaatcataggtggaagccctaactcccaatgtgactgtatttgggttgttttgttttgttttgtttttgagacagagtctcgctctgtcacccagactggagagcagtggcccgatctcggctcactgcaagctctgcctcctgggttcacgccattctcctgccttagcctcccaagtagctgggactataggcgcccaccaccatgcccagctaatttttttgtatttttttagtacagacggggtttcaccgtgttagccaggatggtctcgatctcctgacctcataatctgctccccttggcctcccaaagtgctcagattacaggcatgagccactgtgcccggtctgtttatagctgtttgtatatagccgttcatagctggtcacttttttttttttttttaagacaaggtctcaccttgtcacccacactggagtgcagtggtataatcacagctcattgcagcctcgacttcctgggctcagctgattctcccacctcagcctcccaagtagctgggaccacaggtgcacaccaccatgcctgggtaatttttgtattttttgtagcgatggggttttgccatgttgcccaagctggtctcaaactcctgggctcaagtgatccacccacctcaacctcccaagctggtcacattctgtgacacatgattattatgtattattgtgtgtacatacctatgagctccctgggagaaaggtaagtgtcctaaaactcctggcatattgcatcaggctgagatgctgcccaagaaatggatgctggatgtctgcacaggtggatggataggtggatggatggatggatgagtggatgtatggatggatagatgggtaggtgggtaaatggatggatagatggatgggtgaatggatggatgagtgagtggatggatgaatgaatgggtggatgagtgggtgggtggatggatggatggatggatagtattagagaaatctaacttgagttccttgggtatgcccatcagaagcacaactagaggatcccagcccaatcctcaaggggaatccctggcactttgctcatacatctttttctcccatcaataagatggaacaggtttttctggccttctggaagccctaagccattgtaaggggcctccctcaattcctgccatcctcaggcttgagtaacgacagcagtgactcagggtcagggtgacagggagagggtataggaagtaaatcatctcataagttactgtctacacttgcacacagatccctaggtttctctgaggacagcataaacttcattaataaaggctgatcatccacacccactgctacgatccagggatgaatgatcaagtatcaaacaatatggaaaggggctggtgctgagggagggaagagagctcctaagggttccaggaacttcccggccagaagcacaagtgcaaaagacctcaaggctcattggacagagcaggcccttggagcctggagcagggcctgccttctctgactctgactttctttacacactgagcttggcctgaaagcagagaagatgagaagaaaagggtgagaagaataaggagctgtgttttatggaaactctcatctaggaataactaccactccctcttttactgagcatcacgtgcctggcccagagcatgcacttgctgtctcttagcaactgccttgcaaggtagctgttcttagctccattttgggctcagagattgtggaacatagctcactgacatgctccaacatctgactcttcctccagccaaggaacatgccagctggtcacccggccacagtggatgcttcagccccagcctgataccacaggaattaggtggaggcctggatccacctctgcctgtacttaggtaacagggaagaaaaagtcctcacatgagtccatggtcaacctctgggagcactgaggaggcaagcctgcggtgtgtcttccctggtgcctcacactggttcctctgcgtccctccggctcccgtgcgtgcattctcccatacgtgcagtctctctgacatgctgagtcctcacagcttcccctcaggctcaaagtggtagagtgtcaggcttcataaatgctcagcgccactgcccagggtggcacatgccactcaggaggcaggtgacacttgtcccctcatggtgaatggccagcaaacagcacactgagagggaagctggacaacaagctctgaccaccaatcaagacaagagttgttcctggggaattcccaagacacagaattggcagcgaatgcctgtttactgccacttggactccttaacagtcacctctggccatgtggaacttgtttactaagtgggcttaccaggtaaaagcaagcaagccctgcagtggaggaggtgctcatcacccaactgtcacgtggacctcaggagggcctgctgactccggggctgctcagagaggatgttatgttcctcaaaagtacgggtcatgtgtgggagcctgtctcagccagacacagcagtcagcaggcctgtggccaggccacaggaacccctgcacctgccccatgctctcctgggctgctgcacaggcagctaatattttaataatagttttattgagatataatttacatgtcatacaattcacccctttttaaaaattagcatcctcttgaataccaaaaaaatcacccttttaaagtggataatttaatggctttagtctagccacagaattgagcatccctcccagttagttcttttatgtaattttagaacattttcatcccctctaaaaaaaacaaaaacaaaaacaaaacacccatactccccattctttcttcccccagcctctagcaaccactaatctattttctgcctctatagatttgcctattctgagcatttcatacaaatggaattatacaatagatactcttttgtgaccatcttccttcagcgagtgtaatattttcaagattcacctatgttgcatgtgtcgctaattcattatgttttatggctggataatattctactttatagacatgtcacactttatttatccattcataaactgatggacatttgagttgtttccactttttgactattatgtatcatgctgctatgaatattcatgtataagtttttgtgcgaacatatgctttcatttctcttggctttatacatataagtggaatcactaggccaaatggtaactctttaatattttcaggaactgctgaagtgttttctaaaacagccacagcattgtacttttccaccagcagtgtacgaagtttccaatttctttaaatcctctcaaacacttatgctggccatgctggtgggtgtgaaatgctatctcattgggattttgatttgtatttccctaatgactatggtgttgtgcgtattgaccacttgaagaaatgcttattcaaacctttgcctggtttttcactgagaattttgtcttcttactgctgaattttaagagtttttaaaaatatgtgttggttactagactctcatcagatacatattttgcaaatatttttctcattttgtgggttatcttttcactttattgatggtgttctttgatgaacaaaaactttcgatttgatgacattcagtgtatctgtttttttcttttgttgcctatgctttgggtgccatatataagaaaccattgcttaacccaagttcatgaagatttactcctatattttctaagagtttgatagttttaggtctcgcattgatgtctatgatccatttagagggaatttttgtatatggtctgaggtagggtatgacattattcttttgcttgtggacatccattgtcccagcaccatttattgaaaagaatattctttccttcattgaattgtctttgcccacttgtcaaaaattactttaccataattgtgaaggtttctatttgaacctttggttccatttgattccatttatcttgtgtctctccctataccattaacacactatcttgattactacagctttgtagtaggtttgtaatagggaggtatgaattttctttcaaaattgttttggctattctgggtccctaactttccacatgaacttcatgttcaacttgtcaatttcttcgaaaaagctagcagagattttgatagggattgtgatgaatctatagatcagtttggagagtatttccatcttaacaacattaagtgttccaattcacgaacataagatgtccttccatttatttctctttaatttcttccaaccatgttttagagttgtcagtgtacaagtgttgcacttcttttattaatttatctttaaatattttcttctttttgatgctgggcagtacatttttaaggaaaagaagtagtagacactgggactgaaggctgtaaggaagcacttcactccattgccaagctgctctcctcttccaggtgatggacagagaacagggctttgcacattgtcagatactctccactggagccatttagagggtgtcaaataatatgttattatggtttcacttggcatttctctgtgactaatgaggcaaagcatctttttaggtacttcctgcccatccacacttcctcatctgtgaaatgctttttcatgtctttgatccatttttttaatattcttattgatttttgtaaattctttatgcattctggatactaatttactattttcttcctatctatgggttttctttttgtttttgtttgtttgttttgttttgttttgagacagtctcgctctgtcaccaggctggagtgcagtggcacgatcttggctcactgcaacctctgactccctggttcaggtgattctcctgcctcagcctcccaagtagctgggattacaggcatgcatcactatgcccagctaattttttttttttttttttttttgagacggagtctcgctctgtagcccaggctggagtgcagtggcgcgatctcggctcaccggaaggtctacctcctaggttcatgccattctcctgcctcagcctcccaagtagctgggaatacaggcgcccgccaccacgcccggctaattttttgtattttcagtagagatggggtttcacagtggtagctaggatggtctcgatctcctgacctcatgatccacccacctctgcctcccaaagtgctgggattacaagcatgagccaccacgtccggcccgcccagctaatttttgtatttttagtagacacagggtgttggccaggatggtctcgatctcctgacctcgtgattcgcccacctcagcctctcaaagtgctgggattacaggcgtgagccactgcgtccggccatctttttgttttttcatcaatatttttgtatatgatttgtgcttttgtgtcttgctaatgaaatccttactcactgcaaatttataaatatagcctcctaccatttcttccggcagtttcaaatgtggtttgttacacttaggtctttaacccacatgcaatttatttttgttcatgatttaaagcaaagatccaactctacttgattttctaaatggataaccaattgttccagaaaattgatttaccggcccatactttccccatggatctgcaagctctgtcacaaaccaagtctcactatgtgggaggggctgctactgggatttggttccttggtcagttttttccctgtgccagtacattctgccttaattatgacatcttgaatatctgttgggcaatgcttaccatcttgttctttatttttataatggtcatagctcatcactcttccatataaattatagaatcagtttgacaagtctccccctaaaagctgctcagattttagtagaattgcaggaaagtgcatgaatttgaagataattgacattttttcacatatattgctccatttatataaactttctttaatggctttcttttcagttttgccattttctctatgaaggactgcatccattttactttttattcatagaaaccttatgtatttcattgctattataagtgaaattttgaaaatacatattctaagtttttcttgctagggcattttcattttaggagggctcaaaccccacagtgtggaagagaaccactggcttgtgtggtctggcagctctgcctcccactgcactgggagccccacggtcaggctatcctcaacccagcaactccctgtccttgcctgcttagcagccaggggccatctcagaacagcctgactgctggctcatctgactgtggctggttacacttcctgttgggtcattgattcagtgtgaggacaacagctccaagaggcctctgggtgctataaactgaccaggaggtgaatggcagggtttcctgacagcaggagagattcgggaaagacagtgtggtcagagccacccaggagtaacctacaggccaagggacagagcaagtgtgccatggggccaagtgtctatgacagcatgccctccttccttctctgagcagggggctagggtcaccaaatcagctgcccaggactgagaagtttatccagatgaaggacttacagggctaaaattgggaaatcccaggcaaactgggacctgctgataaccccacaacaaacatgagctgaacaagatgagtccacagaaccagctacaaaatttgtgcaaagcctcacatactgggaccatttgtgataacccaggccccatcctatgcagccagccggtcccacctgtccctgctctccagaagtgtgacagctcatgggcatgggtgggaacagtgtaagccccacatccagatgaaaggaaggaggactgctagaagagcagttccccatagagatggcccatcgattcctgcagcatgtcctgctggaacctccgctggctcccattccctcagtctctgaattggtctaccctttcttccaagtccttccctccagggcccaggcccatctctccattgtgtaggccagtggttctcacacttaacaaaagcaccagaagaatatatgacagaggctgtatgcagtgactcaacaccattgcagtcccaccccagagcgtggggagagccaggctgcagggtgcaaagccccaggccacttcctgctgactgtggctgccagaccactcaaagccctcggccttccacagccttctcctctgtcacctctgcaggtgtgcttgcctctgtccccctcccactctgcattcctgagctctgcagggccctgtatcctcttacaagggagtcatgcatgggaaatagacccttccagcctccagggccctgagagccatgcgttttctttctttcttttctttttttctttctttttttttttttttttttttttttgagacggagtctcgctctgtcacccaggctggagtgcaatggcactatcttggctcactgtaagctccgcctcccgggttcacgccattctcctgcctcagccttccgagtagctgggactacaggcgcccgccaccacgcccggctaatttttttgtattttttagtagaaacggggtttcaccatgttagccaggatggtctcgatttcctgacctcgtgaccctcccgtctcggcctcccaaagtgctgggattacaggcgtgagccactgcacttggcccattttcattgattaactgtctgctggggaccctggctagacccgactctgggggctttttctttctttttcctttttccagacagagttttgctcttgtcgcccaggctggagtgcagtggctcgatctcggctcactgcaacctccgcctcccgagttcacgcgattctcctgtctcagcctccggagtagctgggattacaggcgcacgccaccacacccagcaaattttcgtatttttagtagagacggggtttcaccatgttggccaggctggtctcgaactcctgacctcaggtgatctgcctgcctcagcctcccaaagtgcttggattacgggcttgagccaccgcgcggggcctctttgggggcttttcataagggtgtgtagaatgtcagtaagaggctgcttcttcagagccctcttcgtgctacataagccgggcagggtggatagaagtgggtctcttgctgcctgtggccctgaaacccagccacggggcggggcctgacttcttagcgcagtccccctgccgcgtggaggaccctgctctccggcccagcatagagcgactccctcctgccagcagggggcgcgcggagctgtctctccggaggctcccggcggctcagtctcggaacccgcagccgggagcgcagggcgggccacacagggcgccagcacctcccacgagctccgcgggcctcgcatccggaagacgccccggctgaccgcgcgaatggctcgcgctgccgcggacacccgcctgccagggacggggcctctctcctgggccgtttcatctcaccgagagcgagatccgctttcctagaggctgggaggaccaggcccgggcacaggactggcttcgcaccactggccccgcagtcgggtccccggggacgcgccacgggtcactgctgcctgctaaagcgacacaaggcgccttcattcctcaggccgaggcggccgaacgccttggctctggccgacagtgagcacccactgcgagtccgcacacactgcagcgcccccgggcacgccccgcagtccgcccagcgtcccccggggcggggcacagccagaggacggcccgagagccctgctgtccccgtcagcgccgcaggagggcgcgacttccccgctgggccgaggcctttgccgggccctctactgtacgccggtcctagggctgggaccgccgtcctggaccgacctcagcccactgttctgcggaggccgcgtgttgggcgacagcagccacccagcccggaagcagccgttccgagcgcaggggcgccaagagccccgcgccccgcctgtgcgccggccctgagacttggaacgatggtgcaggcaggaggggtcaccggtagggatgccactggagggactgggccgtccacacggaccagctgacacactaagtgctgggtacacagcaggacaatggcaagggctgctcagactgcgtttttaaaatcgcctcaccacgaaagacagaaagtagggaagggtaccttgctgtggccaaggccgccctcgctgagtcagctggcattcccacgactccacgagtccccaaagggcttgtcagagcccagcggcaccctcgccctggaagtgccctgcgtcctcctcaagagccttatttgggacagagatcagatcaaccgcgccaccaccctcccacccaccttccacatgtgatagggtcgcaggaatggggagcctcgcagaggcgcggcggcagctctcgcctgccagtgacagcccacctcccactttaaaacaggacgttccgagtcctggttccacatgttcaaaaggccgtggcatgggggagtgggcctacacctgagctttggctgcgaaaacactcatttcaaggatagctgctaggcgctgccttcccccatccccctgctgttggcccccatccaagcatctccagcctctgccaggccctgcccccttccccgccctctatggccctgaagtgggagccggctcagggctgcaggctgcctgctcagcgccggcactcgcaggcccatccctgctgtgagcaaacagaccagtagcatccctgagacagagatggacaccactcctgggtaggagggcaggctatggacatccgttgctggaaaagctgggaagagggctggcagtggagacgcttcaggtgcaccgtgtggacagacaaggttgcaagtgatgctggtcctcaaggtatcaggtgtgagtcatcccaaaaggaccctgcctaagagggtggcctgtcaagaggagccttctgggggcacagcagggccaggagttgagacataggaggttgcccagaaagtgtgggatgcagcttaggcaaagtgcagagggtgagccccatatctcccaaaagaagaccacagatgccctagcctctctcccccacgccctgtcagggccaccatgagggatgaccctctgtagccacagggttgaaactgctgaaaatcaaacacaagtcctcaccatgtgactggctgaattacagcaaaagctgaactcccagcctcccaggatgtctactattaaagtgagggtattgattgggagaggatgacaacctgtaaattgggatgggggtgtatgggaatatcctgatgaaactgggagacattgagctcctaaattctgatgaattctctttgcccacgggagttgtcttcccatccacagcaaaactagcctccccatccccaggggaagcagccttcacacccttcgtggtgttggccttggcctgaggagattaaccctgcattgctggaggaaatgataaagacctcccctgaggcagttgtcatgcaagacaatgctgagtttccttaggacccacctgtctttactagacctataactagactcaaggcccagcaggcccccaaaggtgaggacatagcaggacccaggaggaggtgtgccacaatccaaaagaactacttgagttttctaattcatacaggcagaaatccagtaaatgtgtggaaatggatcttaaggatccattaaacatgcaggataatggtggaaagaccataaagtcggatcaggccaaatgtattgatgtgggcccactaagcagagattctgcactgaatgctgcagccctgggcgtgtaaaaaagacctaatagtttagttggttaggggaaacagattaaaaggcggcctacaatgagcaagttggaggtgccagatatcccttgttttaatgtagaggaagggaattgaagagattggaattagagtagatttgccattttagacatacttacccacactagtccagacacacctttcaccaatattgtaagaaatgggtttgtgaggggagccccagcatccttcaagagctgtttcattgcttttctctctgggcagaccttacagtgggaaccacagtcactcaattggaaaattaaatgcaatgacagcaactgatctcagggtgggaggagccaagaggggaactcaaccacctaagacaaggtgggtgtgactaccataatggacagaagagacaaagtaacaatcagaatagtctgacttgtgtgaatatgtgatgttggatagttgattatggcgttcctagaagtgaaatagataggaagcttgtactgaagtcaacattaaaaggtagagacaaatctctaaatataacattttatttgggatataagaattgcaatttgggtcatacacacagaccaggtgtttttcagtatgtccaaagaacaaagagcaggttggggattttatagaatagaggaatgttgctcgtggtcttgagagaaagtttatttgtattagtaaagctttgggactagcaagctgattggtgaacgatagcagtggacacaatgagccctacattggcggcaagatattccacaagctatagacaaaactggtctcaggttacaatagacagttttggctgctggacttgcagaaaattgcatttctgaagcgatgttataaatcctgagtgtttttccctccttggccctcaactcagatttaattgggtgtgacaagaatcacacatttatgatcaactttcatacctattaaattcttaatctgtataagcagaaaacttccaggtcgagttaacaaaaatcttacttgaatcatgaaaatagaacatcatggtccatgcaggggaagcacagtcccctccagaaaggatcctgtatgctatcaaaaacctctactgttaatctttctctcagccttccctagagagacctttgaccttttaccagggtcattgtgtactaggaaaaagaaaataatcagacctctcaggcactctgggacactggctctgaactgacattcattccagaagaccagaagcatccctgtggccctccaggggcttacggaggtcaggtggtcaagggagttttagctcaggtccatctcacagtgggcccattgggtccccaggctcagtctatgcggttatttcctaagttccagaatgcataattggaacatactgtcatgtgtcactcaccgaacggtggggatacagtctgagaagtgcatcattaggtaatttagtctttgtacaagcatcatagagcatacttacacaaatctagatggtatagcctcctccatactaggctatataggatagcctattgctcctaggctataaacctatatagcaggttactgtactaaatactgtaggcaactgtagcacaatggtatttgtgtatctaaacatagaaaaggtacagcaggccgggcgcggtggctcgtgcctgtaatcccagcactttgagaggccgaggcaggtggatcacctgagatcaggagttcgagaccagtctggccaatatggtgaaatcctatctctactaaaaatacaaaaattatctgggcgtggtgggtggtgggtgcccgtagtcccagctactcagaagactgaagcaggggaatcacttgaacccaggaggtagagtttgcagtgagccaagattgcgccactgcactccagcctgggcgacagagtgagaccccatctcaaaaaaaaaggaaagaaaaaagaaaaggtagagcaaaagtatggtattataatcttatgggaccaccatcatatatgctatccaccattgagcgaaatgttatgtgatacgtggctgtacttagtagctagcagagtaccatgttggttccctgaggactcttctgataggcaaatccaaatgaaagccactgaagctgcctttgcctaagaaaaccaaaagcattgctgcattctagagagactgcagagattcggagattagcaccagcatcaaggacttaaaagatacaggagtggtgattcccaccacatccccattcaaccctcctatctggcctgtgctaaagagagatagatctcagacaatgacagtggcttcttgtaagcttaaccaagtggtgactcctattgcaattgttgtaccagctgtggtttcactgcttcagcaaattaacacagtaagcagctattgatctgacaaatgcctttttctccatgtctttctgtaaggttcaccagaagcagtttgctttcagctggcaaggccagcactacccctccactgtcctacctcagaagtatgtcaactctacaaccctatgttataaattagattgcagggatctcaatttcttttccctcctgcaagatagcacactggtctatcatgacactgatgacctagtgctgactggaccataagtgagaaatagcaactactcttaacttactggtgagatatttgtgtgtcagaggctgagagagaactctaactgaaattcagggatcttctacctcagtgaaatttctgggggtccagaaaatgttgaaaatatcctttttctcttttttaaaactatctggagatatgaaatatcctttctaaggtgaagaaagaatacatgattgcatgtggcccctcttacaaactagaaaaagacacaattactagcgggcctacttggattttggaggcaacatattcctcatttgggtgtgttactacagcccatttattgagtgacctgaaaagcggctagttctgagtggggcccagaacaggagaaggcgctgcaacaggtccaagctgctgtgcaggctgctttgccacttgagccatgtgacccagcagatctagtggtgctcaaggtggcagtggcagacagggatgctatttggagcccccataggtgacccaaagtgcaagctcttagaattttaaagcaaaatcctgccatcctctgtggatctttttgagagacagctcttggcctgctaccgggccttagcagacactaaacacttaatcatgggtaaaccagtcaccatgtgagctgagatgcccgttatgaactgggtgttatgtgatccaacaagccatacagttgagcaggcatagcaacactccattatcaagtggaagtggtctatacatgactgggcctgagcaggctctgaagacacaagcaagttacatgaaaaagtggctgaagtgcacatggtccccctgcctgctgcactgccttttctctctcagtcttcacctatggcctcatggacgttcacatgcaaaataatgaaatcaggccctctccttacactagatacaaaaataacccaaaatggattaaatacctaaatgcaaagtatttactttaaggctgggtgcagtggctcacgcctgtaatcacagcactttgggaggccaaggtgggcagattacctgaggtcaggagttcaagaccagcctggtcaatatggtaataccccatctctactaaagatacaaaaattagctgggcatggtggcacaagcctgtagttccagctactcaggaagctgaggcagaagaatcacttgaacccgggaggcagagattgcagtgagccaagatcgtgccattgcattccagcctgggcaacagagagagactctctctcaaaaaaaaaaaaaaaaagtatttaccttagaactataaaactcctagaagaaaatatagggaaaaatctttatgacattggatttggcaatgatttcttagatatgataccaaaagcccaggcaacaaaagaaacagataataaatcaattgaactttatcaaaattaaaaacttttatggctgggcacggtggttcacgcctgtaatcccagcactttgggaggccgaggtgggtggatcatgaggtcaagagatcaagaccatcctggctaacacagtgaaaccccgtctctactaacaatacaaaaaattagctgggcatggtggcgggcacctgtagtcccagctgctcgggaggctgaggcaggagaatggcgtgaacctccgggaggcggagcttgcagtgagccgagattgcgccactgcactccagcctgggtgacagagagagagcaagactccgtctcaaaaaaaaaaaaaaaaaaaaacaacttttatgtatcaaagtacactatcaataggataaaaaggtaactcatagaataggagaaaatatttgcaaatcatatatctgataaggggttattatccagaatatatatttttaaaactcctacatttcaacaataaaaaaaaaggtcaagccagctcaaaaatggacaaaggaggccaggtgcggtggctcacgcctgtaatcctagcactttgggaggctgagggggtcggatcacctgggctcaggagttcaagaccagcttggccaacatggtgaaaccccatctctactaaaaatacaaaaattagctgggcgtggtggcaggtgcctgtagtcccagcaacttgggaggctgaggcaggaaaattgcttgaacccgggaggcagaggttgcagtgagccaagattgtaccactgtactctagtctgggcgacagagcaagactctgtctcaagaagaaaaatggacaaaggactggaatagacatttctctaaaaatatatgcaaatgacatataagcatatgaaaagatgctcaacatcacttacagaaatacaaatcaaaatcacaatgagataccatttcacacccattaggatagttactatcaaaattgtgtagccactatgggaaatagcatggagggttcctcaaaaaagtaaaagtagaattaccatatgatccagcaaactcacttctgggtatacatccaaaagaactgaaaacaagatctcaaagcgatatctacacacccacgttcattgcaatgctattcacaatacccagggggtggaggcaactcagtgtttttcaacagataaatggataaagtagacagagagagagagacagatggagagagtgtgtgtgtgtgtgtgtgtgtgttattcagttttgttgttgttgttgttttgttttttgtttttttaagatggagtctcgctctgtcgcccaggcctggagtgcagtggtgccatctcagcttactgcaacctccgcctcccgggttcaagcaattctcctgcctcagcctcccgagtagttgggattacaggcacatgccaccacgcccagctaatttttgcatttttagtagagatggagtttcaccatgttggccaggctggtctggaactcctgaactaggtaggtggatcacctacctaggcctcccaaagtgctgggattacagacgtgagcgccactgtgcccagtcatattattcagtttttaaaaagaaggatgtcacacactacagcatgggtaaaccttgaggacagtaggctacttgaaacaagccaatcatgaaatgacaaatacagtatgatttcattcatatgaagtccctacagtcaccaaattcatagagacaaaaagaatgatgataaccaagggacacggggaggagaaaggggagttgttcaatgggtacagagtttcaattttgcaagatgaaaatgttctggagatgttctacaacagtgtggatacagttaccactactgaactgcacacctaaaaatagttcagatgataaactttatgttaagaatttttttaccttaatttaaaatttttaaaagaccacatattgaattattccacttatatgaaatgtccagaattgggcaaatccatgaagacagaaagtggattggtgatttcctagggctggggaaaaggggaagtttggggtgattcctaatgagcatgaaggtttttgggaggagattaaaatattctaaaattggattatggtgatggttgtataagcctgaatagattagaaaccatcgacgtacacaatgttttaaaaggtgaattgtgtggtatgttaattaagtctctatgaaaccccttaataaggggtaggatgtgggcagtgagcccaggaaatggaagccagaggaagcagaggggtgccggcagccacagccaggcaggtgccagagagagcttggagttgattagcagggacatggacacatcttgctttttctgtgtggtataacctactgttctgcttcctcaccaacacttcagtgaagtccacattgcttgcaaatgctttgagttgctactgtgcttgcgtttcagatggacccctactgagtctgatcccactgagaccctgtgaccttctgggtctccatgcctcctgctgggtctggcacttgcaggcgctcggcaatgttactccattggaagcgtgaataaatgagtgaacaaacaaagaaaaagacagattgccatttctttttttttttttttttttttttgagatggagtctcgctctgtctctcaggctggagtgcagtggcgcgatctcggctcactgcaagctccgcctcccgggttcacgccatcctcctgcctcagcctcccgagtagctgggactacaggcgcccaccaccacgcccagctaattttttgtatttttagtagagatggggtttcaccatgttagccaggatggtctcgatctcctgacctcgtgatccacccacctcggcctcccaaagtgctgggattacaggcgtgagccactgtgcccggcccagattaccatttcttaacttttcccatttctcctccagagtctgcctggaggctgaggtcacctttcccaggggcttggcactccagtgagaagggaatacctggccatcaagcacccacctgtgctagacatcttgctagctgctttacctattttttcatttaatactcacaacaataaattatgcaagatggtcactcttatcacctcatgtacaaattgagagagtttaagtgacttgcctagagccacatagcaaggaagtggctatccatgaacaactgagaccactctgctccagagctttccaccccactccagtgtgacctcaagcccctcaaaccttcacgtataagtctctaacagtggaagtttaggccctggtggggatgagagtgtatgagacaatacctctctctgcctggaaacccatctcatcttgtgttccatcgtgaagactagggaagtgctgggagcattcttccagtgctaaagtgggtggaagaaagggctgccttctctgctgaggacaggtctagtcaggatctcagaggagccaagaggacactcccagacacaatcaccctcagcctgcactggctggcagccaggagaggctatggctgactgcaccaaggctggcctcacccaggcaggcctagccaggagggagggtccctgcaagcacccacagcctggccctgggaggaactgggctctcttggttggggcacagggaatccactcccctatagctcccagaattatccccatttctagacaagccccgccccccaactgacacacacgtgagaccctgctgaaagcatgcactgccacacccatattttatgtaacacactcgtcacatgtgcagcgcatatgcggccactgtcttacgcatggaccgagagctgcatttaaaactcaactcaaactattgcaagaaaagtaaggctttggtggaaactgaatgtgatggtgcctgacagacagccccagtttgcactagcccccacctgcaaaagaactgggctgggctctgggttgggaaagaggagtaaagcagaagagagccaggaggaggtggcaggaggcacacgcttcccccacgtcgcacttgggagaggagtgctctggcgcctctgggaagaaactcctcggtgctccccagggaagcctcccctgggtcgagagtgccctggggaggaggatgggcctccccagggtgttctctgcctgttccccgctctcccagcacattcccaagatccacacacccacctctcttctctgcaccctgaggatgcactgatagccacagcgagcctgtttctagtgggaacagagagctgaaggtggaaaagaaagagaagcataacccagccttccccgcagtgttccgaaaggttctggagcaggttttcttcctggtgtcctggctcacagacttgttttgtcttgttttccccatgggtttatcctggcagcctctgctggtcttgaacttgtccccgatccctgctgcctcctggctgctggccagcccttctgcggttcgtagcccaccacaaactcagttcagaaccactctgcctctgcagatcactcctggataagacattggcacttcctcaaaatgctaaacacagataccatatggccagcaatcctactctgggtatatccaagaaaaatgaaaatatgtccatgcaaaacccggtacacaaatgctcataacagtattagtcataatagccaaaaggtggaaacagcccaaatgtccatcaagtgatgaatggataaacaaaatgcggtatgtccaaacaatggaatattattcagcaattaaaacaaatcaagtcctgacacatacttctcactggaggcaaagtctaaaggccttgcaatgcctacagttccttgcgtgatctcttacaagcacttgtctgcgtctcaggcccaggcccctggcttactcccttgtagccaaactggacatggcaggcaattgcgacaccaggtttctcacgctggctatccctcttcctggaatgttcttcccctaggacctttatgactcactctctcacctactacttgccgaaaaataaagctgaccttcccttccctcctatgtagggaggtgctctccagctagcaaaaaatacagacagcaagcaatgtcttcagagcacaaatttgtaatgtcagaaattgaaaaatacaactagagtaaatcagtcccctagtgtactgagtccccgtgtacctcaccaaatttatttttgtaaatctacaaaccttttctatgcatctaaagagaatatattttaaatacatgacagcagctacccttgagctgagggaatagggatgggtattcaggataaaagggaaagtaatacataaaataatttaaaataaaataattcataataatttgttgttgttgttgttgtttgagacggagtctcgctctgtggccagtctggagtgcaatggcgctatctcggctcactgcaacctccgcctcccagattcaagcaattctcctgcctcagcctcccgagtagctgggactacaggcatgcaccaccacatccagctaattttttttttttttttgagacggagttttgctcttgttgcccaggctggagtgcaatggtgcaatcttggctcactgcaacctctgcatcctaggttcaagtgattctcctgcctcagcctcctaagttcatgggattacaagcacccgccaacacgcccagctaatttgtatgtgtgtgtgtgtttatttttagtagagacggggtttcaccatgttggccaggctagtcttgaactcctgacctcacgtgatccacctgccttggcctctcagagtgctgggattacaggcgtgagccactgcatccggccaatttttgtatttttttagtagagacggggtttcaccatgttagccaggatggtctcgatctctttacctcatgatctgcccgcctcggcctcccaaaatgctgggattacaggagtgagccaccgtgccttgccaattcataataatttaaattaaatggagaaaaaaataagagagggttctcgtcacattgatggtagtagtctgtgcccctgaactgagaagtgtgaataattcaactccctgcatcccaagtgccccgcctccgccccccgccaataaaaagatgaacaaggaacaggaaagacactgctgaacatcaaattactcctaaaggaaggatttaagatacagatgaaaacgacggaaaaaaatctttccaaactaatctatgctctcattacagcatccatagttaccaagctataatgagtgcctaggacatacattcacttggagtggcaggagttaaggagagagaaaatgggcctggcctctccaggtctggatcactgcgccgccaggagctccccacctttgtcccccgctgttgccacacgggagcccccgaggcagtgctctgccaggtgagaggacagacagagaatgtgtgagaaggggtgagaggggagtaagaagggcagcctggggtttcactatgtcggccaggcttgacagcagagaaggtagccctttcttccacccacttctctcctgttaatagtcgccattctgactggcatgagatggtatctcattgtggttttgatttgcatttctctaatgatcagtgatgttgagccttttttcatgctggccaaatgaatgtcttcttttgagaagtgtctgtttatgttgtttgcccactttctaatggggttgttttttttcttgtaaatttgtttaagttccttgtagattctggatattagacctttgccagatggatagattgcaaaaaatttctcccattctgtaggatgtctgttcactctgatgatagtttcttttgctgtgcagaagctgtttagtttaattagaccccatttgtcaatttttgcttttgttgtaattgcttttgacgttttcatcgtgaaatttttgcctgtgcctatgtcctgaatggtactgcctagattttcttctagggtttttatagttttggcttttacatttaagtctttaatccatcttgagttaatttttgtataaggtgtaaagaaggggtccagtttcaatctcctacatatagctagccagttctcccagcaccatttattaaatagggaatccattccctgttgcttgtttttgtcaggtatgtcaaagatcagatggttgtagatatgtgatcttatttctgagttctctattctgttccattggtgtatgtgtctgtttttgtaccggtaccatgctgttttggttactgtagccttgtagttcatggcacagcctgggagttcattcatgatttggctctctgttggtctcttactggtgtataggaatgcttgtgacttttgcacattgattttgtatcctgagactttgctgaagttgcttataagcttaagaagctttggggctgagaggatggggttttctagagataggatcatgtcacctgcaaacagagacagtttgacttcctctctttcctatttgaataccatttatttctttctcttgcttgattgccctggccagaacttccaataccatgttgaataggactggtgagagagggcagccttgtcttgtgctggtttcaaggggaatgcttccagcttttgcccattcagtatgctattggctgtgggtttgccataaatggctctcattattttgaggtatgttctttcaatacctagtttattgagaatttttaacatgaagggatgttgaattttatcaaaggccttttctgtgtctattgagataatcatgtgggttttgtctttagttctgtttacgtgctgaattacatttattgatttgcatatgttgaaccagccttacatcctggggatgaagccgatttgatcatggtggataagcttttttttgcttgtttgttttgttttgttattatactttaatttctgggatacatgtgcacaatgtgcaggtttgttacatatgtatacatgtgccatgttggtttgctgcacccatcaactcatcatttacattaggtatttctcctaatgctatccgtcccccagccccccaggccccaacaggccctggtgtgtgatgtcccccgccctgtgtcccagtgttctcattgttcacttcccacctatgagtgagaacatgcggtgtttggttttctgtccttgagatagtttgcttagaatgatggtttctagcttcatccaggtccctgcaaaggacctgaactcatccttttttatggctgcatagtattccatggtgtatatgtgccacattttcttaatccagtctatcactgataagcttttttttttgaacggagtcttattctgtcacccaggctggagtgcaatggcgccatctcggctcactgcaaacaaattctgcctgccaggctcaagtgattctcctgcctcagcctcccgagtagcaagtagcagtgattacaggcatgtgccaccactcccagctaatttttgtatttttagtagagacaggtttcaccatgttggccaggttggtctcgaactcctgacttcaggtgatccacctgcctcagcctcccaaagtcctcagattataggcatgagccaccacacccagctgggtaagctttttgctgtgccgctggatttggtttgccagtattttattgaggatttttgcatcagtgttcatcagagagtaattggcctgaagttttatttttttgttgtagctgtacccaggcttttcttttctctctttcttttttttttttttttaaggagacagggtctcactctgtcacccaggctggagtgcagtggtgtgagattacaggcccggtctttttttaaattatttttagtagacacggggtgttgctatgtcacccaggctggtctcaaatgcctgggctgaagcgatcctcccactctggcctcccaaaatgctgggattgcaggcatgagccactgtgtcccactgcttatttcttggtaaaagggaagcattggccgggcacagtggctcacgcctgtaatcccagcacttcaggaggccgaggcgggcggatcacgaggtcagaagatcgagaccatcctggctaacaccataaaaccccatctctactaaaaatacaaaaaaaaaaaattagccgggcgttgtggcgggcgcctgtagtcccagctactcaggaggctgaggcaggagaatggcatgaacctgggaggcagagtttgcagtgagcggagatcgcaccgccgcactccagcctgggtgatagagcgagaccccagctcaaaaaaaaaaaaaaaaagggaagcattaacttctccaagactggttccctgaaggctgatctccctggaaggctggaccagagctcagtcatctggccatacaccatgctaagacccccgactctgatcacattaggggagagcctggcaccctacgtcatgaccttagtggacaagaggactgcacatcaggctctgccatgtttcgctgcacttgtagcatgtttttgatgttatgtttctagctcaggatcatgccagggaagaggttggggcatcttcaatcctgaagcttgagggctagagtcggacatctgctagagctgtgagtgacaccctgaaatgcacgggtcagcgaggctcacatgactgtttctggaggccagtgtctttcccaggagcgctgatccggcaggcccactgtgggtgtggtcagccaaatgtcactcagcaaacaagtttgcagatcagtttgtgtatccttcagtggatcacccttccctccactctttctcccacagtgagcctggctgcagtctcacctttcataccccaaaccctgcaggaatcaaagtgccaccttctgcctgggcctccagtaaggctgagatgttagcccagctcactagattccagtcctgcttctttgctgatctcagagacattttcctaacttttgaggctggccatgattttctgattttgtccttttaatattttgtgaagcatttctctgtgtttggcacagaggtgattgccgaggctgagctccctgcactgtgcactcctgagcacatcctgctttgctgggcctggcccctggacagaggggctggtcccacctggcctgcggggcccagggcagccccagtgctcactcctatgtttggctcacttgttttttgttgctctttgtttctggcctcttggacggtgttccttatggccttgcgcttccaggagtgcatttgaaagcatgtttgtgaatttaatccagcatttctttccttttttttttttttttttttgacagagtttcgctcttgttgcccaggctggagtgcaatggtgtgacctcggcttatagcaacctcggccttccgggttcaagccattctcctgcctcagcctccagagtaactgggattacaggcatgcgccaccatgcctggctaattttgtatttttagtagagacagttggtcaggctggtctcaaactcctgacctcaggtgatccgccggccttggcctcccaaagtgctgggattacaggcgtgagccaccgcgcccagcctaatccagcatttctatgtgctctgtggtggaaaatgtttccaattaagtagacctgccatattgctggaatcggaagtcccggtttttgtttgtaagcctagaacgtgattctgggagagaacagccctgcctgcagcatgccagtccctgtgcctgctgagtgaatgtctgatttgaggacacagggtatatgtcacagtgcttggggcaagagagcatgtgggagatgttctggaaaggcctgcagctcgcggtcaggaaacctaggtccaagcacctccagtctctgctgacagctgagtgcccaggtgttgtccctgtgctgttctgtcacctgcagcaggtcctaggaggtgtccctcccggtccgtgcttcacagagaagggagtgagaccagatgtgaagcgggccttggagtcaacggcctggtgacttctggactggcccttaggtctcgatgttgcagcctggagtcttcctctgtccctgggtgtgttttgagcagtagaggaggggggacacgggagcacctgttgcagagttgctcttacggatgatcgtcatggtatgaacagcacaggaacgaacagcactctggagtcaggaagcggcactccctggggccggggaggcaggaggaagctccgcacctgagttgggtggtgtccagcgggctggggagcctatgcccagggcctggtgtgtggagatgggctgagcctgctgtgtgggaggtggtgagggctggggtctgaggccatggggatgggggcagtaaaccttgggggaacagagctcagcagccaagcatgcttgtgagtgaccccaaatgttctggtcaagttcagtccccagaatctcaaagaaggtccctttgcagaggaggagaaagatttggggtccagacacttagagctgtgtgtcccaaggatggctcttttcactggcagactgagaaggcaggcctgaagtcttgtccaggccgacgtgggctcagatgctggggaggcaagcgcttggatccacctctgtccagaggagcttctaggctggtgtggggggatccaagcaccccatagtgtccagctgccctggcagagagctggccaggggcagtgggctcagggaaagagacaaaagaaagcttaacatattcctaagaattggagtcatacaggccagatcctccaatggcagtaggataagtatgaactcaacaataaaacatcagtcaaaaaacctgtgtagagatttttaaagatgctaaaaatccaaagataaggaggaaacatttcaaaatggaaattttgaaattttaagaactgagaacaatgcaaggatgacctatcaaactatgcgaaattcaggtaaacctgttcttacaggtaaatacaaaccctaaatgcatttgctaaaaagaggataaaaggccaggtgtggtggtgcatgtctgtagtcccagcactttgggaggtcgaggcagctggatctcttgagcccaggaggagttcctcaccagcctcggcaacatggcgaaaccccatctctgaaaaaaaaaaaaaattagccagatatggtggcccacacatgtagtctcaactactcaggaggctgaggtgggaggatcacttgagtccaggaagtcgaggctgcagtgagctgtgatcacaccaaaaaaaaaaaaaaaaaaaaagataaaagaaatgtgtaatcaaaaactcatgggagaacgagagaatactatgattaacattagcagcaacaattttttttttttttgagatggagtcttgctctgttgcccaggctggagtgcagtggtgctatctcagctcactgcaagctccgcctcccaggttcactccattctcctgcctcagcctctcaagtagctaggactgcaggcgcccgccaccacgcctggctaatttttttgtgtttttagtaaagacggggtttcactgtgttagccaagatggtctcaatctcctgacctcgtgatccgcccgcctcggcctcccaaagtgctggggttacaggtgtgagccaccatgcctggcctagcagcaacaattttataaaggtagatgacatggatcattgtttagaaatattaaaattaccaaaattgagtcaagaagaaagagaaaacaagctgcaaactgcgagtacatatttgcaatacaaaaaactggcagtgaagttatccataatatataatggctataaattaatcaggaaaacaaacactccactagaacattgtgcaaaaatgaaactagactggctaagaaacacagtaaacatgattaacccactagtaaccctgcaaatgcaaatttaacagaatgccacgtagcatctgtctgcagggcaaatattaaaaagcattccatttgaactgaggtctacagcaattgtggagcaacagggcctctcatttgccactcctgggactggaattggtcaccatcacttagatgagcaatttggtaacaacagtaaattttaaaacatacataaacatgattagtaatttcactaatagatctttttccagactaaatctcacatagaaggaaataacaaataagcaatgtttgtggaccaaacagttagaaacagtgtaaatttctatcagtgggaggaaagataaaccaagtatgatatgtcactgaaataaaatgttataggatagcaaaaattaagtgagctagagctataatcatccacctgaatgaatctcaaacacaaaatattgagtaaaaacctaagtggcagaattataattagagaatgaaattgtgtatatattttaaaacacctacaaaacaacgctatgcctttctatggactaagtatgtccataggaatacacttatgaatgccttacacctcatacatgcatttccactcagctcggacaaccaccaagttgggcaattttactcccagctcacagaagaggaatggaaataacagagcaaaattcagaatgtgtttacttctgcagggaaaagaatgggagggagagaaataagattaggaaggggtccatggtgggcagggacttaattcatctctattcatgttttctttctttctctctttctctctttctttctttctttctttcagtgaagtctcactctgtcacctgggctggagtgcaatggtgcgacctcagctcactgcaacctccacctcctgggttcaagcgattctcctgtctcagcctcccaagtagttgggattacaggcacgcgccaccacacccggctaatttttgtactttttttttagtagagatggagtttcaccatgttggccaggctggtctcaaactcctgacctcaggtgatccacccacgttggcctcccaaagtgctgggattacaggcatgagccactgtgcctggactttcttcctttcttttcttttcttttttcctttttttttttttttttttttttgtgagacagagtctcactctgtcgcccaggctggagtgcggcggtgtgtcctcagctcactgcaacctctgcctctcaggctcaagtgagtctcatgcctcagcctcctgagtacctaggactacaggctcacacctccacgtctggctaattttttatattttagcagagacggggtttcaccatgttgcccaaggtggtctcaaactcctgagctcaggtgatccaccagcctcggtcccccaaagtgctgggattacaggcgtgagccaccacgcttggcccatgttttatttctttaaagaaaaacctctgaagcaaagagggcaaatgacacaaagatttgacaaagccaggtgatgggtaagtgggtgtttgttatattaatagcattaattatactttgcaggctgcttgaaatagtacaaatatatggataattccagatactgctaagagctgtgtagaaaaatagtgtgttgtgatagagaaggacaaagacaatggaggtggggcttagacagggtgtccagggaaggcccaggccatttgagttgggtcctgaatggcaagaaggagacagccctgcagtgatttgagggaagatcattcagcagaaggaacagcaggtgcaaaggccctgaggcaggaaccaacgtggctgtagcacgggaggatgtggagaggagagtgcatggggaaggacgcatttcctctgagtcagtcctgtgcagggccgaccctggtgaaggtctgagtgcctcatgccgcccagagcccttctgggactggggtgtgtgcacagccctatgatgtctcctgagctggcagcagctgctgggagtggagtgccctgagccaaggatcagggttgaagacagtggacccccactctagttctaagcctgttcctgtggagacagcacagctggcttttgttgggggccatgagaggccctactggccttggccttcctgggtgttggcctgaaaatgagggggaaggggtcccgtctgtgagggttccagtgagcgcagctcacgtcccagctgagaactctaggaaaagagacactattgggaaaccagggcagtgccggggaggctgccgaccccggagcctttcctccacctcaccagtgtgacccacccgctgtcggcccaggcctgctgccccgcctggcccccttttgagcgccctctgagtgaacagagctgctgggcgccacctcccccgtgcttgcctcctctaggccaggtctccccagctgtgccggggctgagcagagtacagatgggaatcacgcagacacagaccttgccaggatttcaagtgcctgaccccctcttctgtaagtgagagtaaacctgcccaacttggaggctgtctgggctgagtggaaatgcacgtatgagggggaaggttttcgtgggtccttaagatgtggttggctgcttccctcctcctagactcagtccttgccaacagggccctggcccggctcttctgtctgcctgccctctggtggtcctcacaatgctttccacaggctgtaaacaagtactcgtggacagcatgcagagggagatggagagaaataactcacgagagtgtacgactggcccagaaacaatgggcgtccactgcatgcaaaatacgtggaagccctcatggttgggtgactgggtctctgcccacaaggccataggagagctaagggttaagcaccagccagagcaaggaggctgcctgtggctccacctccttccgccacccgagcccgccagccccaggcccagctgggatagcagcttctccctactctggcagacacagaccagagctggagggagggtgtgggggcccatgagcacagagccaggagatctgggcacccctgacacctggccagccgtaagaggccaggcccacccactgtcccaggctggggttggtcttcagcctcccagtgggtcacagcagtgtggcatgggagtgggcctccagctagggtgttctgaccatctccgtgtgctgctcctgacagagggcgggttcatgcctagcacctccggctgctgtgagctgatgcctgtaagaggcgttcaggccccacctgcagtgctcagttgggtaaaatgctgaggaaaccgaatcacagctagactaggggagtgaaatcatcgtgtccctttcctctgtgcactcacagaaacacgcaccccacgcagaaaatacaatgttcctcctagagctgcagaatgaacaggctgtgctgggtaaaagaaaacaccccagttggatgccaactttccttagcaggagaaggaatgtggcctggggccaccgctggtgatgacaaatttgcttccagagccctcagacaaagcccttccagcgtggggcccagcatgagtcctcagaagctggggaggcacctcctctgcggcacggggaaggcgctccccaaggaggcatagcggggccggggtggcttcttaaggcagacctgcacctggggcccatgattatatttaggtatatgtatctccatcccagcccttggagagagccgccggagcgatttgggggtccatctgagcgtgcagtgggtagcacagcggccgggaactagggaagagactgtcgtatcagatgaaattgagcgacagtgcggtcagcacgggtagggctttttctcccagctcaactgaggtgtaattcatcaataaaagtgtgtcatttaagatgtatgatgtgattatttgatccacacatacactgggaaataatgaccacaatcaagacaatgaacatgtccaccgcctcacaggcacctttttttttgtgttgagaacatgtaagatctgtcctcttagtccatttcaagtaaacagtaaattgtcattagctggagtcaccatgctataccttacatccccagaacttactcatcctatgactgcaagtttgtagctctgacaaacatctccccatgtcccccaccccagcccctagaaaccaccgttctactctctgctactatgagattgatttttaagattctgcatggaacttgtactttaaattcattgtctgttttagccctcacaacagccctataaggtaggtattgctattattcctatttcacaggtgaggcagctgaagctcagagaggttaagcaatttactccagatcatacagcaaatatatgtcagagctggactttgatttatgatatgatatgatatgatatgatatggtatcatatgaagagtccaagctcttaagatcaccaagtgaagtgaaacgacaattaacaaatggagagaaatgaaatgcctgactcttgagggcctcacactggaccaggtaaaacagactcttgcttgtaaaagaactgactttcaattcagtggcagtttccttccccagaatgggttattaaaggcctgtggctctcagagttgaaacatgaggcctgatgcacaaggtgaagtccaggataaatgtgagcttcccaacacccactggccgagaagacagctgttctcctgaacaactgttctctgcaactggaaatgctgccctgagaagccacagtttcttaggtgtgtggccattgccctgaacccagggcttttgctacctggggctgagccctgggttctggcagccatgggttaaatcaacaagggggagtggtggggaaactagagcatacagaggaagggttccggggagtgtgcatgaggagggccaggagagaggccagctgttgctagggcagacacacccgcactgcccccaaaccccagtagggcagcccccgggtaggctgacccgtggacatgggttacctgctaacaggtgactgttagccaagcggggttaccatcaagcgcaaggctggtgtcttcgccctccttgagctggggcctcaagtcagcagggaagaatgttagccaagcggggttaccatcaagcgcaaggctggtgtcttcgccctccttgagctggggcctcaagtcagcagggaagaatgttagccaagcggggttaccatcaagcgcaaggctggtgtcttcgccctccttgagctggggcctcaagtcagcagggaagaatgttagccaagcggggttaccatcaagcgcaaggctggtgtcttcgccctccttgagctggggcctcaagtcagcagggaagaagggagagagggagagcagtgggaaggaattcccctgctattgttggaaaactaaatgtcctagatcactgttgagattatttgttaactaagagttaacagatgccaagagaaggtctataagcgggggccaggcaccctggtcccagcacactcagttggcatctgaggtcccagtgtaataacttgcaccttccacagtgtcctgggttcaggtgatgaggcgtgtgcacccctgcctgtgagtgtgtgcgcactctaatgcagcccacccatctgagcagggccccgcccttggcaagccctggcttccagtggtggctcagactccaactggaggaaagccatctacaccgaggggtctcagccacagccatgggtgccctcggcctgcatgccctgctggtctgtcagcgtccaggccccagtgggatgccagctgacactgtaggaccctgacctacctgggctgtgttgctctgaggagcagcctccgctccaccccagggcagctttcttcttcctccggcaccttcaggcctcagctcagggtgggcctggcccacctgcctatccaaggagatgaagatgtgtcctcccggctggacggtgttcttgggtgtctgccccgtgaggcactgctggacctgtggggcaggcacgcagagtttgggggtgggattgaggaagggatttactctcaggggcagggagaggctaggaagggatggccaatctggctcctgtggacagttggtacccttggaatctgtctgctggggagggtgtggaatccctggaggctgcagctgccaatgaggatgagagtagcaggtggctgtggggcagccctgaaagccaccagccaacacttgggcaggatttgctgacagacagcctggggcaggctttgggtggacagaccactagggctgccctcccctggaagacactggggtctggctgcgagggagcagagaaaacccccttggtggcccctctggctctgagcttcctgtgcaggggccagaattcctcctgctgggtcatggagttgtcaccacatttccaggtgacatctgtgtggggagctaggccggcctctccttagctctgtcttcctttgccaggtctgtgccgcctgcctctcactgtgatgctcccagtgcctgagctggtgtcactccccttggtctctagcaccacattatgagcctttggggtcaccctgggcccggggaagtcctggctctgccatttcctggatttgcggacttaatacacctgggacggtacatctggggaggatggccaagagagcagccagcgctgtcaggcccggagtccctgcttcacgtttgctcactcacaacgcccattcaatccccccgttccccaagggaccttctgagaccatgtgggaggcctgtggtcccagatcccaggtgagggggacttacagtcacaaccacaggctggccctggccctgcagtccccgcctgcccagcatgttcctgtagtcgggcggggacatgccctgggcctttcctccaaccactcagtcccagctgcactcccccatggccacacacagccacactgggcctcagtgacctggctgacccccaagagatccccatgactgccccctcttggattcagcaaacacctctcttcatgcagtttgaatcctgacactttggagggggtaatttctgagcctctgtggcctcatctgtgaaatgggccactgaagcaggtgaagtgctactccgtccctggcctacagtgggaacccacgcatctgggcccctggagagcagccgtcacagggtcagccagcgcctagctgtcccagctcagtgcactctgcggccagcaccccacgctgcccaaagggcctgcacacacacatagaacaggacatcccaggcagctacagcccatccaccaggactgtttcttcagtgaaaaccaaaggttcttgtgaactcacacacatctgctaaactgcttcctattttgaaaattgtgatgtttcatgtggaagataattgattcacaatgacgtaaacacacactgtggggaaacccctgaatctcttttgtttcctgctgcctgtgggagatgagtcaccaagaggcaaaggctctcaagtgcccctcgtgggatgggtctcattcagtctttttgttttgcttgagctctgaggttttgtatgtaagcaggagtgattcacacacacacacacacacacacacacacacacatgcatgcatgcactgtgccctctgtaaaggcgtctcacacaggcacacaatcgcagtggccaggagccaggcaccgcgggtctgcgaactgatttctccctgcatatcccattgttcagagcttccttggcctgggtcccaagcacagggacccagtgtccatcccacaggctggcataggtcacaggatgaagcttctccgggtgcaatgttcaggggtcaccttgtggtgggtgggccatgctgcagggctgcctgcccatcccctgcccaggttttgcaccaaagcactgagctctggctcagcctgcagcctatcctacaagggagatggggctgggacccccatcccacaaaggctggcccagcacaagcctttcgctggggtctgagagaaatcctggaggtttctgaggggtcctcacctcctccccacaggcaggctcctcagcccctttttcagaaagcgggtatgtgtgggcaccaggcctagcatgcaggacactgccccgctgcagtgtccccctcaaaagacgccctccctcatgctgtctgcccatcaaaggagccctcgcccaccccgagtggcctcaccttgaaacacagacaggtggggccagggtcaggcagggccaccccccgagaaccaatgctccccttcagagccaggcctgcccctgagatgggacacagaattcacagaatccacagcctgggcaggcccacagtgcagggtgagtctgcagctcagagaactgggcttctggctctgaatcactcttccttcgactacacctggccgtctcctgcctctcacccaggagggagaaggtcctgccgtgggaacaaggctgcaggcctgcaaacctgttccaccccaatggggtgcttctctcaggccccagagcccccagtcagtcccctattcagagcgtgcagcccctggcctaggcctggggtaaaagccatttgttgcctagtgagggtgcaaggcgggcatccctgccatgttttatggtcctttctttcctgctgcccgctcctgcctccacccctttctcccctgggaacacactccccccatctgctgcacacaaaagcccattctggcctcttgctttgagaccagcgtcaccctggagactggcgccttccggcccagccatcctctccccgccccagcctggccctggctcccaggctggcctgctgcccccgtgtccccctttagggtcctctcccgtgagccgggagtctgaggtgctctcggtctctcctcgggggccctgccccacgggtcaggctccacttctgttgctgccgcaccctggaagcccccaggaccgctccacactcgccatcaccctggctttgtgtcacaacctgcgtggcgcaggtgcaggatgcaccagcatggatgacatgtcactctccctggaggaacccgcttggcaggggtagctgataacttagggccagcgcagacacagaactgtgcgaaatgacgctgatgtcgcagtgatgcgagccgcatgttcctcgcctcacctgctcactttctgagcctcactgcagcgacaggaggcaggaagcacccccaacccccggttttaataaatcctcctgccattatcacgcccatcggagggctgctgggcgaggccaaggattctggatgggaagaagatggtggagcaggtccctgggagaagcccagggccagtcatgagctgggacgatcccgcatggtcagcagcaggtcccacttcctcgtactggtgccacttatcattaaagcaataatgagtgaatgcagacacacaaaggtgtgtgcagggaagagcctctccccagaggtggccactggcagcaagttgggtgtcaaagctgactgtcttccgtgatcagacgagatcggtcgtgttcagggtggtatggtcgtagacaaagctgactgccattaactctttcatcaacactcactccggccaggccgtgaggaggggctgaattgggccactgcagctcctgccgcagcccccacacacgttcacctggttgggctcacagcagcccagaaggcaggtacatggctgccctgttttacaggtgagtaaacagaggcacagaagggtcagtcactttccttgagccccacagccagctctggccaggcctcagagcccacatcccttagtgcccctgtggccagctcctttctgcacccaagggaccccacacctgagggaccccacccagccggggagtcctgctgtcactgactcctcctcatgtgcagaccttgactcaaaggctagctcccaggaacacatcctcacctgtccacccttggctgtggtcctctctccttgctaaaagtcacctttgacccagacatcccgcagcagcccctgctccaggagctggggcagaaagcagggtattcccagcctgactgatcagtaggaggggcagggaaggctgagggaaagggtcctgcacaccagactactgcagaccccatctcccacccgccgcaggcagcccccaaagaggcacatctccctcagctgagcccccagggtccttcctgcagccctggcacgcccacaacccttccctaccaggcctgtgcttgtccttcgtggctcctcctccactgtcctgacccccgatgacttctctgggtaggggataagggtggaggcaaagatgtgggggctccctgagatgcccccgctctgctcctcgctgggggcttcccacagcaaagacagaaaagaaggtccccattgttcccaaataaagactctgctggttctttctttttcctcctttcttcttttgcattcctttttttctttccctttgaacagtctgcggtgttggccagagacttcggatgcttttcttttccctgccccgagcatggttcgtgagtcatgacctcagggagctgcatagaggctggtttgaggttttttcaggcttggggagaggtgggagaggaatgtgtattaatgcgccgagctggttgtgctggtgctgagtcctctacttctctgggttcaagatgcccaacttcaccctccttgcagccagccctgcccaagggagctagagcatggcctcctctggacatggcttcccagccctttgggaagtgcggtcgtccctgctgcagggccccagtgaccgtgtctgtgtgggtgtggcacggttggtgctctcctgcccaaaacccctgagcctgcaattctacccagagccacattcccggggggcaggcactgctcctgtgctctcaaatgtgacctcctgcccagaaggaagacacaccaagttcctcagcagaagcaagtttgaccgaaggtgggtgtgtgaaggcctcagaggcagagcttccagctgcccatcaccaggatgccttggaggctcggagctggattggctcaggatgcacagagccatcacttcctagaaatctggaaatgccaagtgtgcaggccaggcagttggggaagggggtatgtcctgcacgtgtgtgcacactgtgtgcatctgtgtcacttcgagcatctgtgggggcaggccacctcctctagaaaggcctctgggcccctgcagggtgtttgcctcccgtttgaccgggagccctctgagggaacagcagatgtggctcctgtttattcaggggttggcttgaatatttgtccgccaaagggcctgattcagaacatgtctgataatggagtgggaggcctccattgtgccaggggaggtgcccaggcccagggagctcagcctgtcatttgggtgtgttttcagacaatgacgcccacctgggggtcaggtgatggatgattcagagtccagagtgctagccattgcaccatgggaccccttctggtcaggtgatgattgaggcagcgggggctgggatctgtgcagggctgatggggcagtgtgggagttggctgctgctgctgcaggcctctgtgcctcggtgggtcaggttgaggggcttgttcagctgtctgcatccaaaagacacgttcctaggcagcacttgtaagacactttcaaagagcacttgcaagatggattcaagtgtttctctgatgcagctccttccacctcctggcaccagccttccccgtgcccatggtggcacctgctcctcctaaacctggtttctgaggacttgtgagctctgaggcctcctctgtggcaggtggggcctcatttcagatggccttgcttattgcaggagcgagagtgcggctcctggtgctccctgacgtcagcgtccacctgccctgcagcctcgggccagggacagacgcggggcctgcacatccatgactcaggcctatcccacacccaggaagcccagccctttgagaggcagctgagtcagtgcagggtggggtgcagggctcttgtggaccaaaacagagggtccctcctcagggcaggcaaagccccatctgggggcggggcctagagctgagcctggaggctgagcaggggcttgctttgacacagcggagcaggggtgggagggggcaaacaacattccaggagcagagaacagtgaggtcagtgtggcatcccacagcagtgagtaccgtcagaggggcaagaatcggggccatgtgcatggggcatgtcagtccggaggggaccccaaggctcctaaggcctagctcacatcaaatcctcctgtgtgctctgcctggacacagggcgaggctcacaggccttccacacagccaccgggcccccagccccacacacttcctgatccctatccccaatctgcccagcagactgcaagctccatgagggcagagtgcctgctctcgtgccctctgagtcccctgggactggacacagcataggcaccccaaacttcacatgtccaaaaccgagttcttgtccccatgccacccaagagcaccttccccagggttccttccatctacctgcactaccacccctctactgaatcagaaaaaaaaccaggccgggcgcggtggctcacgcctgtaatcccagcactttaggaggctgaggcaggcggatcctgaggtcaggagctcgagaccagcctggccaacatgttgaaaccctgtctctactaaaaataaaaaattagccgggcatggtggcacacgcctgtagtcccagctacttgggaggctaaggcaggagaatcacttgaacctgggaggcgaagttgcagtgagccgagaatcgcgccactgcactccagcctgggtgacagagtaagactctgtctcaaaaaaaaaaaagaaaagaaaaaacaaaaacaaaaacagagtcctccctttccccaaccctacacccaatccaccagcatttcctgttaaagggacctcttccaaaatgcacctcagtcctgcggccactctaccaccgccctctctcctggggcctcccgacaggtctcaaaagttctgcttcctggctgggtgtggtggctcatgcctgtaatcccagcattttgggagtccaaggcaggcggatcacaaggtcaggagctcgagaccatcctggctaacatggtgaaaccccgtctctgctaaaaaaatacaaaaaaattagccaggcgtggtggcgggttcctgtagtcccagctactcaggaggctgaggcaggagaatggcgtgaacccgggaggcagagcttgcagtgagccgagatcgtgccactgcactccagcctgggcgacagcgagactcatctcaaaaaaaaaaaaattttctgcttcctcccctgccagctcagcttagggtccttcacattcctcccctgcttccagggccctcttgctgtgccccaccctagcttctactccatctcccccatcttcatctgtgctccctaaagtgtagccatgtatgtgagttttctgcctctctaaatgtgctgtggccccagggcctttgcacttaccccctacaaggaccctctttccctgaacctccccatgcctctcagcctccagggttcagtggggacttccgtggccactcaggtcattcttccctctctcgaccctgaatgttttaccttaatagcacttaacttatcttgtaattttctgtttgttgatttatttccaagagtcctctgagggcaggcaaagcagactgttctcaatgactgaaacatttttcaaatgaatgctgtattgagttgattggaaataactatacactgtagatgaatcaatgaaagcagcccttgaggccatgcagcctggtgaggccccctcaacaggtgcccacaaggagtcctgcctgcctgtcccaccttcccttcctaaacgagagggctcacatctgttttctcggctgcacgctggccacactcatgcccctcacagtcaccatgggaggggagaatcattatcccaaaagtgctgataaacatacctggccatctcattgaggtcacgtatgagtgggcttcacgaccatgacactgaaagccaagggtgaagacaacagctctgagagctggcactatcatcagcccccttcacaaatgagaacactgaggctaggcgggtcaggtgacttgctccagcattaggcagcagagccaggctccggggctctgggaccttccaccttctcccagcctggagcctccacagtccttacagagggcaacctcagtcctgtccacgttcagacgtggggagcaggggcacaaggaggcaggggtccttgcccttgccgcagcacgggccctgggggtggtcctggtcataggaggaccctcctgcctcttcccctgcctcccctgtgttcaggttgagtgatgtaggacaggcttctcagaccaggcagaagtaggtcagctagtgtgctgggggggccccttccaggtcaccctgccaggaatacactccagtcagggaatgagggcagtgcatgggctctgggcttgaatcctgcctctgtcttcaccctgtctgtgacttggggaagaagcagggggtacttgaatctcagtggcaccaatagcttctgaggccagctctgccaatccctgggctgccctgcccttctctggctctcactccttgtgcccccaagccccttccagtcaatgtgtccccagcagctccaggccccagaggtgtgattgagggtgagaggtaacaggtatacagcagagctccctaaaggcatccacacgggatccccattagacgttcctcgctctgctgcctccagggtggagcctggccacggtcctgcgggtgagggtggggcgggggggtcagtgaacatcccctccccacaccccaggtctgcataagagccctcctcccccacctcctcccttctcctcctcaaatcctggctcctttcaatgcccctctgtgcagcatctcagagaccttgggcctctggctcacctcacactgcttggccatcccaggtcctgaccgcaccccacattcttggctcccctgtccttgacccaactgtgccagtcctcctagaggcctggcccctcctgcttcacccctggggccaacacacaaggtgctttacccctttgaaccccaatttcctcaggtggtgagagaaatacaggtaactctgctcacctccggctccctgtctgttccgtgtgagtttccgtgtgctgccaaaaaatgcctgtgtgctgccagttgttgtttttaatggctctccaggtctcccacggccctagacagcctggatgctgggccacgcaggaagtaagatggaaagatggaaagaggggcagcagatggtaacagcatggtgcccgcacctcgtctggagtgggctactctgatcctctggtccttttggggacagctggcaggcagtggggcaaggggcacaaacagttctcctggaaccgcagagccataggctctgcttgcagcaagtccaactctcctgggggctctgctgagaccttcacgggcctgtggcccctgcctggctccacctcttcggcagctcttctgtctatcctggcaggggagccttccttatgtcaaggcacaaggtgcccctgccctggctctggcggctcttaaaggaagcccatgcctctcccacacgccatcatttcaggatcaccagtcagtctgcaagtgtggtggatgcatttccgattgtcccaagtccccatgaaaatgtaactcaaggccaggcacggtggctcacatgtataatcccagcactttgggaggccgaggcgggcagatcacttgaggtctggagttcaaaaccagcttggccaacgtggtgaaactccatctctgttaaaaatacaaaaaaattagctgggcgtggtggtcgatgcctgtaatcccagctactcgggaggctgaggcagaagaattgcttgaacctgggaaatggaggtggcagtgaggtgagatggtgccgctgcactccagcctgggcaacagagtgaggctccaacaaaagaaagaaaggaagaaaggaagaaaagaaagaaacaaaaagaaggaaggaaggaaggaaggaaggaaggaaggaaggaaggaaggaaggaaagaaaagaaaagaaaagaaaagaaaagaaaagaaaagaaaagaaaaggagggagggaatgtaacttgaagagttggggacgaggcagtgaagcccctctcctgggcattgcctcctcctgggcccagcctagagggaacaccagtgtccctgcgcctttctgtggctgaccgccagccactgcccctcgctgactgtcggagctggctatctgcaggccctgcccgcgtgtcaggggtcacttggtctgaactcggcgctacatattcaccccggagaatgccatcattagggtcagcccagctttctgacctgaggagctcttttaagattctgtttccgccgggtgtggtggctcatgcctgtaatcccagcactttgggaggccgaggcaggcggatcacgaggtcaggagattgagaccatcctggctaacacggtgaaaccccgtctctactaaaaattcaaaaaaaaaaatcagctggaggtggtggcgggcgcctgtagtcccagctactctggaggctgaggcaggagaatggcaggaacctgggaggtggagcttgcagtgagccaagatcatgccactgcactccagcctgggtgacagagggagactccgtctcaaaaaaaaaaaaaaaaaagattctgtttccaacgtgtccctgatttctgtcccccacctatgacagctgtacaagcaggccggcttcccaccaggctagctgaaggctcatgccctcctcacaacggctcccctgactcaccagcagtcagacagcaacacgtgggtggtcctggactttacatctttggagctggtcaaggaccagggacgcagggatcgtcggcagagattacaggaggccagagtctaggagcaaagctgcagggagaggcaccagccccagcctccctagtgggcagtctgtctggtgagctctggctgctgccgctgccgtagccggctggctgcctgtttcccaggtcagcacacctccccctgcctatgccttactccatattcttgcaaaaatccctttcctgctagagtagccaggggaagtttctgtcttttgtgactcaggccccagctggtagtgtaggtctgtctatatgtaagcctgtggtctctgggccagaaaagtaaagcaagtggcccaggctgcccagcgaggaaagcacaagcccctgtaagttccatcggtccaccccgtgcccacgctctctctgccacttggaatctgctgcgatgttttctgtcctaccactcacttcactcccctatgctgctgaacctgtttaattgccatatgtgacagacaggaagtcggggtcatatttaaacatgggacgctccactgactagaaactctattgtacaaatccttcagcgactcaaacaggcctgcctttcttatttttaataacggcaaaagagagagcacaccacagtgcagtcaagtcctcctaaaaccatgttcaccagaaggaaaagacagacataaactacctttgatttatttcccctcgagcattggatgtcacttctctagggaggctgcgctgtggcagggatctgggcgtgcggggacacagcaggtgcctgatgaatggagccatcatgacggttatgctccaacctggggtctgatcctctgctagacggcgagcctggcccaggccccatagcctgaaccaggggttctctaagtgtggtcccagggccagcagcttcagggtcacttggaaacatgttaaaatgcaaattcccaggccccaccccagatcctgtgagaggggggcagcggtgaggggcagcagcctaagctctatggtgtcctccacgtggttctgactcaggtctgagaacccaggtccagggctgtccactggtcagaggagtccggacaacaatggaacctgtggccaggggttgtgtattttcactggacctcccccctcgccaggggattagcactttaagccttcagagaagagcgaattaacttttgctaagcacctgtgaggtttaatttctcacgtactctccatggcaaccccaccaggcggtcattcctctcgaatgttaaagatacgtgtttagagcagatgatcatgattacacaactggtgtgcagcacagccaggtgcccagatccgaatcccacaccctcctcccaccaccatgggcctcagggacatgcttctagcacagtcatggaccctgagtgacataaaggctgtgacaggggacgcaggatcttcagatggccccacagtgcctcctctgagtatctatctcccaagcttctcgcctggcctggttgctgtgagggcctggggagaggcagagacaggttgggtgtacggaaaatgcacactctgccaggcacccctgacacgcactgctgaccaggcatagcgttcagtggggctaggacttggacgagggtgcaggcttgagcaggggtgcaaaaagccagtctgggcagatgctctccctctgtggggcgccgatctcagaaatggtggacagagcagggctgcagtatggtgcacatgggccttggggtcttagctttcgtgggcctcttcctgcataaaataaaatagttaaaattagagtttacaactgcattcatataaagatgaatatactccaggctagattcattattattttattatactcagtttttttcttctgatttaaaatagtgcggtcctagggctggttagagtgtttcctggcaggccctgtctcctgaaacccctgcaaagaaagcagcgaggacttccctttgccccttagcagaaagctgcgctccttaatggttacaggtgtgaccattcacttacatcctatctgcaggacatacctggaaaggtaagtgggaggcaagagggagctggaggccaagacttcggtcccagatatcctagtccacatttgtccccaccaggtgtgtgagtgccggcgcgctgcacagcctccctgggcctccgtttcctcaactggtaaacaagaacgctgggcggactgaactctgaaagttctgggagcttgacaatcagaactctcagcagagaggccgcccctgctctcaggagggcggaggcacctgagtctccagtgcggaggacaggccgaagcgctgcgttggagatgtgcaaatgcgcaagaagcgtgctgctttctctctgagaaaacactcctaggcttcaagggggcccaagagctcgactgggcgggatgatcccggcggcccctgggccgggtctgtggacggctctgctgtgtgcctgtgcgtgcccagtcccgcgggtgaccaaagcccaggggcgggcagggcaggagcctggacctcacgtgcctccagtggccaggtttgcgggggcggagcgtccgggcgagggcgcgggggcggaccctagggcggggcgcggggtggcgtcggtggagccggctcggcggcgcggctcgtagtgctgcggccgggctccgggcgtcccggcggccaccatgctcagcgtcgtgcacttcctccggagcttcttcaaggtgagagccggcgtccgggacttgcggtcgggctcgcggcgccctgcgcgggtggggaggagcacagcccgcgctggctgctgcgccccgggccgtcccctgggcacccggtgggtggggacaccctcgtggctccccgccgctcccaactttccgacgtgcagaccggaggcggcgtcctgcaaagtggggccgtcttgagcgcggggaaggacggggctccgttgggggcggtagggacggcggcccggggcgagcccctgagagggcaagggcgagcgcctgagccggcctccccgcacctggaccgtcctgggcgcgcggggcactcggagccgctgcctggaccggcctgggcgcgcagggcactcggagcctctgccgcttggcgcagtaccagctgttttgggaaggagggctggtgccggcccggtgggtacgggagaagtggttgctcttgttattccccaggctgagagtacgcgagggcgcagcagcggcaaggggctggaactggggtcggggctgttgggctcctgctcggggtgccccctctctggcccgatttccgggcccgctcaccatccgggacccactcagttgggacgcctccacctcgctgcccccacaggaaccccaagatgggccgggggctccggggcactgtcaggggtggccggccacaggttgccaagcccgacctccccaggtgagccagcgggagggcggttgcgacgctgggtggtgctgagctccgatgggctcctactccgggagcaactgcatgaaaggagaggcggggaagagccaccagctgtcagctgcaggtccagggggaggcagacctgtgtggggctgtcggggcgggagggcgggagggcgccctacttggctgtgcagccatcttctcccggagttgaagacgggaggttgaggtcggagttctgtggccctgagagctctagtgaaaggggcaggaagccaggtgacccagggcagacctgcaggagccctgccctcagcctatccgctggcctggcatcagctcccacccccagcgataacgaagtgatcgctggcatcaagagtggagagggccggacagccgggaaggcagcctttcaggaacctgtgctggtgagtgtaggagatggcttggaagagctcagacccccttcaaatgccgactctgtcattgaggaggtgtacaatcttgggacaatcacataaccacctgggtctttgttttgaaaaatgtgggtgatgtttccatgccctccacacctttcagggttagtgtgaaggtcttattagaaaatgtgagtgtggcccggcgcggtggctcatgcctgtaatctcagcactttgggaggccgagtggggggggcggatcgcctgaggtcacgagttcgagaccagcctggccaacatgtcaaaaccccgtctctactaaaaatacaaaaatcagccgggcgcggtagtgggcgcctgtaatcccagctacttgggagtctgaggcaggagaattgcctgaacccgggagacagaggttgcagtgagccaagatagcaccactgcactccagcatgggtgatagagcgagactccgtctcaaaaaaaagaaaaagaaaagaaggaaggaaggaaggaaaggaaggaaggaaggagggagggaaggaaggaaagaaacgtgagtgtgtttatgaagtggtgagccctggaccttggttctgctgcacccacagcaagggtggcaaggagttgcccaggtgaggggaagatggccggacagaatccaagatgcctgggcagaatctgagtcacccagctggccccagaagctccaggagcaggtggagtgtggctggaggagagaccactggacatctctgggcagccaccttgcctgctgctgcctgggaggctcctgggatttggcctttgtgaaagtattcctgacacacacggtcctccagttccccatctattcagagaggcctttccatactttctgcctcaggtccctgtaggtcctgagacacctgaggcctccccatgcacaccacaggaagcatcacctgtgcccctcagagggtctcctttctgctgtccacatgggaggggctctgactgccacagcagtccacttctggctgtgtgagtgtgtcttgccgagccaccgacaacgtagttcatacttgttcctctcagacactggtcgtaaggaataccccgtgaggacacaggttgtggggtgggcagaggagctacgtgcttcagtcaccgcctggtgcctcctggtgtccccagggattggtcctatgaggtacccctgatgatgggtgctggactgggccagaaaaggccacttcattctgggaacctcagattgtctgggtctcccagtcagactctgttagccaagatgcagctagtctccaccaagcccaggaggaggaccccaaggccccaggtgtgccttctggtggcacttggtacagactctgtacagcacacagatctgcttgggcacgttgggcaccgtgggatccatggggcatgacagtcgtgtggcagagtccctccccgtgcaggcagaccagtcggagagcctgcacctgccaggggcccacacaggtgcgccgccttgggggtcacccagcaaatgagtcagaggagcagcacacccaaaaggaaaatatgttgtctcaaaaatccagaggccctcccagcatcgtgtgtgggccaagcatgacttttgatttcgagggtgtatttcaaaatgttccagacagctggaccccctgctgcctgcctggagccgtcactgaagtggcaggtccctgtattttcatggaatgtatgtcctactctctggtacatgtatgtcctaacacttagggtactttgctacttggtttcctccaagacctattagtgtgcagaagacccacatgaggtcatcaggagagaaaggtcaaggtctttgttggctaaaccatggcacagaatcagtaagccaagacaagtcgtgaaggtgggatgctgtgccccatgacagggaagccaacctacttccgtgaattcctgagtactgcagcaggaagcacacacataggcacacacacacaggcatacataggtatacatatgggcacacacacacacaggcatacacacttgggacacacaggcacacacacagacacacaggtgtacacacaggtgcacacacacacatagaccgagttttcatccaatcagtggctctatactatgccaaggattgtgacagcttcagtccggtagggaggtcataagtgggacagcacagctgatgagagaatccacttgattgaacccagatctgtccaccgcattttcaggtccccatgtctcctgcacaagcctacctggcaggttaaggggggatgcagcagcgtcttctgccttgggtgctggtggtttctcagtctccagggatgaggtgttgctaatgagccactattttggaggggagggagttgtagatccatccaggtagtctttcccaccacagaagcctccacaccatggctcaggaagccaggatgaagttcctgccacgtactggcatgtgtttgtcacctgagcactcaggaactagggaaattgccataggacaggtttgggatcccagtgggctgccacgaggtggatgcagggcacagctctcgtcatggcctgcatgcgccactgcctctggcaagcgtcactcctggtggcaggctgtggagacatcctgggctaccaggaacagtgtcagctcagaaccagccctcaatggtgccgggaggtccaggtacttctctgtccaggaggctctggaagattcacggcatatacctgtgctgttacgcaggtgaccagcctccctacaactcaaggagttttgggtctattgagagatctgggaattgggcaagaggcaatgtagtttattcagcaaatattggttgaacacctactatgcgccagatgttgttctaggcactcatggtagactcctgcctaccagacctagttttaaaaagtggttgtttgtttgtttgagacagagtctctctttgtcacccaggctggaatgcagtggcgcgatttcagctcactgcaacctccgtcttctgagttcaagcagttctcctacctcagcctcccaactaggtgggattacaggcacgcaccaccatgcctgactaattttttgtatttttagtagagatgggatttcgctatgctggccaggctggtctcgaactcctgacctcgtgattcgtccgccttagtctcccaaagtgctgggattacaagcatgagccaccgcgccaggcctagaaagctttttttttttttttgacatttctattaatactacacacatcagataggaccctattggcattacctgttgatttcagtcctagcagtgccatgggtgagtcgtcagtgccaaggagtctcagcatgagaacatcttggtgcccctctggctgccggcacctgaatgcttcctcccatcctctgtcgtgccagcctcaccgttctcatctgtagaatttccaccaacgggaaggtcttccgtcatcatctccagctgatagagaacgatgtctgtggcaatattccaagctgttggtgttctccttcctaaatgtttcttggtgcttccggctggggcaggtccttttggctcccctggagacatggttagggatgttgtacaggttgctcttgatcggtctccaccaacactgtatcccttcagatgtctggattccttcaagggattttggcttttcagtttcactttgtggagccactatcaagctgaggtcagggaaccaacagctcacctgccggctcttggactccagcatggggggcgcacctgcagcagtacattgccctggcctgggttgatgctcttcccccagggtcggggacactccaaatccgttctcaccattctccctggtttttgctggtgtatgttggcacagtccttgttctctgaagtatgtgtcttttccttgatggtttcacttgtaattggttcccttggctatgctgggatctgactctgctctttggcctggaggcagggaaaggggccagggtgggcatgagcagaacagggtgacttgctggggagggcataacagcctgaagcagccagagagaggagcaagggttcagtggggttgtgagcccccagtgcatccccactcctaaggtgagggttccactctttcccaaaccataccctgactgtcactcaaggagcaaggaaacaacacatccttctggctgtataatgcgccagtctgcagattggtggagtcagactgcttttggttctgggatatctcaggcctgtggctgcagaagagaagagatactcgtactttatgtagagtggtagagaggccctgtgaggacagagtgtgttattacctcactttaagctgtacagggcagttagaagtagcaagcgcacccggcagtccttggattcttcatgcctttcatttggattttgtagcaagagctgtttctcccacaaagcacccagtagtcacttggccaccattgataatttatttaggggctggccatgcaggcagtgagatactggagttccacatcttccacgtggtaatgtatttccacggcttttggcttcaactaggtgaaatccgcagtcccagctctcctccccaccttcctgcagatctcttacccgcagggatcctggtaccagtttctttactagtgaaggatcttgattgccaaagacagtaaagggctccagttaagtgaaaaaagagtgacgtcttggcaggttgggggtagctcattggcccagcttgtgcagggatgaagggggcgacgtgcagctgggcctgtggggctgccccgggtgtgggctccactgctctgctgacaacaccctctagtgtctcttgtaggcggtgaggtctgtcctcaagagccagggtcctggctgggtcttagctgagctgccagagggtgggacgagaggatatctgcctcctttctattttcaagatagatggggccagattttcggttatattgggatctcctcctctccccagtcccagcagctgttcagcacggggcagccaatacccactcatggtgtatgactgagaaattttccaggactcacttggcccctccacatttgtggcggaaggagggtctaaactccaggttcctggggcctctgccagggagccacctacatccttgaactcttctgggtgaaggtcgcagcaggaacccaaggctggagaccctgagctgaggcgggctgccctcttgaaccctacagaggctggtctcctgcatggtggagtgggtggggcagacccggcaggggagccagctgtctgccagcaggccttccgtgcctcccctgggctgtgcctcctgctaacctggacttgccagccttggctgcgttgctgctcagaggcaccagtgcttcctcgtgctataggcctcctctcccccactgctcttccaagggggggcacggttcccacctgtgcttttcctccagaccctgcctctgccccgttgggctctcccctgacctcaccagatggtctttctgtacaacacaagttctcaagcaccccctgcttgttgggacataattggcatctccaaaggttgttctctccctctgggctgtcggctctgagggcagggccagggtttggagcacagcgtatcctcgggaaatgcgctgagtctgtgtgtggccaggtcagagccccaggggggccctgaatccagagggccccagattgatgtttctagagacatgaactcctgaaaccttctctccaaacttgggtggagcacagccctgctctccaggtatgggctgggcacagcctgccccacctctgtgtccctgtcctcccactggcttcagtcaggtgtcctcagcccttcctgagactccagccactgtttataacctgggaaggtaccagaccctgcagagggtttgaattcactctgggtctcctgtaggagtcgctgaccccatacgttttgtttgcttctcccgctgagcgcaactagctccctggctcaggagaagtgctgtgtctttctggatcccatatgtgatttcctcatctctgcaatgggctgcccctcaccttctgccagttataaggtggtgaggtttaaacgatattgcccattggcccatccctggctccgggaccctccacagacggggatggtgctgcctgtgaggccctccggccctcacgttgccctgttgtaaaggaggcggggcgccctgcctggtgggcacagccctgttggccggatgcaaaccccggcagtaaacccctagagaccctgtcccaccctggctagcttgaaatgccttgggtatcagccacgtttgtaccacaggggtcgatttgtctctcttccacagcttttttgcctgtgaactaaagattgcccatgctcgagaagaggtctccttggagcactccttggaagctgcccctcttcccagggtccctttgtgatggtgatggcccctaggtgggtccactctcccatagagctctgtgccctggggcaccttcatgtaaccccttcactctcaggggcatgtgaaaatttaaataagaaaaccaagggaaagcatgtggagagagcacccaacaactattagctatcccccgccaacctctatttttgtcttccccaaacaaatatatatatatgtatatatatatatttgagacagaatctcatactcttgtcacccaggctggagtgtaatggcgcgatctcatctcattgcaacctccacctccgggttcaagtgattctcctacctcagtctctaaagtagctgggattacaggcgtccaccaccacacccagctaatttttgtatttttagtagagactgagtttcaccgtgttggccaggctggtctcgaactcctgacctcatgatccgccctcctcagcctcccaaagtgctgggattacaggcgtgagccacccggcccgctatattttacttataaccagtggggttgaatggaaacccatctctgaaacttggccaagtgtgatgctgcctgatgttgctggccgaagttcctgctctaggtagaaagtgagtttttggccgggcacggtggctcacacctgtaatcccagcactctgggaggccatttgagcccaggagttccagaccagcctgggcaacatagggagaccccgtctctacaaaaatgtttttaaaaaaattagcgtggcatggtgcacacacctgtagtcccagctgcttgggaggttgaggcaggaggatcatgggagcccagtacaggcacccgccaccacacccggctaatttttgtatttttagtagagatggggtttcaccatgttggctaggctggtctcgatctcttgaccttgtgatctgcccacctcggcctcccaaagtgctgggattacaggcttgagccactgcacccagcctagaaagtgtgtttttacagaggcatgctgactatgagaacatcctcctcagagcacagtgggtgtggctggtgggagaagctgggtcaagtggtacagtctgcctctgtgtgaggactcaagcttgtgagaagacctggaagcgactcacagggtggcacatccacagagcagcactaggagggagggaactgctgccatacacatcaggccggatgggcctccagggaaccaggcccagtggcagaagccagacctacggtgtgatcccaaatgcgaacctacagtgacagaaagcacacaagtggctgcctggggacaggtgagcgtgggcggaagccagagggcagatgaggaaggacagaggcagtggagatttgctgctgactgtgcaccggtcgaaaccctcaggttgtgcttccagtgtgtgagtttattgtgcgtcagttacacctcgatcaagccaggcccacctcggccagaaggcagccatctctctgcaggcctggctcaaggtctgttgcccaggtccttctctgagagctcaaacaagccccttgcttcctgtatccactctctgtgtgcccagtggttaggccttcctcggctgagtgctcagctcaaactaaaactgtcatcagtgctgtgtccttgctggctggtgccgccagggcctagggcctgggaactgtcagcctggggtgactggtcatctgagacccccacaacccaagagtcacctcttctcgggtgctgggatcccaggagccacccacaccgactgccaggcaggaccaggctgctggccctacgccagcctccctgccccgcttggctgtgtagcataagccagtcctccctctcagcacccccaggccagcgccctccctccaggaccctcaggaacctgcctgtgggggctgtgacccctgccgtggggaggtgcacatggggagagcgatatgggacggcgagagagaagggacttagggcaggattcgggcccagtgagaggggcttgaggaagctggactttgcttggatggatgccctcaggaggtgcgggggcagctctagggtcaggggtctttctttagcagaaggaggaaggaagccaggccagagctggacagccaggcagctgggacactcaggcagctggtgcagggcattgatggggcttctgtggtcagggcaatgcacgtttgtctgtgctcagacatgagtccggagaggcttgttcttctgattcatcgtgaggtggaagttgtgggccccgggggtcgagttatgtgacacgggtacgtttagcaggagaatcagggcctgccggatggcagatacacagagtgtgtttccactgtatccacagacatgtgccaagccctccaagccccagatttgattctccagaggaggcctgagcaggtctttagggaaagcctgggtgtaattctgatgtgcgcgggctaagagccctgtgtggattcctgacgcactgggtccagtcaaggcgaccctgagggcctttcccagccttgcccctgccggacacctggccccaaagccggctgcaccctccagaagcaggctacccttcccctcccaggaatctggcctttccggacactgctcagtgcctgagctgaatctgacaaactgggtgatattagtgaccaggggcgtctcctgcttcctcttgaatcgcttttcacctggagtatgagtgcctcaatgcagaggaggccgggggaaattattgagccctcatgggcacccagaggcatctggaagacaggaggtttcagtcaccacgttggacttggaggcaccaaaagatcataactgtgcacatttggtgtgacttaatcattcatccctcagtcttcatatctgtaaaacgaggataatggttcctctctgtaaggtggctgtgacagtcacatgtgctgacgtttgtggaatgttcctttttacctgcaaaccttgagtgctcaatgctgtggccccagctgcttttccaccccaacgcttggctccgagggcctgaccccctgaagcaggggcacatttggtgtcctgtccttccctgggtccacccaggtcccctttctctctgtgagttctagagtttagaaaacatcaggcgaggcttcacaggaacagtgctggcttagagaaggtgaggcctccacctgggggtgagtcaggcatggaaggcggccttgaaggcccatccgtgtgctggctccactgcccctggcatgagggcctgcgtgccctgaccctccccacagcccctctgagaggctaggtctgagcctcaggagtgtgtgggattggagctgggccgctgggctggggtctgtctgtgggcgaagctgacctgctgagtggaggccacgggtgtgagggagccacgtggttgcaggggctcttccagaggagaggaaggaaagtcatctgaggacatggggcctctgcccaggtgggcagggagggtgggctgtggctagtctccagggtgggagcaggccatctgcacagggtgggtgactttggcctgaagggtgaggcttcccgacctcagaggggctgcagcaggcctgtggggagaggcggtctgggctgctcccgcccaccctgtggggcagcaggcctcaggccaggatcgcgtctgaaccaccctgtgcgctgccccagcataccgactcgaccccaaggccagtgttttcatccccacgcacagcatttaactagtcttgttagagtccaggcccgtgctgggtgccagggaggtcaggccatgagcaagacatacatacaggccctggacaggggcttccgagccctctgggtagtaaaggttggcagccttgtgagaattcaacgaaggctctgagcactggcactggaagccctccccacatgggtgtgcaggcacctcctgcgtggcattcccagggcccagggaccagtggacggcagggaggctcctgctctgaatccccagctcctgaggacagcgcttgagtgatcctgtctcttcctccctccagtgccgggcttggagctgtgagtggagctggggccctgtgcatgttttagtgagggttccagtcacatgacacttgcctcccggtctgcagggagaccaggccccgaggggacatgcttggttgtcagtgtgagtgggacagggatacagggcacaggagacaggcctgggtggcgcagtgaggctcaggggtgatgggccctgaagaggaggtgccaggcaccagcccccattctggagctggagggtggtgggcagaatgggagctgcgccttggagaggctaagcgggccctgggcacctcggatcctccatcccagccatgctagttgggggcactgcccacctgtgcaccccccagtggcagaggaggagaggacagctgtggggactcccctgctgcccccctcctccttgggtccccatccccagccaagagcacctcttcccaccctcccttgggatctggggccttggttctggctccgtgacccctctcagtgtcccaactttagtttgtttctcagtgtgcccacctcccggagctccccaaagagtaacgggagagtgatgaaaaagctggggagcgttggggcaagaacaccgttttgttgggtgcatgttgtcatgccagggggcagagagatgcaggcagggctggggaggctttaggatgcaggggaattttctgtgccctatagggagggtcaccccctttgctgcccttagagacaaccttgcctggggccccagtgccctggcctgtgaggtgggatggcagccattttgctcctgggggcaccccacaggctgtcccaggctgcctgtctgccctggaacttgaaggaggagaccctcaatctctaagcagagggaccactatcacacacctcctttccatgatctaggatacttttttttttttttttctgagacggagtcttgctctgtcacccaggctggagtgcagtggcgcgatctcagctcactgcaacctcctcctcccaggttcaagtattctcctgcctcaatctcctgagtagctggaattacaggtgcacaccaccacgtccagctaatttttgtatttttagtagagacagtgtttcaccatgtccagtctggtctcaaacttgtgacctcaagtgatccacccacctcagcctcccaaagtgctgggattacaggcttgagccaccttacccagcctaggatacactttttaaaaaatggtataatacttgtgaaatgaaaatgcatttgtaattgatgtgtacatttaacatagtgatttttccttcttcctcaaaagctctccttgacttagtggcatttttgtaagcaggaaacaggacgctgtaactgcacatgtggtctggggccagtgtgtggcatcccagggaggtcccaagccctcaccccaccgggagcctcccctactgctgggtcaacctcctggccccatgggggttctcaaagcagcccacgtttctagggcatcctcagagggactcacaggagcagttgggccagtgccccagggagggggcagcctctctaggggcctcttgggaagtgtgtgggatcaggcctgtctgtacctgaggaaggaggagccactggccactgcctgctgtgtccctggtacccctcatatggagaggtctcctctcaggacaccatggagagctgttgtttctgatgatacccgtgtcccaagtctgcctaggcagctgctgctgcctgtggccagaggctttctgggagctggctctgctctgctccctccataagcccagtcctgggagcctctccagctgtccatcatccacagccagcatccaaacggctgctgctcagacttccaattccgaattgcccaacacctcccccctgcaaggacacaggttcccccaggtgggctgtctgcgtccacaaggtgggcacatagcccatgggaagtagggcagattgtgggggctacagtgccccaagcaggggtgcagtgggccacagggtggtatccctaccccatgtccctaccttcagatgccctcgtgatggggcctccctcggtagacaggggactgaggtgcatgtagaggtgagcagagccacacgggaaggggaagcaggagtcagcgtcaaatcccctgccactgtacagtctttccaacaagaccccctcagatggcagctgaggctgctgggcctctgtcatgcatgcgcttctgtggggcattgtcagagggagaggcttctgtcccatgcaggcctgaggggcttcaggccctcggtatagcctgggcagcccccgagttccgactttgggccgttcactcagctccttggaatgggttcattctgctgcacaaccaaaaaaaccagcctgctgggtccccttgcagagctgtgggagcgcaggcaggacatgagtccgccagctttctgtgctgtgaacaccggcgtcctgaccgctgtggagcggagaagtgcctgcactttgagaagggtggttgggataggacctgccagaggccagcatgtgcctttcctgccctggcagccaggcagctgtgacctgggaatgcagggcagagaggacactaatctggatgcatctgttggtggcgccaactgtcaggagggtgctggcgccagctccgcagccagccctggttcgcatccatcaaccatgcagtgctggtgctcacactgttgtgtcttctcaggggaaggaagctcacatcttcccatgagacaggcagctgggagtggggtgagaatgtgctctcagccagaaccgggtgcggttcatgcgggttggggagtttgctgcactgccgaggcctgcccttcgcccaccgtgcaggtgctccgggcctgagtgggcggctgcacatggtctctatccgagagggtggagtggacgggctgggggggctccagtctgtctgcaaagcagcagggcagagctcgacactatgtgggtcacatgaagaagaagggtaatgacatggctcttggccactgtgatccttctgactgctgctgtcctcagctcatccgtgagctggaacaaggtcccaaccctcccggggcctccatggacacagccagcaggaaatgcagggttgttgacctgctctgccagtctctccgggcttgtgtaaggcccaaatgagacatcgtgagtgaatgtttgtagaagctggagacctggtccaaattcaaatgctgccacctgccaggttggtgcttaactgtcctgaacttcagtttccttacctggagaatacagacaatcagaattgcctcatgttaggattaaataatgtctaaaaggcacagggcacgtggcagcactttatccgtagctattttattattacaggtgttatttttacagtgggggagatgagccattccaacttcacagcttttattctttcaagagttggctgagcgcctgctccacggcacaccctgcgctggggctggggatgcagaggctcaggcaggccctcccttctgacgagctcatgggtctagtggtggagacaggtgggctggcccacagcgacagcgtcacctgtgcagtgggagatatgaccagggcatggctggtgtggggagcccaggaaaggaaactctcaaccctgtcaaaggggaaaggagagtcttggggagccgagaggatggacaggtgatagcagaccacagtgtggtgtcaggcaggacacaggcacaaggcacaacatcggggtgccgttctgcctccaggacctccaaggaggctgcacagatgaagcgatgccttgatgagactgactgtggggagtggggagccatcgggccagactgtgagctggtgggggtgggggggactgtgagccgggtaagtccccgggcaagactgactgtcgggtgggttgggggagcctggcccataaggtgggacgccctgcacggaggcgagcgagcacgatgtgcagaactccaagagtctcaggaggagaccgcaggatgggagagagatctgaaagccgagcaggactgaggtgggcctgagccccgtcgcctcctgcgggcggtggagagctgcagtggggagacagtgagatgcagcttgtgctgagtctcaagccagcacgcacaggaggcaccactcctcagggttgtgctctgtgagcccagagcccaggagcagacagaaaagggctgagcgacacaagggcagccttggcagctgggagctcagcagcagccggctgccccatctggaggctcagagcagactgatcgccctgggtggggcctgccacctgggcagctgggaagaacctccttccagcagcctgatgctcccatcgagggtcagcagggcatgtccagcaccaaggccatgcatgttttgtgctttgggtcccagggggctgtttctcaaatgtcctgcttggccttcatatggcaccatgagggaccccggaatccccacacctatcccaaggcccaacttggggtctgccagaggatctgcatgatgattcacagtgcgggttagctactgtgcacgtggccagtgatggatcctgatggtagaaaattcagagtagctggtggaggagggagccctgagcctgaggtaggagagcctctctgggcacacggcttggctggtctctgccttctttcctggaacatcctgccggcttcacagagttgtttttcagacttcctgagtccaggtgaggtctagacaaggcatctcgtgcagccacctctcccttcctttctgaacctcaatcatgtgctactctgcaaagcacacggccagtcttcacctgcctgtttcacaggtgttgtgagggaggggcatgtcttcgctcagcaggcctgggcctcctgtgtgtcccctggggatgagctgctgagccaggtgtgggctgtccgtggtcctggtgcctgtgcacatcggtgtccaggaagagcaacgtctcccgttgtctttggctctcctaggggcctatggtgcggtctgcccctctccagtgggagtcagcacagcaccaggacacagcatgtgagcagcagccttgcttgtgtccagtgttgtgggaaaaccacacaagccctgccgtcatcccaggaatggtgggccctactgtgtggctcaggaggtgagccggaggatgcaggccacagagatattgtagtgagcttagttagccttgaaggatggacagtcatacctacaggctagtctcagccttgcccataccttgctgtgagattctgggcaggtttcttagcctgtaggagagaggtcttagtcctcttgtctgtcaaatgggaatgtcctgccctgctcacctcatagggtcactgtaaggataaaatctgatgtgtgtggaaataacttgggaagccaagaaacatgaccaataaaagagaaacggtaaataaaaaaattatagcatacctgcacaaaatggttcataaaatccacagaatgattaattacatcatagctgtaaggaacattcaagtgttaaaattataggccaaaccctgtccttggtgcttggggatcagcagtggcacagtctgggacccctgtcctggagctcatgctttggcagggaggacaaataacacacatttattctttggagtctggctctataaatctgaggtcatcacgccccacctcttcctaggaagcggggtgggcacaccctggggaagctctaccccagcaggtatggccaagaagacggggctgtcactcctgtcctctgataggctggtgctttggctgcaccccaggagggtcaggctgctggcattctcatcctcagccccatgttgcagaagctctgtttctggcaagtgctgctgagaagtctggggatcacttccacacccaacccacgctatagggtggaggcctgctccaagcacagcaggctggccccagtgcccccatctcatctcactcacaggatggaggttccacaccaggaggggcgagacaggaagaccagggactgccaggcaaccagtgccagctggtagaatggggatgtcatcaggaaaagcaggcccccacccccagctctgtgttctgatgcagggcttctgcccagggggaaaggcagggcgtgcagctttgctggaggagtctgacttttatttatttatttatttatttatttatttatttatttatttattttcgagacagagtctcactctgtcgccgaggctggagtgcagtggcgcaatctcggctcactgcaagttctgcctcctgggttcacgccattctcccacctaagcctcccgagtagctgggacaacaggcgcccgcgaccacgcccggcaaatttttttttttgtatttttagtagagacggggtttcaccattcataggatggcctcaatctcctgaccttgtgatccgcctgcctcggcctcccaaagtgctgggattacagacgtgagctaccgcgcccggccggaggagtctttttacttgaaacaaaaagttggagaacccatgccttaagggtactgccaaaaacagtgcagctcttagtggggagcaactaagaggaagctggtaggttcatgagtcaggggtcaccaagaccactgtgaggcttgacaatccactgggactcacaggaccatgagtgtaactctgaaaagctgttatactcatggttatggtttattacagtgaaaagatacagatttaagtcagcagagggaagaggtacagaaggtggagtccaggagagaccagctgcaagcttccaggtgtcccctcctaggaagtggcatgcagtgcttaatcttcagcaacaatgtgtgacaacccacgtgaagtgttacaaccaggaagctcccctgagccttggtgcccaggtttttattggggtcagtcatacaggcatgcatacttgcatgactgaacttaactattcagactccagtcccctagggcctcaggcagaccaaagaaggcaggatatcctaagacctcagagatgatctctcaggagccaatcaatagccagtgttttctatgaaatgtgcagtttgaataatctaagccggctaagtcgttattgcttacttcaagaaaaaacaaaaggcagggcaaccagaagtttaaacaaataaacaattgaccaatcaaacaacaaccataacaatatcaacaacccacaggacaagtattagtatcagaattgctataatgttatctgaaatgtccagttttcaacaacaaaacaaaaaataaaagacaggcaaagaaataggaaagtgtgacccatatacagggcagaaagcgagccatagaaatatctttttgaaggggtgtcattggtggcctcaggagactaagacttcaaagcagctattataactcagttcaaataactaaaggaagccatgaataaagaattcaaggaaggtgtgatagcagtgtctcttcaaatacataatattgttaaagatatggaaaatataacgaccaaatagaaattaaccaaatgaaaaattcaccagaggggctgaacagtagatttgagctggtagaagaatccatgaacttaatgaatagagattatgtaatttgaagaacagatgtgaaaaagaatgaagaaaaatgaacaaagactcggaaatgttggacactattaagtgcaccaacatatatggggataaaaggagaggagaaggtagaataaaataattcccagatataaaaaaatggaaataatttgttgctagcagatttgccttgcaagaaatactaaaggaaattcctcaggctgagagcaagtgacaccagagaataattcaaatccacatgaataaatcgagattgccagtaaaagtgattatttaggtaattataagagatagagcaattgcatattttttcttcttaactgtttagaaagtgattgcggaaaataatccatgtatcattgtattggtggacctatagcatataggagatatacctaatgttaaatgacgagttaatgggtgcagcacaccaacatggcgcatgtatacatatgtaactaacctgcacgttgtgcacatgtaccctaaaacttaaagtatattaaaaaaaaagaaatgtaatatgcttcacagtaaaagcacagaggtgattgggaacaaagctgcagtggagcttagcaggtggcaacccaaatccatagaaggaaatgaagagaatgggaaatttaaaagttaacataggctgggtgcagtggctcacgcctgtaatcccagcactttgggaggccgaggcgggtggatcacgaggtcaggagatcaagaccatcctggctaacatggtgaaaccccgtctctactaaaaaaaaataataatacaaaaaattagctgggcgtggtggcgggtgcctgtagtcccagctacttgggaggctgaggcagaagaatggcatgaacccgggaggcgaagcttgcggtgagccgagatcgcgtcactgcactccagcctgggcgacagagcgagactccatctcaaaaaaataaaaaaataaaaaagttaacataataaactctataaatatgtacttgcctctccactccttaaaaaagacataagattatatgaagcagtgtattgatctgtttgtaacatatggaaacacaatatgtgcaacattagtaatgcacacatacacacaaagaagagagtagcgctatgtaagagtaaagtttctatatctgactagaattaagtagtataaatctgaagtagattttacaagctaagatgaatattgtaagccctagagcaagcactaagaaaagaacttacatagtaaaaaaaaaaaaaaaaaaaagcattaaaaagattaaactgtcacactagaacatattcactaaatgcaaaaggaagaaccgaggtacaaaaagacaaaacacataaaaaataacaaaaatcaaaatggcagatataaatgtaaccataccaattaaacaacccaaactaaggcagagactgtcagaatgaattttttcttaaaaagaaaaacaagatccagctatatctttttataggaggtactttattttttaaatttattttatttatttatttatttgagatggagttttgctcttgttgcccaggctggagtgcgatggtgcaatcttgctcactgcaacctccgcctcccgggttcaagtgattctcctgcctcagcctcccgagtagctgagattacaggcattcaccaccacgcccggctaattttgtatttttcttttttagtagagatggggtttctccgtgttggtcaggctggtcttgaaccccgacctcaggtgatccacccacctcggcctcccaaagttctgggattacaggtgtgacccaccacgcctggccaggagataccttagattcaaagatgcaaatacgttgaaagttaagggtggaaaaacataccatcataactgcatgagctggggtagctatataaatatcagcctacatagattttaaaacagaagttttaccacagataaagagggacattttataatgataaaagtttagatctatccagacaataaaacagttataaacatatgcgcacctactaacaggacccaaaatacatgaagctgaaacaggcagaattgatgggagaagcaaacaatgtaacaacaatagttggagatcaccctttcattcgttgatagagcaactaggcagaaaatcagaagacttgaacagcactacaaatcattagacctaacagacatctataggatgctccaccaaacagaagtaggacacacatttttctcaattgcatatgaaatatagtccaagggccaggggcagtggctcatgcctgtaatcccagcacttcgggaggccgaggcaggcggatcacaaggtcgggagattgagaccatcctggccaacgtggtgaaaccccatctctactaaaaatacaaaaaattagctggacgtggtggtatgtgcctgtaatcccaggtactcgggaggctgaggcgggtggatcacctgaggtcaggagtttgagaccagcctggccaacatggtgaaaccccgtctctatgaaaaatacaaaaattagctgggcatggtggcaggtacctgtaaccccagctacttgggaggctgaggcaggagaatcacttgaacccaggaggtggaggatgcagtgagctgagatcacgccactgcactatagcctgggggatagagcaagactctgtctccaaataaataaacaaataaatataaaaagaacaaagttacagaagaaaacataagagtaaatctttgcatcttgggttaggcaatggtttcttagatacaagaaaagcagaaatgacaaaagaaaaattatgtaaatccgggccaggcacagtggctcacgcctgtaatcccagcactttgggaggccaaagcgggcagatcatgaggtcacgagatcaagaccagcctgaccaacacggtgaaaccccctctctactaaaaatacaaaaattagctgggcatgatggcatgcacctgtaatcccagctacttgggaggctgaggcagaattgcttgaactcaggaagcggaggttgcagtgagccatgatcgtgccactgtactgcagcctgggaaacagggcaagagtccatctcaaaaaaaaaaaaaatttcaaatcaaattgtgtatctgataaagaatttgtatccagaatatacataaacagtccttacaggccgagtgtggtggctcatgcttgtaatcccagtacttagagaggccaaggcaggagggttacttgagcctatgagtttgagaccagcctgggcaacctagcaagactccaactcaaaaaaaaaaaaaaagtaaaaacaaaaatctgtacaactcaatagtaaaaacacaaatacctcaatttaaaagtaggcaaagaaaggcgtaagaatggtatgagggactttacggacacgggaaagggtgggagagggctaaggggtaaaagactacaaatgtgtacagtgtaccctgctcgggtgatgggtgcacccaaatctcagaagtcaccactaaagaacttatgtatgtaaccaaataccacctgttcccccaaaacctatggaaataaaaaataaaaataaataaaaaataaaagtaggccaaggattatgcaacctcatgagagaacctgaaaacaatgaataaaaattaaaaatagaaaaggatttcaacagacacttctccagtgaaggtatacaaatggccaataagcacatacaaatttcttccgcatcttcatcattagggaaatgcaaatgaaaagcacagtgagctaccacttcacccccatcaacacgactaataaaatatacagcaagtgttgtcaagtatatggagaagttgagaccttcatacattcctggcaggattgtaaagtggtgcatctgctttgaatttggtagtccttcaaaatgttaaacgtagagttaccacatgacccagcaattcctctcctatgcatttatccaagagaaatgaaagcacacatccacacaaagacttggacacaaatgcacaaagcaacctcataacggttcaaaatcgtgaacaactcaaatctccatcagcaattgagaggatgaacaaattctggcatatccatagggtggaatactgctcaacaacaagagtgagttaggcggggcacagtggctcacgcctgtaatcccagcactttgggaggccgaggcaggcagatcacgaggtcaggagatcgagaccatcctggcaaacacggtgaaaccccgtctctactaaaaatacaaaaaaaattagctgggcatggtggcgggcgcctgtagtcccagctactcgggaggccgaggcagaagaatggtgtgaacccgggaggcgaagcttgcggtgagccgagatcgcgtcactgcactccagcctgggcgacagagcgagactccatctcaaaaaaataaaaaaataaaaaagttaacataataaactctataaatatgtacttgcctctccactccttaaaaaagacataagattatatgaagcagtgtattgatctgtttgtaacatatggaaacacaatatgtgcaacattagtaatgcacacatacacacaaagaagagagtagcgctatgtaagagtaaagtttctatatctgactagaattaagtagtataaatctgaagtagattttacaagctaagatgaatattgtaagccctagagcaagcactaagaaaagaacttacatagtaaaaaaaaaaaaaaaaaaaaagcattaaaaagattaaactgtcacactagaacatattcactaaatgcaaaaggaagaaccgaggtacaaaaagacaaaacacataaaaaataacaaaaatcaaaatggcagatataaatgtaaccataccaattaaacaacccaaactaaggcagagactgtcagaatgaattttttcttaaaaagaaaaacaagatccagctatatctttttataggaggtactttattttttaaatttattttatttatttatttatttgagatggagttttgctcttgttgcccaggctggagtgcgatggtgcaatcttgctcactgcaacctccgcctcccgggttcaagtgattctcctgcctcagcctcccgagtagctgagattacaggcattcaccaccacgcccggctaattttgtatttttcttttttagtagagatggggtttctccgtgttggtcaggctggtcttgaaccccgacctcaggtgatccacccacctcggcctcccaaagttctgggattacaggtgtgacccaccacgcctggccaggagataccttagattcaaagatgcaaatacgttgaaagttaagggtggaaaaacataccatcataactgcatgagctggggtagctatataaatatcagcctacatagattttaaaacagaagttttaccacagataaagagggacattttataatgataaaagtttagatctatccagacaataaaacagttataaacatatgcgcacctactaacaggacccaaaatacatgaagctgaaacaggcagaattgatgggagaagcaaacaatgtaacaacaatagttggagatcaccctttcattcgttgatagagcaactaggcagaaaatcagaagacttgaacagcactacaaatcattagacctaacagacatctataggatgctccaccaaacagaagtaggacacacatttttctcaattgcatatgaaatatagtccaagggccaggggcagtggctcatgcctgtaatcccagcacttcgggaggccgaggcaggcggatcacaaggtcgggagattgagaccatcctggccaacgtggtgaaaccccatctctactaaaaatacaaaaaattagctggacgtggtggtatgtgcctgtaatcccaggtactcgggaggctgaggcgggtggatcacctgaggtcaggagtttgagaccagcctggccaacatggtgaaaccccgtctctatgaaaaatacaaaaattagctgggcatggtggcaggtacctgtaaccccagctacttgggaggctgaggcaggagaatcacttgaacccaggaggtggaggatgcagtgagctgagatcacgccactgcactatagcctgggggatagagcaagactctgtctccaaataaataaacaaataaatataaaaagaacaaagttacagaagaaaacataagagtaaatctttgcatcttgggttaggcaatggtttcttagatacaagaaaagcagaaatgacaaaagaaaaattatgtaaatccgggccaggcacagtggctcacgcctgtaatcccagcactttgggaggccaaagcgggcagatcatgaggtcacgagatcaagaccagcctgaccaacacggtgaaaccccctctctactaaaaatacaaaaattagctgggcatgatggcatgcacctgtaatcccagctacttgggaggctgaggcagaattgcttgaactcaggaagcggaggttgcagtgagccatgatcgtgccactgtactgcagcctgggaaacagggcaagagtccatctcaaaaaaaaaaaaaatttcaaatcaaattgtgtatctgataaagaatttgtatccagaatatacataaacagtccttacaggccgagtgtggtggctcatgcttgtaatcccagtacttagagaggccaaggcaggagggttacttgagcctatgagtttgagaccagcctgggcaacctagcaagactccaactcaaaaaaaaaaaaaaagtaaaaacaaaaatctgtacaactcaatagtaaaaacacaaatacctcaatttaaaagtaggcaaagaaaggcgtaagaatggtatgagggactttacggacacgggaaagggtgggagagggctaaggggtaaaagactacaaatgtgtacagtgtaccctgctcgggtgatgggtgcacccaaatctcagaagtcaccactaaagaacttatgtatgtaaccaaataccacctgttcccccaaaacctatggaaataaaaaataaaaataaataaaaaataaaagtaggccaaggattatgcaacctcatgagagaacctgaaaacaatgaataaaaattaaaaatagaaaaggatttcaacagacacttctccagtgaaggtatacaaatggccaataagcacatacaaatttcttccgcatcttcatcattagggaaatgcaaatgaaaagcacagtgagctaccacttcacccccatcaacacgactaataaaatatacagcaagtgttgtcaagtatatggagaagttgagaccttcatacattcctggcaggattgtaaagtggtgcatctgctttgaatttggtagtccttcaaaatgttaaacgtagagttaccacatgacccagcaattcctctcctatgcatttatccaagagaaatgaaagcacacatccacacaaagacttggacacaaatgcacaaagcaacctcataacggttcaaaatcgtgaacaactcaaatctccatcagcaattgagaggatgaacaaattctggcatatccatagggtggaatactgctcaacaacaagagtgagttaggcggggcacagtggctcacgcctgtaatcccagcactttgggaggccgaggcaggcagatcacgaggtcaggagatcgagaccatcctggcaaacacggtgaaaccccgtctctactaaaaatacaaaaaaaattagctgggcatggtggcgggcgcctgtagtcccagctactcgggaggccgaggcagaagaatggtgtgaacccgggaggcggagcttgcagtgagccgagattgcaccactgctctccagcctgggcgacagagactctgtctcaaagaaagaaagaaagaaagaaaaaaaaaaaaaggagtgagttactgacacattcagcaacatagatgaatctcaaaataattacgcctagtcacaggagccagtcacaaagaactatattgcatgattccatttataggaaatacccaggatcagcaggtctatagagatagaaagtcaattagtagttgcctggggctggagtgaggggtgaagtgttgaaggggagtggggagtgaatgttaaggagtatggcgttttggccaggcacgctggctcacgcctataatcccagcactttgggaggccgaggcaggcgaatcactagaggtcaggagttcaagaccaacctggccaacatgggaaatcccttctctactgaaatacaaaaaattagccagatgtggtggtgcacccctgtaatctcagctactcaggaaactgaggcaggacaattgctggaacccaggaggcggaagttgtagtgagccgagatcatgccactgcactccaatctgggcgacagagccagactctgtctcaaaacaaaaacaaaaacaaaaaatacagcaagtattagtacaaacatgttctaagagtagattatggtgatggttgcacaactctgaatttatttaaaaacattcaattgtctactttaagtgggtaattggtatggtatgtgaattatagctcaacaaatcctttttaaacagcgtgtgagtgatggcagctgtctgaagcacctttcctttgatggagacgcacatggctgtgtgttctgggagcagagccagccaaccagccagtacttcctgaacgtttttgttgtatgcaaagccgataaggtgatgcaagtgagaggtcatactccctgtcctcagaggagggacttgctacgtaagcaaggatttgattatgaaatctacaaccacagttcaaaattttaaagcatttagggagggttggagtagtcaaaacaggcatctcagaagagagaggaaattgccctgggccttctaagacaggcagaccaatgacagggatttagagaactgtgcatatgagggactatggcagcatcgtgtccggtatttaccaagtgctcccctttacagcctcctcgagtgccttctggggtaacccaggagatgttgtacagtccagttgctggaaagtcatgccttgtattaaatggaaatctctctcctgttaataatactcttagcactgacggtgcagttattgtttccagaacggtgctgagcctcggaaatatcctctcaggtcgttcctcccacgtgaggcaggttgtgtcacctcctcctcctagtcatcatggttattttccagatggaaggacctggccattaggtataaagtgatctgccacaatcacattccaaatcacacactcaggaccccctgcggtgctgtcgactgctgatctttctcttttctgatcctcgcggaaaaagtctagtttcctttccatgtgatggtgaataaagtcaaagataggttttgtttgtttgtttgtttgtttgttttgcctccagtcatcttttcttttcccttggggtcaaacaagctcagttcttaaatcattctgcatccagctggctcttgatctcaggctgtgatcaagtccgtcagtcctttacttgagtgtgggccttagactgaggggggatctctggtgcctgaccagcccagaggagcagtagactcacaccccattctcctgagggatgcatgtcagttgaggcattccatgacagaattagctcttttgactgccacattccactgtggactcaaatcctgggtcttttcttcatgtgctgctaagttaggtccagggacctgaagaggaaaactttagggtcgaataaaaacattgatctggctgggctcagttgctcacacctgtaatcccagtactttgggagtctgaggtggaaggattgcttaaggccaagagtatgagacagatctgggcagcacagcaaggccacatctctagagaccaaaaaaaaatttgttttaataaaatagctaggtgtggtggcatgcatctgtaatccagctactcgggagactgaggcaggagaattgcttgaacccgggaagcagaggttgcagtgagccaagtttgtgccactgcactccagcctgggtgacaagagcgaaactccgtctggaaaaaaaagaagaaggtgggtatggcaggcaggattttggcccacatgaccttagtcctctggtgctacttccatgctatgttatgtggcaaagggacttctcactaggatgcatgatgttagccgtgggtttcgtgtagatgttctttatcaaggtaaggacgtctctccttgtatccttagcttgctgagggtttttatcacataggtatgttgaattctgccagatactctttctgcatctattgattggtctatgatttctcttttctagcctgttgatatgatggattatgttaattgatttttgaaccagccttgcgtacctgggataaattccacttggtcatggtgtacaattcttttgatacattggtggattccatctgctagaattctgttgaggatttttgcatctgtgtttatgagagcagttggtgtgtagtttttctttcttgtaatatccttttttgattttgtaatgctggcctcctgggatgagttaggaagtgttctctctacttctgttttctggaagagactgcaaataaacggtatcatttgttccttcaatgtttggtagaattcatttgtgaaaccatctgggcctagtgctttcagtttttgaatgctaattattgattcaattcctttaatagatataggccttcctgaattatatgtgtctcctttgtgaataggtaccagttctgtacccttgtgtctttcaaggaattgatcctttttgtctacattttcaaactggggggtatagagctgttggtaatgtccctgctatcttccaaaagtccatggtatctataatgatggctccttttaatatattattattattattttttttttttaatgagacggagtctcactctatcaccaggctggagtgcagtggtgcgatctcggctcactgcaacctccgtctcccgggttcaagtgattctcctgcctcagcctcttgagtactgggattacaggtgcgtgccactgcgcctggctaatttttgtatttttagtagagagggggtttcaccatgttggccaggctggtctcgaactcctgacctcgtgatctgcccgccttagcctcccaaagtgctgggattacagatgtgagacaccatgcctggccaatatattgtattttcattttcattcagttcaaaatattttctaatttcagttgtggctttccttgggacataagagaatggagaaaaggaaataaatcaacaggcaatttctcccactttctgagtgtcatgagtcccttttcctcctctttcagcctgtactaagtcttccccagggctttctcatctgtgccctcatgcccacttccagatcaggagctaccagagataagatgaggaacttgcctcagcatccttcacgttccagccttctccccggtcccactgctgctgtttcctctgcagagtcctcaggcagccgccccctgcgccatgttttggcttcaacgctgcgtgtggtgggagcaaggtggatgtgtttttttcttttttttttttcttttttttttttttttggagacagagtcacccaggctggagtgcagtggtgccatctcggctcactgcaagctccgcctcccagattcaggccattctcctgcctcagcctcctgagtagctgggactacaggcgcccgccaccacgcctggctaattttttgtatttttagtagagatggggtttcaccatgttagccaggatcgtctcgatctcccgacgtcgtgatccgcccgccccggcctcccagagtgctgggattacaggagtgagccaccacacccggccaagggtggatgtgcttttactgcatctggacctgggactggagtctcctggacgtcttttccttatggaataatttcttacaaggctgtggtcaagatgagcctaagtaacctggaagcagcagacagtcacccagctggacatgggggttggcgctgatggcagaaaagggaaaggagagaacacttcccagggaagctgaaacctggctgactcttggctgggtgtgggagggtggggtggggcggggcaggtgttccaggtgcagagaccagctgcggtctgaggcgggagaaagcgtggtgtctttagggaatacaagctaaggatttcatactgtcgtggcactgtgtgcagcagaacatccaaggaaaaggcgaaatcagggagaggccaggtcaggcaggaagtaggactttgcaaacattctagggtggtcagattttgttgcaattttatggggaaagtatgactttcctgtagctgctgcaacaagctagtacaaatattatgacttaaaatgcagccagtgcattacagctgaaggaccgaagcccaaagccagccgcactgggctgaagccaaggtgcctgtgggctggttcgttctggaagcttcagagggtcggcttcctgccttttccagcttccagtggccgcctacattccttggcttatggcacccccgtccttaaaggcatcacttcattctctggttccagcatcacatcaccttccggtgatcatatcgggaccacctggataatctgggttatctccccatctcatgcacttcattacctcagccccatcccttttgccctaaaaggcaacagtcacaggttcttgggcttaggacacagacatcttgggggtccctactcagcctaccaagagggcatttcacagattttgattggagggagtgatgtgatacagctgtcatatttgaggcttagaaagatctgtctggccacagagagagtaggaggagtaagggtggaggcctgcagagtggttgggaagctgagaagtaatctgtgccggtgatggaaggtacagcagaggcagtggtgtgaggataggaaagaacactcaggagctgtaacccacagaacttggagccggatagatgtggaatgggtgagggaggaagtctcgcagggctccgggtctctgccttcatcagctgggtcactggtggtgtcactgactgaagagggagttacccctgagataagcagggaatcttggtgagcagtgaggcccctgagtctgggaaggcagctggcagtagctatttgattgtgcccagcacataggcagtgcttgaatctgtgatggcacgagatgactcagggactgtgtctagaattcgaaggagtgtagaagctgctggggaacaatgacctctgcagttagagagaagagagggtatgaaaggaagctagtgaggcaggggaatgccaggcagcagtcacgggcagcccggccagagcggggagctgacatatccgcattcagaccaagtcgtccctcagctagggaacggccgcctcttactgaggccacctgaaaccctgaaaggaaaaggtggagaatggttttgtgttttcggtgttaagcttgggggccagaggctcagactgggagcagagctgtttcttggaccctcactgtgtgcacacatggggtgctgaacaaggccccctccgtggaacccggtgtggccagcgggacccgctgagctctcaggctggctctggcaacagctgaaaagctccattatttgcctttctgggtacatctgctgaagaggctcagcgttttggggcagtgtgaatgtctccctgccactgagaacaatattcgccctctgctgtcaacccctgcagggcctcagagaaagacgctgctggagggtgggaggcctgcccactgtttcttccatgggtattgttgcttttccctcttgtggcacctcctccccagcccagggtaggctgaaggggcaaggacaacgctgaacagacgagatgggacctagcccccgggagcagggtaggccctttggtaggactggatgtcacgagtgggatgtgtttcagatggagcaacgggcatgctgagatggaaaagcaggaatgggcatgaagtgtacaggggcagggctggggatggctcagctgaggggagccctccagggtccctagctgccaggacactgcccaggagagggggcaggaaggggccctcagccctgttccttccctttgaggctttgtgtttgtgcggccctcattttcctgcacccaatctcatatgaccttctcagaaccatgcaccttgaagtgagtgagggtcaaagaatgaaacaactgccccagttaccaacagtcagggatgaagccagggtggaaaccaaggtcttccatccctggggaggggaagggaactcactttgggggtgctccttatgtgccaggtatctaatttcttacaaggctatggtcaagatgagccagagtaacctggaagcagcagacggtcacccagcgagacatgggggttggcggtggtggcagagaagggaaagcagggaaggcttcccaggggagctcgaagctggctgactcttggctaggtgcagggtagggtggggcaggtgttccaggtctcctgcctcctcagctctcctagatctaagtgctgtcagcccaggaactgaggtttgcggaggaagtggctggtgctaggtaagccgtggtgaacatcagagtgtgctcaggggctccctagaagcatatctgcagtcatgggtgtcagtgggagacgagctccaacagtcacttcactttacccatgaaagcctctggggggcataaaggggccccgcctgtgggttgctgagctggggcacaggtcagctctctcaaccccacaatggcctggataaaggatttttctaaacctcagcttcctacacctagagctttaaaatgctcattaatatacaaaggctttcaaagaggctgggcgcagtggctcacacctgtaatcccagcactttgggaggccgaggtgggcggatcacctgaggtcagaagttcgagactagcctggccaacatggtgaaaccttgtctctactaaaaatacaaaaattagccaggcttggtggtgggcacctgtgatcccagctactcgggagactgaggcaggagaattgcttgaacccgggaggcagaggttgcggtaagccaagatcgagtcattgtactccagcctgggcggcaagagcaaaactccgtctcaaaaaaatatatatatatacatatatatatacacatatatacatacatatatatatgcatacacacacacacacacctgctttcagaaatttttaggaaaaaaaatctaactttatagcatttccaaaatcatctgatcactcatcccttcatttgttgtcttccaaatcctgtggacactatttcaggggatgcttcatgccagcaacctgggaaactcaggtccactctcccctacactggagaccttttgaaccctcattaatgaaaaatcaagcactttttcttaactcttgccagtggagaaggaaaaatggagagaccttatctccctggttttgaggttaattcttccccccaaataaagatccatggaacagggtgggtgtgggagcctatccagcgtcatgatgatcttggcacatgcctatcagctgtgagcctcaggtgagcactcagcctagcagaacaccagctgtgcatctgcaaaatggagcaacagggcctcgcagcaccgcagcgcggttcaggtcagggcaggcaatcggcccagctgggaataaactgttagctccttcctctgctggaaataggcttagccttataaaaatgagttaaagcctatttctagcagttggccatgttgataaagtggattagctcttcctctgcttgttatcaaaacacagggctcaagcttcagggagctggcagagagggtgtgtgagcgacatgggcccagcatcaggcgtgaccctatcctgatccctgttgcaaagcctaccctgactccagaaggcaccaggagcatgcgactgacggcagatgaacgtttgaaattgaggctgtcttgggaaacccagccctggtggctcctgcagccccaggtacttctatccaaagcagggtccccccaggccccctgcccaggcccctttccgggacttaggttcctgccatccccagccctcctccgcacctcctcgtttgagctgaatcacgccaattgtgtgtcccgtccccgtgaccactgggtacaatcgcaaatcttactgctggcaagttcttttgtctgacttctgcaagtcttttaatggggtttctaaagaagtcactggaaaggagactgttttcctgccagatcctcagcagagggaagaatttccctgttgtttcgggattatgggttgcaagggaggcgatacaaaggagcagaggagaagaatgggccaggacacaaactccgtatgtgtcagctgggagcagcagcacctcacggggccttggtgcactttgggggctgaggtcaggtctcgtggtcacctgcctgtgtggagccagccctgagccctgcctgcagctggcccagcacacacatgcctgcaccatccacatgcctacctggggcatgcatgcagaggcttggggtgttcgcctgtggagcacacctttagaggctgcaaggcagcaagcctctgagtcaggcagccaaggcagggctgtgggcactcgtgctcttttgctgccttccccagtctccaggggaatgggcacacacaggctctggagccaaagtgcccggattcaaaccctccactccctagctggtgtgactgggaaaagccacttgatctgtctgtgctgtgtcttcattatctgtcaaatggcgatacagtgcacacctcatatggttgtcataaggctggcctgtggcaaaggttcaacaaatactgtcatcagcattactcccatcttatgaaggaagaaaataggccgggcacggtggccacgcctgtaatcctagcactttgggaggccgaggcgggtggatcacctgagatcaggagttcgagaccagcctggccaacgtggtgaaacctcttctctactaaaaatacaaaaattagctgggcatggtggcgggcacctgtaatcctagctactcgggaggctgaggcaggagaatcacttgaacctgggaagcaggttgcagtgagccgagactgcgccattgcactccagcctgggagacaggagtgaaactccatctcaaaaaaaaaaaaaaggaaaagaaaagaagacccactttttacttagctaactaatgacagaactaagtaggacatctgtctaattccagttagtggctagcggcttctttttagaataccaagctgcctttcagaagccagatcgagtgatcctggggctaggtgggtgatgaacactttggaggggtggggtttggtgcaggccatactgtcttggatttccaggtacccctaagttccctggtccatctgatttcatccaggccgctttgcaggaagtgacagctgtttggggttccttggtgccccctgccggatagattgcatctaacgttttcctgggttgatgaaagccctgggtgctttgaaactggctggctctccagattcaggagggatgtggatgtttttgtctgcctctgccttagccatcctgggcccagcagctcaattcctcaattcaaccctggtttttctttcactaattaaaagaagtagcttttaactctcctttttacgagcagcttaccaactgttctgccccagcgactcaccccacgctgggggatctccctatcagcaaaaacggaggctcagtccctgcagatgtttggtggttctgttgcattctgttctttctccttttcagtagacaaactacaaggcggctgtaccaacagtttatcctcttgtttcttcctcatgtgttgggaaaacaggtcccaggaatcctggtggaagcacattggtggggagctgaggagccttctgttcccaagtcattctgctgacatggccaggccctcctcaggcccacaaggtgtgtgctcagcacgcctctgtctgtgtggccttggagggatcatgtctctgcaccttttctttcttacatgacaaataaacaaagtctgctcaaaattccttaaagggtactctgaggactcagctagtgagtgggaatacgactgctttcataattaagttaaactttttaaggagataattatagactcacatgcagttctaagaaataatacagagatctatcatgtaccctttactgttccccccactggtagcatcttgcaaaatttagcacagtctcacacccagaatcttgacagggacagccacatggaacattgccatcaccacagcattggtcatgcccttctttcataaccactgccacctccccatctttcaccgctgacaacccacagatctgcggtccatttctataattttttcatttcaagaatagtataaaatggatccatatagtatgtaccattttgggtttgaatttctttgctcagcattattctctagagactcatccaagttgtgcatatggcatgtaattgccataagctttggttgttttccaggtctcctacaaagttggttctggcaactctggttcgttttttgatgtttctgttggagttctctagtctgctattttgctgacatcattcctctggaagatgactttaaaattagaaaatattctgattttccttctcccttgttccctttgtattctttttctctcatgagctctatttcttctgtcttgtggctgtcccttagggcttttccatcagccttattctcttgttcctccacatacaaactctagattagcgcattgcttggctttatctacagatcgatggccccacatcagtctccagccccgatatcactcttttccatctgaccacctcctggatacctactgtctgagtcagttttctgttgctataactgaatacctgagactgggtaatctttaaaaaggtttattttggttgatggttctggaggctgggaagtgcaagatcagacagccacgtctgcttggcttcagatgagagcccctttctgcatcaacagctggtggagaagtggaagggaaagcaggcaattgtgaaagtgtggccccactttctaacaaccagctctcatggcaactaattcagtcctgcaagaactcactcactcccaggagaattaacctagtccctctagagcagcattaatccccccgatgatcaaatcacctcttagatttcgccacctcccaacactgccatgctggggatcaaatttccaaggcatgaattctgagggacacacttaacccatagctcctaccaagatattccgcaagtggatcaaactcagtctcatttctctccctcccggctcccacacttgcttctgggcagcctcctaacatattttgtggtctccagtcatgcccactctagttatgtctccatatggaagccagtctttaacaccaatccagcttccctagtgtggcagacaagaccatttaacttcagcccattcttctttggctctctttctctttctgtaactcccatcacgccgcttcactgcgtggcacatgcctccagcctttccctaacatgtcacctctacctggaatgtcagctttttctccagccaggaaccttaccttctagttggttcagccgctcatagggtaggctttccccatgtcctcaccccgcaggtgattccctccatgtgtcaccctggattgccatggcttgtttgctgtctgtcttgctctacagcctcctgggggcacaggcggcctagggtttggaggggctgcatcacaggacgctgcctgacaggcagtaggagcaccgcatgaatgctgccgagtggatggaggactcaggtcctagcttatggaaatgccagcacttagagaacgctttctgtgggactgactgtgtgctaggtactttgtatgagcatcttttttttgtttgtttctttgagacagagtctctgtcacccaggctggagtgcagtggcgcgatctcggctcactgcaagctccgcctcctcggttcacgccattctcctgcctcagcctcctgagtagctgggactacaggggcccgccaacatactcggctaatttttttgtatttttagtagagacggggtttcaccatgttagccaggatggtctcgatctcctgaccttgtgatccgcccgcctcggcctcccaaagtgctggtattacaggcttgagccaccgcgcccagccatgatcatcttttcaaagagataggtattattagctcccactcaaagatgagcaaacaaaatctaagagagttaaagtaacttgcccagctaactagaggggaaggtgggatgtggacccagttctggatgatcccaaagcctgtgtgatctttcagggttgtcctttctcctgaagtaaaggctcagcagctcttacaaatatatggatcttatttgtcgtttttagatatgtgtgaatatatgcagtcatgtgtgtcagggcagagaattagtatgtatttgatagagtaaaataaaagggtctaggtacagtgattcctaacttggggcttttagtgccaaagtaagattatgaggaagccctccatggtggcgatggggtcctcagaacacacaggctccaacccgctctccgtgcatgccctccagctcacagggagctgcgtagaagcggtgctcccagggtaagggggacgcaggggttctagattgggcccagctcaaatgagtacatagcttagagaaccatggggcagaaagtggagaggggatgtgcttttttaaaaaaaatcatttattttaagatttattattttaattaacgaataaatatggtatatatttagtgtacacaacatgttttgaaatgtgcatgtgttgtggaaagcctaacttgagctaattcacacatgcattgcttcacatagttatcatgggatgtgcttttcattcacttctccagagtgccagacttctaaggcttagcgatcccaaacaggcattggcttgcccagtcatgcctcctggagccgtgcgtggtggtgcacatgcctctagttccagctgcttggggggctgaggtggaaggattgcttgaacccagtaggccaaggctgcagtgagctatgatggcaccactgcaatgcagcctgggtgacagaccgagactctgtctcaaaagaataaatatataaataatcatgccaccttctcaggggtccttctctgtcttgcataaaatatgagccacccctatccaccccaaccaaccaaaccttggaacaacatatctcccttattcttttttgttttctccacacctttcaccactatctgacatgtaattatttatcattcatcacttctgttagaatgtcagcgccatggggttggggattttgactgtttgctttaaccagtgtatcaccagttcctgaaacagcaccaggcactgaatctgtgttgaataaattaaggggtgctttagtcttgtttgagccttgtacggtatccagccctgtgcttggtactatggaaacgttaggaggagatgatggcactcctcctctcaggaagttaaatggagagttggattgtcagagactcagattacctttactttccttaaaagataataaagggttggcaaaaatttaagagcgaaatcataaatactttagggtttgtaggcagtatagggtctctgtcatatattctttatcttttttttacaacccattcaaaacacaaaaatcattcttagctcacaggctgtacaaaaatagatcatgggctagatttggtccacgaattgtagtttgctggcctttgagatagtaaattatcctgtcactgtttcatggatgctgtcagaagacatgagattcctgggtcagaaacaaaggattttattactcacaggccagaaagagcatcctatttgtgacagtttctgccttctgtaggacagagagccagagccagcacagagggcccaagtggatgctgtgtgagcagtgggtttgtatcacagctgaggacagtcccttcctttatggcaagcctgctctttgttctggaaggagacattacctcatccctcatagttgcttgctgcaaacacgaccctgagcaatgagtagggatggaaccaggctgtgtattcttggctttcccagcacatatgtgcagggatactcagggccacggtgattgcctctctcaacgttggcttcattcctttgcattttcaatcgaattaaatggagttcagtgcattccaggaaacacagttgggactaatgacacaaagataaatgaaatatggtccccatcctccagatattgacgggttctttgcagctgtaatgtattgtgttcacaacagaggcatacacattactctggcagtacaaagaggtgcctggccattttttgggcatcatggggacacataagagaggaagtagtttttggattggtcattaatggatgcccaggcaaggcaacatgggagaggaaaggatgtccaggtagaggctacggctcaggcagaggctcagaggcatgttggagcaccacggaagagcaaagaagcaggcatggctgagcacagcacaggtgggaggggcccatggtaatgagtccaggagggagggagtgagagaagaagctacattttccaggaactggttgcttagggacactaacttatcttcatattctgtcaggcaacttattgagcaaatattgtgtgcagatctttttaattatgtattaatttggaattcttctgtatggaagatatgtctcttttacaggagatttttttctttactttaaaaattgacagataaaaatcatatatatttatggtgtacaacatgatgttttgatatatgtatacattgtggaatggcgaaatcaagccacctaacatatgcattacctctcataacttgcttttttgatgagaactgtcaaaatctacccttttagtaattttcaagtataatatatcattattaactatagtcaccatggtatacaatagatctcttgaacttattcctcctgtctaactgaaattttgtgtcttttgaccaacactttcccaatgcccacaccccagcccctggtcaccatcgtttcactccttgtttctatgaggtgaattttttaacttccatatctgagtgtgatcatgtagtatttgtcttgccacatctgctttattttacttgcgtaatggcctccaagttcatccatgttgttgcaaatgacaggattttcttctttatttttttatttttttttatttttttaagacaaggtctcgctctgtctcccagactggagtgcagtggcacaacctgagctcgccgcagccttgaacatctaggctcaagggcttctcctgcctcagcctcctgagtagctgggactacagatgacgtccttcctttttaaggctgaataatattccatgtgtgtatataccacgttttctctctttgtttgccactgatggcccttccttgggtcgagtccatgtcttggcattgtgaaccacgctcacacagagcttggaggctgtaagcacgcgatgccatttactcctctcaacagcctgtgcagcctctcagcaggtgggaagcctgagacttactgatttgcccagggtcacagctggcggagatctgggacttgggtccaggcgggctgatcccatggcctgtgctcttctgcacgaccccctgctgcctcagaagtggaggctgaggaaggtggtgtcattaccgatgttacccagctgactgatggtggaacagggatttgtacccatgtccatctgcctgaaaaaccagctctgccttcccagaggataggggtcctcatatgcccacagcttcaacataatcaaagttgttaactaataatagaaggagtagcttgaattggagatgtggaaggaggcctgggacagggatagaagtgtagaggaattcccagcccctctttcccatttgtcttagctgtcctcagctccttccacaaaaggtaggttttcgtttttgtttgaaaaagggcttcggtccgtcacagaggctgcagtgcagtggcaagatcatagctcagtgcagccttgagctcctggactcaaatgatcctcctgccccagccccctgattagttgggactataggtgtgtgccactgcatccagctaatttttaaattttttgtggagacaaggtttcactatgctgcccaggctgatcttgaactcctgggcttaagcagtcatcctgcctcaacctcccaaagtgctgggattacaggtgtgagcacccggccaaattttttttttttttttaaataatggaaggcaacacagcacaggagtcaagaacatagactcataatatgagcagcgtggtttgaatcctagctttacagctaaataacagtatggtattcagcaaattgcatattttctgtaaatctctttccttctttgagagatggattcttgtgaagattaaatgaaacattatttttgttgttgttgttgttgttgagacagagtcttgctctgttgcccaggctggggtacagtggcaccatctcggctcactacaacctctgcctcccgagttcaaatgattctcctgtctctgccgcccagtagctgggactacgtgcaccaccatgcctggctaatttttgtatctttagtaaagatgggtttcaccatgttggtcaggctgtctcaaacacctgaccttaggtgatccactccaaagtgctgggattacaggcatgagccaccgcgccctgcaaatgagacattatttgtaaagcactcaacgcagagcttgagacaaagaactatctggcaggatgttgaaattgccaaggtttagggtaagattagtgttgggggagagatgacagtgagtcagaaactaaaatcttcaagggctaaggagtgtgatccagggctcagtacatagctgtagtaaggcggaggttgcagtgagccaagatcgagccactgcacgccagcccaggtgacagagtgagactccgtctcaaaaaaaaaaaaaaaaaaaaagtacttgctattgaacggtattttcactgcaaatatgcaattctggtttggctgctacttccttttagcgtattgagatttcattctactgttttctggctcctattgatgctcttatcagtctaactctttgtaagttagactgataatagcattttttcctcctctggctgaatttaagatacctccacacccttctttggagttttttggtttcactggtttgtttaggggtggatttcccactttccttattcagcttgagatttgttggacttaaaaatatatgaatgtcttctttacaaaattgtcagccattaattcttcagatactgtgtctttgtcatcttctctccttctcctttgagaactccagtttaagctgatattaaaccatctcactttatatccttcctgtctcttctcttacacaattttcatcattttgcctgggcatggtggctcacacctgtaatcccagcactttgggaagccaaggcaggtggatcacttgagatcaggaattcnnnnnnnnnnnnnnnnnnnnnnnnnnnnnnnnnnnnnnnnnnnnnnnnnnnnnnnnnnnnnnnnnnnnnnnnnnnnnnnnnnnnnnnnnnnnnnnnnnnnaggcatgagccaccgcgctcagcctactgactcttcattatgctgatggctagtctattgcagagatgtatcgcctcatctcttgtctccccttcctcgtgcggtcttcgatcatgtttctcgtctccgtaaccgagacatatagcccatgagtatctggcttgtctaatacatcatttatggcttcatatttccctcaagtgccactgtggctgtatcccacacattttgttgtataatgtttatgttatcattactctctaatccgtcaacatttttcagttgaatttcttctttgacccatgaggatgtagagtgcagtttccaattgccaaattacatcttctacatgtgcatgagtttctccttgtccctcacatcagacagacattagcttaatggttaaaagtcttgggctttgagatctaatagacttggattcaaatcatagctcattcactcactcctgtatttattaaatagacattattcttggtgctgaggatatatcactaaacagaaatccatgctcacatagatgttatatgctgatatgcgtcccaccatttagtagactccactcttattgtatcagttggaaaaagtctctcagtttctccctgtagatgaatttttttatctgtcagtgagaataataattattctattctagggagctcttgggagaacgtagtgagacaaagtgcttagtacagtggttagaacagtgaacattttagtaaatgcttgctattaccatatggacagctttcttagaaagcctttccaaacctagccccacccctccccttcctggcacccagacagagctagatgcttcttttgtattcctccagagcatattgtactggcctctagcagaatactcaggcaaaatattgtaatcatgaattgtccacatctcccaccagactgccagttctttaaagacaaagaatatatcatatgtaatttttttttacctcagcatctaccacagtgcctggcaagtgttaaatgctaaataaatatatttgaaatgactaaaggaaggattgatacagatttaggaaaaggaaagtaagtgtatgttgctgagatatctattgattcgtttagtcaaaaaatgtttattaggcactgattaccttcagccacttttcaaggtactgtataggttcaaacaaaacagacaaaattttgttatgatacttaaatcttagaaaggagaaatatacatcagatatggttgagtgattgcagaaaaataaaacagattaaagaagtaaacagtattgtgggaaggctgctatttaatatgtgatggccaaagaaagtctctctgataaggtgtcatcttagtagagacctgaaagaagtgagagggcaaatcagagggacacgtggatgaaatattccaagttgaagaaatagcaagtgctgaagttctttaatcatattcaaggacagcaaggaggccagtgtggctgcagcagaagcaccgagagggagagcggtaagaggtgaagtcagagtggtgggcagagagagtgaggatgcagagagtgcaaacccttgcagaccatggctttgcctctaaatgagaagagattccgctgaagggctctgaatggggacgttcctgtaatacactctgagttacattttacaagaatccctctggctgctacatggaggtccgactagggttacaggggtagtggcagagaccacttaggacagtattgcaacattccaggctacagtagtggtttggatcagagagatagcaggtggtaattatgattctgggtatttttcaaacagagctgatagattttgttcaattgtgtgtgggttgttaaagaaagagaagaatcaaggataaccccaaagtttttggctgaactactaaacaaattgaattagcatttggttagaggtagaagactggtgaaatagcaagtttgtgtatgtattgggaggggggtggttagcagtgggtgtatcaggaggcccattttagagctgttaaatgtgaatgtctcttacacctccaggtggaaatgttgaataagtatatggatatatagatcagaacatcagtgttgagatcagaatctcttatgctatcaacctgtacataactttcttatttaccaccatctttttaaagtataaatccctatggaccagatgattcttgagaatcttctctgaagaggagttatatttttcagatagatttttagattttaaaaaaatgccaatttttttaagtagggcaataatcgtattactataataactgacatcataattgaataatgagcttaggcatatgctttgcaaaaacctacataccttaaataaaattgaattcaaatgagtatcttttcaaaagaactgctgaattcacaaatgtatgtaaacagttcttagttcagcttaatctaagtattaatataaaaacactactatggataaaaccctggataccagagtggacagttgagtcttacatattcccagagaaatatttaaagtaagctaacacaagaaaatcttgcctttagaatttttaagttaaacttttaataaagattcaaataaaatattaagaaactttctaaatggttctgacagtaatggtccagccagggaaataaagtttctagcctctttcttggggctttcagaatagactagataaccttagaattaaatgtggatttatgtttttctgaacagtacccccttttattgactacatgtttccccaagaatttgttttagagtagatgtttcaaataaagggtccaattcttaacccattcacattgtctcattttgcagataaccacttgcctagcataaaaatctttacgttgttctcagaaattgattcttgactctacacagcaaatccttcgtctttattgctgtgacccattataaataccttccactatgatgggcttatattctcctattctcctctagcacttactctcttttttcccccaggtttccaggtcttggcaacctttgaaattccaattccatttgagagagctttgacgaggccatatgctgatttcaccaccagcaacttcagaacccagtactggaatgccatcagccagcaggcccctgccatcatctatgacttctatctgtggctcactggaaggaaacccaggtgagaagctgagtcaatggctttgagaatgtcactgcatatgggagattgaggccccaaagtctttagggcttccttcagccaaagattaaaggagacaactgaatctgacccatatatacagattgaacacacctactctgaaaatccaaaatctgaaattctccaaaatccaaaagttttgagtgctgacatgatgccacaagtggaaaattccgcacatcttacctcatgtgatgggtcacagtcaaaacacattcaaaactttgtttcatgcataaaattatttaaaatattgtataagattaccttcaggttatgtgtatgtggctaagtgtgtatgaagcataagtgaattttgtgtttagacatggctcccattcccaagatacctcattgcattgaagcaaatattccaaaatctgaaaacagttgaaacccaacacacttctgacccaagcatttcagataaaggatactcaacctgtataagttttgaacaaacaaagcagtcatagtgagaagccacagaagcctcctacattaaaaatgctccagcataataaaggaaggtaaatgttaaagcgcctgcttggtgaattcagcaagtgatcattcacgcaaaaagaaaagcaactgagactctgtcactagggtttttcaaataggtaaagaatcttaaatatccagtaatgatgacagcctcacttactgggagcttactcgtggggctaaggaggatgcatgatgatcccatttttattgtcacagctaccgaaggaagataccctcatcaacccaattttacaaatggagaaatagaagttaagggaagaatctgaagtagtctcaaaggcagtgacaggaaggatgtggagaaagctgagtgtcaaagtcagtattcaggaccggctttactgctacttagagatgaatgaagaaatcagagggaacgcagtgtgctgatgctaaagcagctgtcaccacccagctgtgtgacataggacatattctttctctgtctcacttgactaatatgatatgtcagaggagacatgattgtaattgcctaaagcaattcttgtgatcaagactcagaagcacgaacagtattgccctctgtgttagcccctttataagggaggatatcatcttcagcatgctgaattgtcatctttcttagcagtgcaaatgactaaaacttagccaatgtagagtttgtccaaatttggagctcataactcagttcttgagcaaagtgaaaagaaaacattgtgattatggggaaaatatttgacgggacttatcaaataaagataggaaaagaagaaaacccaaatattataggcagaaatgctaaaggttttaaaatatgtcaggattggaagaaggcatggataaagaacaaagttcagttaggaaagagaaacacagaaggaagagacacaataaaagtcattatgtattctgtgagaagtcagtaagatttgttggaagtgggttggtttgttgtatggtatgtattttagcaataatctttatggcagagaaagctaaaatcctttagcttgcgtgaatgatcacttgctgattcgaggtaggcatgatgaaggagggtttagaggagacacagacacaatgaactgacctagatagaaagccttagtatactcagctaggaatagtgattctgaggacacactgtgacatgattatgccattacatgtatggtagtgatggggatgatagaaggaagaacttatggcatattttcacccccgccaaaaatcagttaaatattgggacactaacgcatgccaggtctagtaaaagtcatcatgccatagtccatggtattgcacgatcgattcatgcttgcatgtctttgagaactaagaagatcagtaaatagttcagaagtgggaagctttgtccaggcctgtgtgtgaacccaatattttgtttagaaatagaacaagtaagttcattgctatagcataacacaaaatttgcataagtggtggtcagcaaatccttgaatgctgcttaatgtgagaggttggtaaaatcctttgtgcaacactctaactccctgaatgttttgctgtgctgggacctgtgcatgccaggcaaggccaagatggctcaaagagcaaccagccacctctgcagcctgccacctcctgctggcaagatttgtttttgcatcctgtgaagagccaaggaggcaccagggcataagtctactcacttatatctgtctggaacataacgcttgtttgtttttacaacaaataaaattgatcttgaataaaaactgagtggtcattgtcattaatctttgaagccagattaaccttttggtcatgcctagtctaagagaaaagagatactcttatcaataaatacagagcccagctatgtcagtgaagatctcaagtgcatagaaagtagtatagggaagagtcagaggccaaaaagacagtgatggcagacattgaacagaggagagtgtggtgtttgcctttgcatcaactgagattatggaagaacacctgaggcttgcggagagcacctacaagataccataagaacacctatgaagtgagaaaaattgaattactgttgttcttgtggttacgattgtatttatggttgttacttcattcatattaatcacctatgtgcccaagtgtaatcatgaagttaggtttttcccagatttttttattagactcaagaattcccatagacaaaggcaatatcactatcctttttatacatttcttctctcagttctgcagagccagaatgtagagtccaatcttttagataggttatgcaataaaggctgacttggattatctaactggtacatgaggccccgtgtggtagtttactccagaggaaattggcacctgtatataattgtagttaagtcgatcccttgatatcagaaaagtttctgctatgcagtcctttttgatgatttaataatatacatcctcattttagacagtaccagtggccatagatgtacttggcagcagagtattacagatggtaaagcttgaatctgcgttttagtagcaagagcatttggagtcttgtgcttcccttgtagacatcttcttcacatctacagcctatctttcgtctactgttgttactgctactagttccatagacattctaattttcacttgggatatacatttttgttatttgtaagctccccctttttcattttttcaccccctttcagactgttctaaaatcagaaaggaaattctcctccttgagcatgtatatgtttttggctcttggaacttgagatgatggtgcaagtaagtaccagcacattttccagataagtcatgtgaagtgatttatgtttcataatatgatcatttctgattgatcttatctattatgaccacccatagagatggctgtaaagaattaagaacatcaaacaatgtcaagttgttcattgcatgtatttcagaacattgccaagataaagccaggtggagtcattaatttcaccagcaagttatttccttgctgcaataccaaagactgtaatttttgaattaaagcctctggtttttctaactcatctttcattgttgatcatggcaagtgaataattaatgaatgtatatgtttaggttatgaggaatttaaaacacaacctaagacttgtaatgttgattgcttttgaatgttgtaatggttttgagagtgtctgcttaattacatacttgcttttcttagaaaatcaactcatttcattattagtgattaattttctcttaaatatttaacttcatattttaatcactgtgcctgggattccattagatatttgaaaagatcaagtttaatgtttttacccaggtaacatatacaatggctcaagatttgtgttcaaactttgatctcacaatttaaaaaaacacgcattaagcaccatggaaatcccaacaacttcagcaagaaagagtctttgttccatagtttctttgcttgataaatatgtgcactaaaataaatggaatatcttaattcagtttttgcttcatgagactggttgagtgaacttaggcctagtgctttgaaaattggcctgttgtagaagactgatattctaattgcctaaagagagtccatttcttataagaacacatatattttggaagatgtggtatttctcagaaaactgctgaaatgaattatgtatcttttctatctttaattttatttcaaagatctaaagctttcacttgaaaattagtcttttggaaaaaaagacattgaaactagtgttaaattatatttcattgaggtaatgaatataaagattcatttgctgtaatctccttgtgatcttttaaagtagtttcttgtacttttaaaaataacactataatggtctatatgtgtatcagtttttacaataatttgtctaaactttagcttataccggtgtgcatgaaaaaccaagtgcagtctgaattagcacaatgcaaatagaaaaccgaccttttattttcctcacaaaattatatctaatataaaccttatgtaaataaagaatttttaagtgcttgtaaattagtaagaaaatcatacaaaatgtcagtggagtagaatagttaaggattttatatcacagtaaaatgcatttctaaattgacagtattgttataaaacatattcttgaatattgtatgaatttatcaccactattgaagtcaaaataaagatggatctctaaagtatacaatttatttgggaatcacagaattgtagttctgaacaaaactgaaaaccatggtggtcttctatatgtgtgaaggacaaagagaagattgggggtttactagcaagggaaatgctacatattgttttgaaagaaagctcacggacactagagaagattttgggagctggtcaaacaagcctaatgggagacaaatcttttgagacttcccaggagcccaactagaaaatcccttagtcaattttaggtgaaaaagacttaaacttgaatttgattctggggaagtttgtcatttgtttggatgcaaaaagcctaaaaatatttaattaaagtggaattacatattcttgagagataatggtcacttatttaaccagagtaataatggaaagacttcaaaaacaaattcaaaagttacatagtcaagacaaaaaaaaatacttagacctgtattagagatgacttagttttttcagctgctcaaaacccgaatgaagacagcccaaaccacaagaagctatcttaaaacataaaatatctgcttgttaggtagaatacttagagagagagagaaaaaaccttttgtagtatgaccatttctcttggtatatgcccttttgagtaagctggaaattaaaccccatgaaaaactactttaattcaattagatgccggaagagtgtgtgtctaaggttataagtaaaccatattatagaataataatacacacacacacacacacacacacacacacacaagtagtacctccaccagggggaatggatggcttttagaaaaagtaagagcatgtgaagtttcctggttacatagaacaatttggatacatcagaaaaagccaagagtacagaattaatctatactggaaaaacgtttttccggttttttttgagactaacattctcagtgtcaggttataatacctgagtgcgaaatgcggaaaaatgcaataggaactgaccaaaaaaaaaaaaaaaaaaaagagagtcaccactttagttaagcaaaaagatgtactgttttaaggagagaagaagagcataaggcattgaagtattaactgcaaattacacgtagtgagatgcataaaaagccaaagccttgagataaaaatctgaaaaactttaagaggaaaactctacctcctgaaacgaagcggtcatttatttttctttattgctgcttctaaaaagaggatacatgtacagaatgtgcaggtttgttgtataggtatacgtgtgccatggtggtttgctgcacctattgacccgtcctctaagttccctcccctcaccccatcccccaacagaccatggtttatgttgttcccctctctgtgtccatgtgttctcaatgttcaaccccccctgaatgagaacatgcagtgtctggttttctgttcttgtgttagtttgctgaggatgatggcttccagtttcatccatgtccctgcaaaggacatgctgtcattcatttttcatggctgcatacattccatgctgtatatgtaatacattttctttatccagtctatcattgatgggcacttgggttggttccagtctttgctattgtaaattttgctgcaataagtagaatgatttatattcctttgggtatataccgagtaatgggattgcagggtcaaatggtatttctggttttagatacttggggaatcaccatgctgtcttccacaatgattaaactaatgtatatcctcaccaacagtgtaaaagcattcctatttctccacagcctcgccagcatgtattgtatcctgactcttttaaataatcaccattctgactggcatgagatggtctctcattgtggttttgatttgcatttatctgatgataagtaatgttgagctttctttcatatgtttgttggccaacttcttctgggaagtgtctgttcatatcctttgcccactttttaatgatattattgctcatattaactttgaaatgactgaaaattcaaaataaagacaaagataaaattatattttttaagttataggtatgaagtatctttgaaaggaaagaaatttctagattatatgtatatgtatgtgtatatatttatatgtatatgtgtgtatatgtatgtgtgtatatataatatgtagatactgttttcaacaaaaaaattattagagtcaaaatagtaccatctccagatgtttttatttagcttggtatctaaaatcattttaggtgactcattcccatgtgtggaaaattattaaaatttgttgtctacatctgtggtattcagtatagtagctgctagctacttaacttttaatcagttataattaaacgaaatttaaaattcatttcttgcatcatactagctacatttcaaatgctcaatagacacacttgcctagtggctactttattggacagggcaggtatagaatatttccattatcacagaatatttaaccagacagcattgatctaaatggttttttttttttttaactggagtgcagtggtgcagtctcagctcattgcaacctctgtctccaaggttcaagcaattttctgcctcagccttccaagtagctgggattataggtgcccaccaccacatctcgctaatttttttatttttggtagagacagggtttcaccatcttggccaggctggtcttgaactcctgacctcatgatccaacagccttggcctcccaaagtgctgggattacaggcatgagccagtgcgccagggcaagtatcttgtagagaaagtttatattatgattcagatttccatgttgcccatcttttttattaatcttatagacacttattggagcgcttattatgtcttaagtgcatgagaagtgcaaagagtgtaaagacaaaaatgatgtagccaaatcaagtggtggagacagacatttaaaacataattgcaacccaacatgaattctccagggagaggagagcaaaggacaatgaaggcagaaagaatcacgcttgcaaatccatgaacggtgtggtgtgtttgggaaactctgggtaatttatttggccctagacaagtaaaaacaaggactagaaacgtatgctgaggccagatcttgaaagatttcaaataactgcagtcaggttacactccattgaatgaaaacccagttgaaactggtttaaaacacaaatgtggtgtattgatgtacaatggaaaaaatccagcactagagtggtgagcagctgtgattcaactagagctctggctgccttggtctttgtgagtctcaactctgccactttgttctggttttatcttcatgatgaataagatgtttgctgtagcttcaagctttacacacatacatggcaatgactggatgaagagaggctggccctctccaagattttctcccaagattgatgaaacttgttttctaaaaaccctcagcaaatttccctcccatcgcatcagcctagttaaggttacctgtccatttctggccagcccctgtggcctgagattatgccatgtactagtttgttgagaaacctcagatgtaagccaatcactgtctagagtgtaagagcgcatggagatcaatcagcttttctctgaagctggggtgagattatgtgtttctgaggcaaggtggctactggagaagggcgaatacctgcgtgataattcagaactcatcaagagatagaagactgggtgttagggggttagcattctgagtggagcatggtttctggagtcagagagacctgagttggtgtcctttatccaccagtgggtggtgtaactttatgtaactgagcctcagtttccaagtggagattataatggtcattgtctttcataccgttgtgagatgtaaaggggttaacacaggaaaggcacttagaatagtgcctgaaccacagtaagcgctcagcaaatattagctttaaattcatactcaaatatgggaggcagtttgaactttatcttttagagtctgacactcccattgaaggtcttttgtatcttgacagctggaagatttcctactacttaaataataataaaaaattagaactcaagtgatgctgatgaggatgggaaatgtgaattatttgagtagttgggacataaatcacatgggccccaaagctgagaatattatctggccctttacagaagtttgccaactcctgaaatagaggaccagaaaaatgtcttctgatacaaaacacctaaacatgttaagcctggtgcagtggctcacccctgtaatcccagcactttggaggccaaggtagctgaatcctcccacctcagcctcccaagtagttccatatcagtctggacaacatggtgaaaccctgtctatactaaaaatacaaaaattagctgagcatggtggcagttgcctgtaatcccagctacttgggaggctgaggcaggagaatggtttgaatccaggaggcagaggctgcagtgagccgagatcacaccactgcactccagattgggcaacagagtgaaactctttctggaaaaaaaaaaatgtttttatgaaacagttttaatgcgcagctgaacttgtggcaaaataaggaaattcctaagtgtcctgaaatgacaagaaagtacacacctgcacacagagcgagagaagttgaacaagcacacacacaaatatgacaaatgtgtattgagagccaaatacacatcaggtacatattgctctgtgcctggggagcaggggcaataaggtagaaaataaaacagacatgggattaacctcatagatcttaaagtccagtgaggtaggcaacttttacaggaaataaatgtatattaaatattttgaaaagtactgtgaagaaaaagagcaagacgctttgaaagagagtaacaagtgacacctgctttaggattatgtgccttggaaaggactccagaaatagtgccactggaactcaggagttaaagtattcatggaaatgggagagagcatttcttttaggtagatgcctaggctctgccaactttgcttgattctatctgactctgtaagacaagttatagaagtataataatgcctttgctacaaaaccagaaatggataaatactttagaagaaattttcacgtctcatcaaatgggcattttcatgctatagtaattgttccaatttaaaacattcatttatacatattttcttcttcttttgtttcctttttttttttttttttttttttgagacaggttctcactctggttcccagattggagtacagtttgcaatcagctcactgtaacctcaaattcttgggttcaagggattctcttgtctcagcctcctgagttgctgggaatataggcacacacagccacagctggctagttttcatattttttgtagagatggggtatcactatcttgcttatgctggtctcgaacttgtggtctcaagcaatcctcctgcctcagcctcttaaaagtgctaggattacaagtgtgagccaccacacctggtttatacatatttcaatagttttaatatgacagcaaagtccatttgaggcagaggacagacttttttttaaattattgaaacatctgtcttgctcttatcaccatagctggagggcagtgcatgaccatggttcactgcagcctcaacctcctgggctcatgtgatcctcccacctcagcctcccaagtagctgggaccacaggtgtgtgacaccatgcctggctaattttttttttttttttttttttttttgtagacatggtggtctcactacattgtagaggctagtctcgaactcctggttttaagcaattggttagtctcgaactcctggttttaagcaattttctggtctcagcctcacaaagtgctgggattacaggtatgagccaccacacctggctagagaacagattttaataacaaaagaaaagtcctttttattctcaggttgactttaggagcctgtctaaagtaaaggtgggtagatgagactgattgcttacagaaagctagctttgtgtgctgaacttgatactattagaggtttcttgaaagatctgggaaaaaaggtttaaaattgcaactggaagatgtttgctagactagaaatggagagtcccaagcactcaggaattcagcaaatggctgctggttaggtttttgtttttattttttggatttaagataccctcaaactctagttatttctgaattgaagaagaccaattgatgggtatgtttgtattagtaaaatcaaaaagcttattaatttatatttcacattaacaaaacccataaagaaattatactttgcctttgtaacccatatgtcaccttggatatccctgccctttaataaaatgtaattaatgaattccccaagaattgttgaggattctcaggtggctaattgttcatggtcatctctgctgttgctggggatggaatcagttttgtttatgaatcattttcatttcacatgggctccataacaagtcgatccagaccaggtaaaggcctcgttcttcatttgtcgtaaattgagaatcaaacaacaaaaagagagaacacgtgcctaggcctgcctaagactcataggacctgcctttacataccacacatggacacccaatctttcaatgcgtcatcctctaccctgttaactgaagttttctgtgtttatttttctcatcttttaaatcttccatttactgtaatttaggagaaaatgaggtcactgagtttgttaattcattttgctgagtttagtacacaaattctaggcaacatttcacagacctggctctttcatggtgtaataaatgtgggcttttgcaaactgttttcctctttttggtctcacagctatgttttggataattaaagttgctaaaggtctaaacagtcaatagcagtttactagtaggttttgttcttacatctgcactgggcggtagcatagggcagtagaaagaacactgaagctctagatactactatctcctcaatcagagaagtagagcttggtggagagaccatagcctagttagctaacccatatgagtcttgtttttattatgcataaagtggatctgataataatagctatttcacagggatttgcaaaaatcaaatgtaatcctaagtataaaataatgttttatattgtgcaatataaatattagttttgttatcagtaacctctcatttcttttacccaggtatgttcttttgttcattatccctaagcaagactctctacattgcctgtatcagtttcacactcttatcaaggatgtatacattcctacattttctttcctacagttagtcatcatttcattagaaagacatttaagtactcacatttgtattataacatttaatttgaaaaaagctttttgcaagaaaggagagtataatcaggaattcatctataaagtcctaggtttcagcagcctgtgccacatgtgttcacagtcactctccattctgcatgagttgtactaatgtgggagctgaaggagataaaccccccaaatcagtagcttaatacaaatgaaatgtgattgtcaatcacagtagttctaactggtagaaggcgttgcactccacagtcactcaaggatccatgctgatggaaggttgccatcttctgcacgtggcttctaagtcatccatctctctggatgacaatatccagctgccaatggggtaaaaggggcactgacatcatgtggaaggattttatggtccaggtccagcagtgcccatcacatctgtccatattccatcctcagaagtgttactgggctacatctatatatgaggatggctggaaaatactatagctgtgtgcccaggaaggaaagggaaaattgggattatttggaccaacttaattgggggttttttttggtccaaaaaggctgccttcttattcagcacacctctattttctcgggctccattgcggcgggtggggaatgctcacgctccacccnnnnnnnnnnnnnnnnnnnnnnnnnnnnnnnnnnnnnnnnnnnnnnnnnnnnnnnnnnnnnnnnnnnnnnnnnnnnnnnnnnnnnnnnnnnnnnnnnnnnataggattattgaacaactaatgaggtctgccatggcttctttttaggtcacaaatacctgccttccatgtctttcccacacatacaagacactcattcctacccaagggtctcataccattattgcatccagttcaaattccaaggtccaaagtccaaaggggaatagactgtactctgtatcagattctgatatgtcagcttctggtttggcattcttgaataaaaaggccaattttctgcctcccatgtagaggtaaaaaatatctctgttctacctcttgtcatggtagaacagtgaaaacaccaccataattgaagaaaaaaataaaattaaacaaacctgctatgcaagaaagagaagacaggcaagcagcagtccctagagtataaccataaggaaatcatgagtagcaagtagtgagaagctccctacacagggcatggggaaattccttaaatagcctctgaatctgctctctgggaggaaccctcttttccatcatttttggtggtggctccatcctctggaaggttcttttttcttattccctggctgtcacccctgaactggctgttaaggagtgtgcttttcttgaggtctttggctttataactcattctgcaagagtaaaggcgaaaaccaatgggtgttttatgccgatctgtcccgcagactggccaagtgatgaatgaaaggagttcgctgacacaggtatttttcctgacagtgtggctaggggactgcaccactcagtgctgccgatgagagagtgcagcagccgaaaggagtgcagcttccctaagctggccccacttgcatttatttagtacagatttaatgacaagggcttggagcaaacacaatttgtgggtaattaacattgtcaaccccccaagtagagagcagtcctgcacatgaatgatcaaaggttggtttccagagatatgagtagaacaatttatctagataagtttctttacattcccttgttatctaacccttgctcttaagagaatttaactgccttcagctaaattctcttttgaagcttttgcaaaacctcccgttcttccaagaaggtttgtgtctttccctataaccttttcttacaacttttcccaccacactgaccaaactcctacagttttaggtttaaggtcagtcatttgctggctctggggctgtggaagaaaaaataaatctgtcagttcatgaacacagtgtgacagcttggcataagtaaaagacatgaacaaaaggattaatgaaggagtgaaagaaggaaggcatgtgcattaggtacaacatcatctaaaaactaaaaaaactgcagtgcattaaactcattcattcaacaagtattggttgagtgcctactaagtgtcaagtgctgggcccaatgtgggggattcagtggaggatacagtggcaacacatggaaagtaaaggcagtgaaaaggccgtggatttaaaaattaaaggaaaaaaaggggtaatacatttgttactggttttagcaaatcgaaaaaatgtgagaaaatagtgcagtgtttgccaaatctacagctcttgcaccctcactgagtctcaaattaagaatgcacaaaagcagaattactaggaaatcaaagttttatgggtgtattcccttaagtaatagcactatactgcaaaattggtggaggtcgtctgcacatttgaaataaccaacctacacctttaccccctcccccagattctaaccaaataaagtatgaaataaggcagaactcaccatactacaccaacttaccaggaatgaagttgatgctgattggagaagtgtcaagcaataaagaagagtttggatttatctttaacattgtcttcatgtcactcgagactttaatctcagccaaatctacttccaaaaccaatctcttgtgcaatgatcttgtctgggtccaggccaagacttacttctattgcatagataatctcacccttcttgatttttactctgaagaactttcctgtctgggttagtgtttcctctggtaggcatcagattctgcaaatatttattgtctcatgttaatcaaggacccctctagattctgctatttaactttaagtattttgacataaacagagtgatttaaatgcagttggaacttgttcctaagtagggcctggtatagtttttaagcaatatacctctccagtcacacataataatgaatggattctaacttacgctaagtactaccgtgtttctgaaggtaataaaccatgtcagctctgtgaggcttagaaatttttctttaaagcatagtaatgaaaaatgttaccagttttcctttgattactactatattgcccaggaagtgtgatcaaaagacatctgttatatgtatcaaaattcatacatctgcttcattcatttccttttatggtatcacctctaacttccagtttccctgctgtcagagagaaacaattaaatgggagatgctttggacaacaggatttttaaaaatacagtggccacagagaattggaactgaagaatcagaagagaggattaattttctttcttcttactaagtttcttaagtattttcagaactcttaaagagacatatcaatagcggggaaagtatctgaattaatggcaggattcttgaggactttctcacaaagataattaaggtggcactctaagaaaacaaccagagacatcacaaataatgtatagatatttttattgtagtattacttatggtaaacttggatccaatttgaatgttccacaatagaggagtgattaaataaacaacaatacatacaagtgttagaaaagtattcaggcattaaaaatcatgttttatcaaatagtaaatgacacaaaaaggcttgtaatatattcaatgcaaaaccatattcagtataatctcaactcttagccctaaatgttgatatgatcttggattaatttttttttttacattttcaaattttcaaattagaagtatgattattctacttctatggtgtggaaaaaattaccctctgtaaaagtgaataaataagaacagtcatcttctactttccacgttttccaaatacaatgaacacattacacttttacagtggaagaaaagaaacacctatcttttaaaatagtaaataaatcagaataagaaattcatcatgaatttataaaattatgtcatcaagtataagttcagttcatgtttagttttgaaactttatcaaaattaaatagtttgacttatttttattagaaatacgattctaagtattcaacattgctttttaaaaaattatcttctagtttttctcaaaatctgaggagctgctacggaaagcacaccagatctcatgtgttgaaacgtgaacatgctcaccacagaccaaggacgttcaacctgtcaatccccaggatttccaagccaggggtttcatctcttacttgtggaaaatttgttcatttgattatgaaccaatcagcttttcattgtgtcaaaatcaaatctagatagtgaaactgatattttatctttattgttatcttaaatatatcttggcttaaagagacataagtggctcttccccactataccagataacaagttgcaaataaatcattcagtagtaaagttcaaagaaagcttgaaagcattttgaatttcctagtgtcttacagatttgtttctttttacaacaaccatgtcccatgtatatctgtttaggaccttaagttgttaataatgtactctgaatagttccttaagaaaacattaaaaggacaatgtccatacctgggaaataaaacccaaagtagtaggaattatattaaaaatcatgtagttaattaagaatgattgtgagcttagacactgaaaaatatgtcactgaaagaataccaaaaatgtcagccttttcctcttaagttatagaaaggtatataatataagtacttagtacataagagaagagttagaatgagattgtaccaggttcagaattcctcatccgagaagaccagacaaaattcaagatttttagagagggactccctgaatgatgtcaccagtaagtgggtttataaacaaagacagagcttggcaggttgcactggatacttcaaaccagtttctctggaaaaatttgagttactcaataaaccctcagttttcctgaggtaaatcaactttgaaatacagtggagaactctgggtgataaatcacgccgtgttacacactaggactgcagttcacagaacatgattagatttaaggcaatagaagataggaacattttttgaactagtttattgaatccttttgagaatatcactgtttggaagttcctagaaagcttagacaaattaatcttcaagaggccaacaaattaactttgaactaaaaaacaaaaacacaaccaaaaactttgaattagaaaacatctgctaagaaaagcccaacaatctgacatgttgattattactttttaacactgcaggaatacaaagatgattgtactattcagacctttacatatcacacaacagaaaaatccttcagttgactagtttccataaactttgtagcgttatggcaaaacaagagtcatctgtgaaatacacaaatgttttgtactgagggatattttcacataacacaggagatgataaatttagaccccctcaatctcatcgtcatactgattatactgtaagcagtgattggggtgcacacattgcatgttttgaaggtatggatgtggcaattctaatgtatcaacattgtttctgaaaagctaaggttttgttattgaactactattagaagtcgaatgtgatcctcttccaatgtctggcattgccttcctgtggaattaacattctgtgtgatttagagtacgtgtcccgactttctcaatgctcataaataccttgtctgtaggaaactttctttaagggaaaagcagctttagcctgtctccagtacatggccctgacttgcttatacatgtaatctattatgaaggaaaaagagccatcctcacaaatctacaagattaaaactcctagcacaaacacagcttgaatcagtgcttctgtagcttctttcagcaaagggaccatcgccagcactgtggctacaacatatgccttgccatcagatacaagagttaggcttcatatccacgtcctgtgcaataaaaaagctttaaatctgaatggaacatccatagaactagctcacagacaactcagaagcaggaacactttggtctgtgttcaagtaaaatgaaggttgagatttctttatgcagcagcagaagtaggattctgtatctctctttggagtcaagttggtctttgaaagaaaaccaatttgcttttaagaggttctaatctagcaggataccagatgatggcaagtgtgtttaaaccaagtatagactaagggattggtacattgaaagactaccttctgtttcagccgagggtaattagagtgtcaggaatgctgttattactactaagatctccaaggacctagaccaagaagttccatccagcaacaccttattacagtgtacagaggtcaacagaaagaggtaaaagaaaaagataatcttttatcagacttttacattacattgctaatttttattacagaatatttttcattctcttattttgatcccctgatatttatttctgattctgactctgcctactgttattcaccctacttgttaattctaatctattctttttatttgtaaaagcataacttttctgaggcatagttgtggtgtatatgtgtatttaacctattctagaaacagtagaaaagatagtagaagagaaatagtagaagagatcgagattacagattataatagcatgtaaagagttttatacagttaatacctgagagtctgcacagtggggaactctgaagtaatatgtaaggtgtcaagaacaagcaggtcaggactgtggcactcaaagggcaggtaactagcttttcagtaacatttttaagtaacagtttcacagatcctcagagaatgccaggcagtaaaggacgcatctcaaaatccatacagcagatttctggtttccaaatttctgggagatagtacttaatacggtatttgaaactctacaattgctatggaagagacattctggagagttacgtattatccaaaaataaatttttcagaaacaagaaattttaaaataaaccaaccaaaaaagaatggccaaccttttaaaccttttttttccattaataaggagctacatagtctgctggtgaagaacttgatagaaattgactgttttcagttagtgggctgatccccttgtatctgtgtcagataaaatcatagcacttattatttgttaccatggataccatgaagatactgccatccactaaatagtagtagaggaagacaacataattttctggaactagtcccgttttgccttcataagttgcctttaaccatcctggttccactgatgggccacgctggaaaatatcactccttgtgggaaggaaaactcatgctgtgctctgctttacaggagtacatggctttggcttggtgcccagaagaaactggcttaggtgaaccaacattttcaaacagttgagcttttgctgccactactgagccaggacgctgatagccattgcttgaggcggtgtctagtcttaacctcctgcacatttttggaggcaggtctgggtttgaagctttgggtgtctccttggaacctacagaagctaagctttgaatatatccactgtagctggtgtttccttcagctgcagagatggatctgagagaagaagcagaagctcttttcagtcctgaaagtccataaggccctttcttgactaggtctatgggtggggaaacatcccctgggctagtgaccgaaacaacactctggcaatctgattctgcatctgtctttgttgcatcttctctagaaattgattcaggactggttgtcagagaccaaggcttttctgtccatgggaagatgacggggttgcaatccaaggaatccctccagatttctccctgggctggcaggaagctgactttgtagtgctattttgttctgaggaaagagaagagagtgacttgttgctccccatgggggtgctgtctgggctgctgctgtaggagtcactatcaggttcagccaggcatggagtacccgtccctctggacttcctagagcctgtagagaggcagattgcttgtgtcttttgggatccagatcgagactgaggctgaggaagaggagtgcttgggtctggagcagtatgaaaaatcgtttcatcgtgctctgtaagcttgggtctggagcagtatgaaaaatcgtgtcatcgtgctctgtaagaatttctaacacaatattctgaaatttaatattcaccatagcagctacagtttattcttgtgctctcattagagttgggccaaatatgacaccaagatttgagacagtcatgagattttgttggctgtgcagtgatactttgaccagatgttttattaagatgtccagcatctctctgtttttctctggcaatttgcacaccaatgcatgtacagcctccaccctgtagttttggtcatcagatttaacagcaatgatacaaatctttgtgtaacttgtaagtcatcagtggtgctgcaaagcacctgaggtagtttttcagcccactcattgtcttattgtcccacagttcaatatcaatatcaggaggggatttaggagaaaatatgatattcacaagtttttgaactttggagttcactcctcctattcagtagaggcctaaaacggtgatactgcttgtttccacagcttgaatgcagtttctcacaaaattgaaccctgcttcattcaaatacctttcttctttcttgcttataatgtcaggcagagtataaatcgtttccttcccatccatggcttcaagccagagtttcctattagcgtctgagaaggcctgtaatgtgatgatcccatgcctttcaactacttgtatgtcgaagcagaagtggttgtcaattgaatctgtctttcgtcggatacaagattttgaacatttccggtgagctagtaacaaggctgtttaatccacataaaaccaagcggtcgtttctcctggacatacggatagccttccatcgtccactggctgggtggtctgtagtcctggttggcagatttcatcctctgcatcaacccctctacgtcttgtcgagtactttcaaaattattccttgtattctgcaagtcgaactgcagctgttgcttatgcggtgcaaatcctgggcaagttcatatccctcatggtaaaaaagtaaataaaccctgaagaaatgacaaaagcggttcaacaaattcaaactttttttcttgaaccgcttgaattttaaagacattcttttttcttttatttatttttatttatttgtttattcatttattttgagacggagttttgctcttgttgcccaggctggagtgcaagtgcatagccttggctcactgcaacctctgcctcctgggtccaagcgattctcctgcctcagcctcccgagtagctggctttacaggcatgtgccaccacacctggctaattttgtatttttagtagagacgggatttctccatgttggtcaggctggtctcgaactcctgacctcaggtgatccacccgcctcggcctcccagagtgctgggattacaggcgtgagccatttaaagacattctaatgatgcttcatagaagttctgatgtgctcgatcaatttgtgtatctgcctcttgcaaatgagactcctttttctttgcagataaatttaaatgcttttcaaggatagagtaatatttttcactctttgtcaaacttctttccaccttttgctgcaccaatctgttcttttcgaaatttctcaagtggtgcaattaatacatcattagcgttttggatcagtcttcgcctttcttcttctactgcaatgagtagccttgcaaattcttttagtgactgagtaatactaatttcatcatctgtttgagcattatcaatacattcaaattggaaatcttgtaatgactgggaaaatttctgcactgccatagacagatccccaacctgggtagaggtgtgttcctttggaaagggtgaaagggtaagggaactgggtaggcaatcaacattacctgtcctcaacgccccagtgagcggagagccctccttaatgagctccttgatgaacttgttggttcgctccagttcaatctcctgacactgcaagcgctccctgaaatccgggctgtccaagtaggaatcgctgaactccagagtaggcagccccatggcacaggcgctgtcagcggcgtccgcgggcacgtctgggccggcggtcagggcagcagctggcagccgcgacgtgcgctggggacgcgcgatcgcggggaaggcgctgctgggacgccaggggactgatcgctgaaaggaaacgggcccgcgcgctccagccgcctgagccgggctcagtcttcctctcccggggcgaggcagcgcaggcctggcggagggcctaggcgcgggtccgctcaggttgctgtcaaccggaggcaccgtcgttcggagcgctgggactgcgagcaacattgttgattattaaagaagcacacaatagaagtgctaattttattttacgagttccttgataatttttagactcttttgtaggaaagaaaagtaatgtgtttatgcttgccccaggcttccctgtgtgaaagctgctttttctcaactttcaaaaatgagtttctgattgacattaatgattctgttaaatctctatataaggcaaaggcaattgggaacatttggaaaggcatttggaaacttccaaaattataaatatttgcattgaaacttccaaagccaattgtgttcattacttttttttttaatttttcctgagaaattatcccacaaaaagcaagaggcctctagtgtaactagttttcagttttcctgttactcaagtcagatcagctgaagcatgttcaacctctcccctgtgggccagttacaggggaaggaaggaagggggggagggaggaaggaaggaaggagaaaggaaggaagaaggaggaaagaaagaaatgtagtcctggggatacactaacagttccagaaatagaagcaatttattttctcaatttctttcttaccttctttcacactatcattcactaattaattcaatcaccagcatggttttacatgtccagcttctttccttttcttaaaaatctcttccaatcacaccatctttttcttaaaagcttcaaatttcccatagttattttattcaaaagccacgaggttcaacatgattttggcatacactctggatcacaggatagaattggaaaacttggcatggcccaacacacacatacacacacacacacacacacacacacacacacacacacgacacagctttctgatcagcagcttttggaaatggagtactgctgtgaaagtagaaaggggattttcctgttattagggacctacaatgtggtaggcactaagacaaacatctgacttcattactctaatcctcagaaatctctgtagtgtgcccattcctatatcacagatgagatattagttcatgaaagctgtcctctatccaaggttatgtaatttatgcccagttatatacaaaattggaatgccggtctctaatctctaaagcccatactttctctactgtagtttattgcctctcctaggaaatttcttcctccatgacaatatcatgaagaaggggaaactattgcttgtcacttcttagtatcaacacttcttccatcatctagcatgaataatgtagagacaccaccaattctgttggagagcagaaataatcttaaggttgttcaacttcctagccaccctggttccattcctgcccagctgcaagaaagaattattaaagaactctgtgaaattgacctttggtgtgggaagaaagcataacaagatggtgaatcaaacattgtgctgcatttagcatttattatagattattacgcaaagtgaagtaaaattttgttaaatgcaaaattgtctataagaacagcataatatgtgcttaatcctacttctctgcgatcacgtgataagttagtcacatgattggcattttagacatgatggtgcagagaggtaaataacttgccccagtcacatagcaaataaatggcagaatcagaattcaaatccagtctttcatgactccaaagggcctgagttctttccaatacaccgatggttctcaactacagagtgtatcagaattaccagagagtgtgttcaaagtaaagctaaatgcccaagctttgaccaataactgctgaatgagaatctccagggtcaggacatatgtttgtttgagcaacttcctaggcaaccctgctatatgccgaagtttgacggccatactactataccatgctgccttatggagttatagaaatgatcctttgctaaaacattaaaaacatgtagactaatctttacatcttatgggagttactagtgaactagcaaaaattttaacattttgtgaatttttgttaatctgtacattgggtataatggtttttgcttaaattagaatgtacttatttgtgtttaattgttctcaacttagagctaatttgtagaattcatttatttgcttttactcagcactctacaaattttctataaaacgttacagtgtctctttcaccttgggacaccaaatattccacagagactgccccttagtttaagggaccttactcttttctttgacaaatatacatatacatacatatatatatatatatatatatatatatatatatatactatatacagaatagagatagtccttatacactatgggcgtcgtatagatatcaccggagcgttaatgggactaaataatacagttatttttgaagagcaagacttagtaaaataattaaagatcaaagattcttatgactggaaaagatttgattaccttcagtgagcccaaggaattacaggccaaatctcctgtggatatttccaaaatgaggtcatgtggctaacttgttgattgtaagagaccacattaaaggcctctgaattgtttcaaaaacatcatataaatttaatgcccccaccccaattcctgcttctaataaaaatacagtgttagtgtctgactacagaagtcacacatgaggagttcatttttttattttttattttatttatttaatttttttgagatgaagtctcactctgttgcccaagctggagtgcagtggcataatcttggctcactgcaacctccacctcctgggtttgagcgattctcctgcctcagcctcccaagtagctggaattacaggcatgtgccaccatgcctggctaatttttgtatttttagtagatactgggtttcactttgttggccaagctggtctcaaactcctgaccttgtgatcctcccacctcagcctctcaaagtgctgggattacaggcgtgagccaccacacctggcccgcaaggagtttatttaaaccaaagaatttctctttctgtttttctcatctgctgaatttccttacttagagtttgcagtttctctcttgcctctgggctacaagtaactgttcatataatttgaatagtatctcatgtttaaaaacaaattaagacacagaatacttgcctgtgtaatggaaaatcaatggaacactgtcagtttccaagagaaatgtatagttttgttataatttgaaatgcttagatcacctttcagctgtatctttcagtgatcacataaatgtgtcaagaacaaggtttcctaaaatggttaaaaaacaatccctctgcttgagttttgatgatggttagcagttattcaactctttaccttctcagtcttatgctgtcaagtagagaaaataagtttatgcaatgggaagaaacaagataagctcttagattttaaactaattatattgttcttaattgatgggctttcaatgaaatttttgaaattatgttttttatttattcattttgacttcatatttttctaaatttaatctttcacattagcaaaaataaaaaaccttttagaagaactggcgcttatccaggatccatttgcaccatttcatcttgtcccttcagtcttgtcattattataaaaatagagggtctgctataaagatgggagaaatgaagctctcattggcagttaatacagaggatttagggaacgctttgtgtcctcatttagcagttgctacctgcgaactctcatcacagtcatacaaacttcaagaatcaggcttccattctattgtagtaatagttctgttactgttcttacaagaattaattttaattcaataagcaaaatttgagtcttttcagtgaacaagaatcaaggacattaaaaagaattttttttaaagtaacaccctttaaaatagccacacatagagttaaatacctaggaattaacttgaccaaagaagtgaaagatttctataataaaaactataatacactgatgaaagaaattgaataggacaccaaaaactggaaaagtatttcaggttcatggattggaagaatcaatattgataaaatgtagatactaccacccaaagcaatctacagattcaatgcaatccttatcaaaatatcaatgactattgtgtctatttgattcttgtctcttttcttctttattagtcttgctagcggtctgtcaattttgttgatcttttagaaaaaccagctcctggattcattaattttttgaagggttttttgtgtctctatttccttcagttctgctctgattttagttatttcttgccttctgctagcttttgaatgtgtttgctcttgcttatctagttcttttaattgtgactttagggtgtcaattctggatctttcctgctttctctcgtgggcatttagtgctataaatttccctctacacactgctttgaatgtgtcccagagattctggtatgttgtgtctttgttctccttggtttcaagaacatctttatttctgccttcatttcgttatgtactcagtagtcattcaggagcaggttgttcagtttccatgtagttgagtggttttgagtgagtttcttaatgctgagttctagtttgattgcactgtggtctgagagacagtttgttataatttctgttcttctacatttgctgaggagtgctttacttctaactatgtggtcaattttggaataggtgtggtgtggtgctgaaaaaaatgtatattctgttgatttggggtatagagttctgtagatgtctattagatccgcttggtgcagagctgagttcaattcctgggtatccttcttaactttctgtctcattgatctgtctaatgttgacagtggggtgttaaagtctcccattattattgtgtgggattctacatctctttgtagatcactaaggacttgctttatgaatctgggtgctcctgtattgagtgcagatatatttaggatagttagctcttcttgttgaattgatccctttaccattatgtaatggccttctttgtctcttttgatctttgttggtttaaagtctgttttatcaaagactaggattgcaactcctgcccatttttgttttccatttgcttggtagatcttcctccatccctttattttgagcctatgtgtgtctctgcatgtgagatgggtttcctgaatacagcacactgatgggtcttgactctttatccaatttgccagtctgtgtcttttaattggagcatttagcccatttacatttaaagttaatattgttatatgtgtatttggtcctgtcattatgatgttagctggttattttgctcgttagttgatgcagtttcttcccagccttgatggtctttacattttggaatgtttttgcagtggctggtaccagttcttcctttccatgtttagtgcttccttcaggagctcttttagggcaagcctgatagtgacaaaatctctcagcatttgcttgtctttaaaggattttatttctccttcacttatgaagcttagtttggctggatatgaaattctgggtcgaaaattcttttctttaagaatgttgaatattggcctccactctcttctggcttgtagagtttctgccgagagacccactgttagtctgatgggcttccctttgtgggtaacccaacctttctctctggtgcccttaacattttttcctccatttcaactttggtgaatctgacaattatgtgtctgggagttgctctgctcgaggagtatctttgtggcattctctgtatttcctgaatctgaatgttggcctgccttgctagattggggaagttctcctggataatatcctgcagagtgttttccaacttggttccattctccccgtcactttcaggtacaccaatcagatgtagatttggtcttttcacatagtccaatatttcttagaggttttgtttgtttttttattcttttttctctaaacttcccttctcgcttcatttcattcattttgtcttccatcactgataccctttattccagctgatcgcatcggctcctgaggcttctgcattcttcacgtagttctcgagccttgactttcagctccatcagctcctttaaggacttctctgcattggttattctagttatcgatttgtctaattttttttcacagtttttaacttctttgccattggtttgaatttcctcctgtagcttggagtagtttgattgtctgaagccttcttctctcagcttgtcaaagtcattctccatccagctttgttccgttgctggtgaggagctgcattcctttggaggaggagaggtgctctgctttttagagtttccagtttttctgctgttttttccctgtctttgtggttttatctacttttggtccttgatgatggtgatgtacagaagggtttttggtgtggatgtcctttctgtttgttagttttccttctaacagacaggaccctcagctgcaggtctgttggagtttgctagaagtccactccagaccctgtttgcctgggtatcagcagcagtgactgcagaacagtggtggctgtagaagagcagtggctgtagaacagcggatcttggctgaaccgcaaatgctgctgcctgattgtccctctggaagtcttatctcagagaagtacccggccgtgtgaggtgtcagtctgcccctactgggggtgcctcccagttaggctgcttgcggggtcaaggacccacttgaggaggcagtctgcctgttctcagatctccagctgtgtgctggagaaccactactctcttcaaagctgtcagacagggacatttaagtcttcagaggttactgctgtctttttgtttgtctgtaccccgcccccagaggtggagcctacagaggcaggcaggcctccttgagctgtggtgggctccaccccgtttgagcttccctgccactttgtttacctaatcaagcctgggcaatggcaggcgcctctcccccagcctcgctgctgccttgcagtttgatctcagactactgtgctagcaatcagccagactctgtgggcgtaggaccctccaagccatgtgcgggatataatctcctggtgtgcaatttttgagcctgttggaaaagcgcagtattagggtgggagtgacccaattttccaggtgctgtctgtcacccctttctttgactaggaaagggaactccctgaccccttgcgcttcttgagtgaggcaatccctcgccctgctttgggtcatgcacagtgtgctgcacccactgtcctgcacccactgtctggcactccctagtgagatgaacccggtacctcagatggaaatgcagaaatcacccatcttctgcatcgctcacgctgggagctgtagaccggagctcttcatattcggccatcttggctccaccctcaggggatttaattcttttaaaattcaatgctgttgaaatgtttactcaagaagcaatgcgtttttgagagctaatcctgatctattcaaatcttaatgacttaagttgatggagtggacttctttaaattagggattccctaatttgcctgactgctggaatttccagggcatactgaaaatacagattatccaggctcttacctctgcagatgtatttagtggttctaaaatggcacccaggagtctggatttttcccaggggccttgtgtaattcacattggtgaacaggcaagtttgggaaatagtgccttaaagagatttttcattaagcagtcttcatttgaaatgaggatcacttatcttctaataccccatgcttcctctttctcctgccttcctcacctcctgttgtctttcagttcttagaaactttaattgaatggaagttcctagtagatctgtacctactaaaacccacacttctgaatctacgtggccaccagaagacacagctagtctgccatgtaaaaaaggaaaggttgtgtgtgcactgagggtgcagaggtgacaggcaggggaatggagacccccacagccagcagcagtggccctcatcacagtcctccaggagatatgaaaggaggtcagacgttggacagtagtcttgccttcctgctatagaacacattgttaacaccaaaaaagctgatctcttctaagggaatggggaaagctgactctacaacttgtgcttttaatttcaggatggcacagcttctaaatggcatctaagttgctgatataaaaatgaaaattctgtgtgctttgatattagcaggctttaaatacaaaccagagtaagattaaattgtttcttaatcaaatcaaataattttcacattggcagtccattcggcatctggatcatgtttgctctaggctgagtagtccgtgaaagtctggagggaaatacagaggccaattctccataaccattaggctcagaaataccctgcttccccgtgaaaagtttaaattgatttgacgccaccttcaccaaaccgaggttggtcaacactttccaccactgcaactgcacactttgacttccaattttgcttcctgctctgtgaagatacccccttccttcctttctcacattctccctataacctcatcttcctttcatccactctgtctcattatttgtccatctttgtttcccaaaaccttatatagaacagaaattgaccaattaagattaccatgtggaagagcatccatttactgaataaggcagctggctcctcggggcagaaaagtgattggacacagagataaaaatcataatccctgctctcctggactcactgtccagtggggagacagatagatgaacaaatacaacttgataactaaaacaatcaagtgaattatataatttagactagagaaagagataacaaatgttatcataagacagtgtgtccactacttactctctaacagatttcctcataaaccactaggcttgccaacttgttgaataagaaaattggagggtcaggggaggggaaatacatatgcttcttagtatttcattccataaatacataaataatgaaactattaatgatataatcatgttgattcaataagtttgaaaccccaaaattgatagtaatctttagaagaaattgtgtatgtgtctatgcatgtacacacatagacatatacatattgctttctgaaattttcaatgactttatgcttcttctgaagcaattcgagtttagaatttgagacccatgggtcaaaacatcttcttgagtatactgaagaacatttggattaatttcagacatgtattttggtttatatagtgttttttatccatggtaacttatttactgtttaaaaacatactgagaacaaacaacagcagcaaccctgaattgagtgaaagtcctgagaaaggctttgcccaatcggtgcatgtgcgtgtttacataatctcctgtctgaacctaggaactggctgaatgagctagcagatggtctctttggctgtattataaataataatttatttttatttgttttattaattaattaattcattcattcattcattcatttattttgagacagggtcttgctctttcacccaggctagagtagggtggcagaatcacagctcactgcagccttcaactccaaggctcaagcaatcctcctgcctcagcctcctgagtaggactacaggtgcatgccaccatgcccagctaagttttaaaaactttttttgtagagacagggtcttattatgttgcccaggctggtctcaaactcctggactcaagcgatcctccttccttggcctctcaaagtgctgggattataggtttgagccaccacacctggccagaaatgacattttaaaaccaactattacctacacagatgtatgatgctcccttgttgttttgtttcaaaataggaatgccttaggtttttggctcattttgttttatcaaagatcttaaatgcagttgtgaatatttttgtttaccctcataatagcctgagaatttagaatgaatataattattgctattttcacaagtaaaattggaatgagaagataaaacagtggaacacaggtgtaagtaagaacagcagaggcaagccatctatagaatattaaaatttcttgcatgcatgttaccaacattttctcatgcctgaaatcccagcactttgggaggctgagacgggtggatcacctgtggtcagtagtttgagactagcctggccaacatggtgaaaccccgtgtctactaaaagtacaaagattagccaggcgtggtggcaggcacctataatcccagctactcagaaggctgaggcaggagaattgcttgaacctgggaggcagaggttgcagtgagccgagatcacaccattgcactccagcctgggggaaaagagcgagactccttctcaaaaaaaaaaaaaaaaaaaaaaccaaataaaccaaaccaaaccaaaacaacaacaaccaaaaacaacattttctaagacaagcaaacctactaagctttataaggcccccatccccccaagtattgtcctttccaggtaccccaacattaatgaccgcaactggtactagccttgtgacatacaatcccagcacattgttgggctctgatgttttctaggaattttttctttacagccttattgatattaagctctattttctgaagacctggtttttataaactgtatatttttgcagttgagggaaaatgatctcaggtcagtcaatccgctgttgacccacaaatgaaatgaggtaggattattgttaagacggagaggtgtctgcatcatcctacactttttcccagcctccaggtgaccatataattaaagtatccttgatatttctatgtagtttaagtttttaattctagaacccctcaatctttctctattcaacttaaatgaaaagacatttgagtatccagaagacactcagcactcagaagcaaagcaagaaaaacggaaacattatagtcaatgcccatgttctaccccaggatgaaatgaggcattaatactgagagttgtgattctgaataagtcttaacctcatgcacatcttagttgttcaaaaatgtgtcatgtcagcaaggtggtaacagtgaagattttctacaatcaaaatagtattgtgatgttctgttgtataaaatagaaataaatgtaccacattggtcagaaaaatcacactagcatattctggcagcttaatttttttattattatactttaagttctagggcacatgtcgacaacgtgcaggtttgttacgtaggtatatatgtgccatgttggtttgctgcacccatttactcgtcatttacattaggtatttctcctaatgctatccctcccctagcctccacgctaggacaggcccctgtgtgtgatgttccccgccctgtgtccaagtgttctcattgttcaattcccacctatgagtgagaacatgtggtgtttggttttctgtccttatgatagtttgctcagaatgatggtttccagcttcatccatgtccctgcaaaggacacaaactcatccttttttatggctgcatagtattccatggtgtatatgtgccacattttctttctttctttctttttgttttattttatggaataaaaagttcagcctttttattgcatgaaactaaaattgggaaaggtgggagtgaatggggtgggagggtttgaggggagcaggagatgccctccctaccagctcctggataatgacacctcacttcttgcataatttctggcatcttcccgcctgcaatgcgacatactcagcgtcttggagaaggggggatcacacactcatcgtcatgcttggagaataattgtcattctgaaaggagtggaggaagttccctcctaactctccgtcatctcgaggggtgcctggaggattgctaatactatttacgttgttaggagaattttttggaagccatctatgtcgcctgaccctaacaatccgttcatgtggtgtggctccatgcgcccatgctgcccatccgaccgtccgagccgggacccatcggatagttggaccggctgcctccaggcggcaccggattaatcattgtgtagatgtcgctggaatttgttgaatctgagggactgggcatagtgggtgttcctggagggccgccaccaccagggggtcccacataggtaccaggtgatgaggaggagtatggaattgagttagcactgttaggattgggccagggtctgccggctcccgggccccatgttaatcccgggcatggggggccgagggaattgcgtggtggtctcatgccgctgccgtaattctgtgggctggacccgtgggccccatgcctcggggagggttcattctctgcattgatcctcccatgtggggatggccttgttgtcgtgcgggatccatggaattgggcagcaatggctgtgtcccaggaactctcccggaggctggtttcccattctgatcgggggcctggggccgcctgcgtatcgcggtgacatgaaaggctgactgtggggtcccatcatgctgctaggattgtgaggtggaggctgtgcgtgcggcgagggctgtgaccccggaggtgactggcgggactcggcctccccgcatcctattgttggggggaatgttgccaagcacggggctcagggcagctgctgcactagaatcaggaaaggcttttgcttcacttgaatgttcacaagtgtctctccttttagtagctgcacagtaaaggtcccaaaatacacaccaccacgagtgcaaaaacccaggcggttctcccaacgcgatgtttttttcccagcgaatctccgataagaaggtctgtgcagatttctgtgctcctacctgcagtaaatattcgtagacgtataaagctaacttttccccagcctgcccgtccgaggcaccaaggagcctnttctttggaaacatggtttgcagggaagagggcgcccagcctccccacagtcgctcnagctccatgtccgagctgcccctcgccccggccccctcccaggcgctccctccctctctcgctgctgggctctcctagcagcgctcccctccctcccgagcagcggctgtccgcgctctttccagctgtcaaagcatcaggcccgccgcgccccatcgccctggaactcctcccgcgccggcttggctcgggcgtgccgccgccgcctcccgcaagccgcccgctctccggtagctcgcgtgctcgcccggttccgcttggcgtccctctgcgccccagcaccgtgccgccgccgccggtcggctctcatgtgtcacattttcttaatccagtctatggctgatggatatttgcgttggttccaactttttgctattgtgaatagtgccgcaataaacatacctgtgcatgtgtctttatagtagcatgatttataatcctttgggtatatacccagtaatggaatcgctgggtcaaatggtatttctagttctagatccttgaggaatcgccacactgtcttccacaatggttgaactagtttacactcccaccaacagtgtaaaagcgttcctatgtcaagcaatggcaacaaaagccaaaatagacaaatgggatctaattaaactaaagagcttctgcacagcaaaagaaactaccgtcagagtgaacaggcaacctacagaatgggagaacatttttgcaatctacccatctgacaaaaggctaatatccagaatctacaaataacttaaacaaatttacaagaaaaaaacaaacaaccccaacaaaaagtgggcaaaggatatgaacagacacttctcaaaagaagacatttatgcagccaacagacacacgaaaaaatgctcaccatcactggccatcagagaaatgcaaatcaaaaccacagtgagataccatcacacagcagctagaatggcagcttaatttttaaaatgctatatcaataatttaaccacatagatctgtcagttagaataaatgttacatatttaattgacaataattttttgctctcttagagacgtgtagatacactttgggtttatcaaatggttcttttttttttctttgagatggagtctctctgtgtcaccaggctggtgagcagtggtgcgatcttggctgattacaacctctgactcctgggttcaagcgattctcctgcttcagcctctcaagtagctgggattacaggcatgtgccaccacgcccagctaatttttatacttttagtagagacggggtttcaccatgttggccaggatggtctcaatttcctgacctcaagatccacccgcctcggcctcccaaagtgctgggattacaggtgtgagccactccgccaggccagttctgacatatttttagaaagattaggcaaatgctatggtaactcagttattcatgatacatgtcatattataagtaggagaattcaatattcatgattttgaagcaatttcagagtactataatcaccccacttcacagacttcagaattcattggaaatctctggaaataattagcaagttattagcccagactctaaacagaccttcaaaatgcattacatagatttgctaaaagagattgtcagtctgccatagtcactttggtttgatttgcattgaatgaaatttttaaaatgtaaagctaaactcttcaggatcactgcactggtttctatgggacaacactgaacagggctgccactgaaacaccttggatgagagcctcaaactccctgaacatatagcatctagcacactactgagagaatgactgggactcaaaaatgcatgcaatgaatttatttatgagcttcttggagaggaagtaaagaggttgtatgtaattacctcaaattagcactactacagataaagtaacaatattgataaagtaattgataaagtaatagtagtgctaaagtcatactaatcaagtagtactaatagccctatactagtagtaacaataaagtggtattgctattgattctattggtctgtctacctacctatctctctagatgggagggcgtaggatttggctgatgagattgggcttagcagtggagagcaaagagctcatgcatgctttgaacaggtacgcacacaaacttggtatcgtgtgactcttctgaattccagaaccaaggctaaaaggtggaagttttgttttgactatttgtgtgtcacattttccttttggtctattgtctaacatatgctgctagaattctttttactctgactactttttaggtggttagataacgctgttattgacgagatcacacccaagctgatcagagatctgcccaattcttgcacctaccgcaaggccttgggagaaatggtggtgcagcaggagagcagaaatgtaaccatcgccatcataaggccctccactgtgggagcgacgtggcacgaccctttcccagtaagcccactcacctgaattctgtattttgcttccaaattaaagttcttctagcccaattactttctgatgtcatttctccccctcctcctccttctcttccttcttcttctttcttcctcttcttcttcctcttccccttccccttctcctcctcttcttcctcctcaggatgtatagctaagtgcagccaatcatatatcaacccattgtactagggcaaaattccactttgggatcaggatttacccagcatgcagcttctctggcagttaccctgactgtcctagagttgaatggagatcttaaattagcttctaattactctagcctcaaaattcccatgggtgatggtttcatatcttggctttcccactgtagtttaaacataccgaatgttcttaatggtaaattggtagtattgcaactgccagggtaaacaagggttacaaagtgcacagaaggatctcagcttgggaacactgttttttctaacctcagtatagcgctatgtccttttgaaagtactttgaattatactatcttcttttttttattatactttaagttctagggtacatgtgcacaacgcgcaggtttgttacatatgtatacatgtgctgtgttggtttgctgcacccattaactcgtcatttacattaggtatttctcgtaatgctatccctcccccatccccccaccccatgacaggccctggtgtgtgatgttccccgccttgtgtccaagtgttctcattgttcaattcccacctataagtgagaacatgcggtatttggttttctgtccttgtggtagtttgctcagaatgatggtttccagtttcatccatgtcactacaaaggatatgaattcatccttttttatggctgcatagttctccatggtgtatatgtgccacattttcttaatccagtctatcatcgatagagatttgagttggttccaggtcgttgctattgtgaatagtgccgcaataaacatacgtgtgcatgtgtctttatagtagcacgatttataatcctttgggtatatacccactaatgggatcgctggatcaaatggtatttctagttctagttccttgaggaatcgccacactgtcttctacagtgattgaactagtttacactcctaccaacagtgtaaaagcgttcctatttctccacatcctctccagcacctgttgtttcctaactttttaatgatcgccattctaactggtgtgagatagaattataccatcttctttaaagcaagtctgtgaagctttggggcagataaattccagctccatcacttactggcaatgcaaaatttttgagttgtcccttccataaaacaagagggatactattttggagaggtggtttaatgagacaatgtatgaggagtgctcagtctctagtaaaaggcaggtccttactacaaggttcatggatattaatcccttcatcttctcctcctgcctctctcctttcccattatacacacacattttgacttctacactatgaggtaaacagacataataaggtcagctgaatggcttagagtttagggaacaaactcaaaaagacatttccctctaactggtcttaaatataatcttccctgtaatgtctttaagcaagtcaacacacaatacacacacacacacacactacatatacacacacacacacatatatatgtgtgtatctggcatggtcaaaatgtgtatctgtagctggtcaaaaatgtcaagaaatgggccattactaccaatcatgtctccaatattctcctaaggaggctaaagtcaggactgaggtggagaagtatggttggtgaattgcttagcagatcatgatataaggacaaggttcaatgtagcccttaagatgtcataaaacaccacaaaaccattcctgactcctgctatgaacaacaatcctggccaaattttaattcttgcgcaaagtgcagaaaatagccaatgctttgccattgatctttgggatcttaataagactgaattagatagttctattggctggagtttcagtgctcttgtttgaaatttattaagatgagactgcagatgttccaaagatacaacaatcttctgaaatgtgtaaccaatagaaatcttctttcttttagggttgggttgataatctaaatggacctagcagactcgttattgtggtatgtttaaggataaagaaataaccctctgaaatgtagtggaggaatagtaataaaattcttagtgctggcttagcttcattgattccaaaacataaatgttactttactaacaattgaagcatattatttcaattatgctgattgtaatatagaggtaggaagaaattatttttattctttgaggatttttatcaaaaaaacaaattaatgtactatcaattaccattcaggaattcttctttaaaaaactttttttaaattaaaaatattagtcttaattgagtgtggataatagaaatcccataattatgttatttttattagatcccttctcaaaatagttttacactattttattctccttttgtagtttataatataataaatatgtcaaaaacaatatgtacaacagactaataaatggttctgtttagctaagtctactctagtctatatcatgaaagtgttaggtctaaatttctaaacattataaacagcaattttttgaagtgctctgattttcctaacaatacaatactcctgactctcttaagtttacacatgtaaatgagaaggaactatatatgaaaatatcatacctcttctgtagctattagaattttcagctgaggttttacatcatcaccaatgtagtgtcactcctttgctctgcaaacttcagctctcaatatatagttaacacttttattttctggagatttttagactttaaagaactcattcaagattgtttaagaaacaaagcacgggatgaattgaagactttcattttaaaagtaagtgcagcaaaattatgaaggttaagcctgatgaatgtgaaaggcagacagcatcaaatgctggtgatgctggtaggaatgcaaatgttacaccacttacgaagacagttggtcagctttttacaaaactaagcaaactcttatcatataatctagcattaatgctccttagtatttacctaaagaaactgaaaacttgtccacacaaaaacctgcacaataatgtttacagcagcttaattcataattgccaaacttggaagcaaccaagatgtccttcattaggtaaatggataaactgtaatacatgtattgtatacatgaaatattattcagcattaaaaagaaatgacctatcaagccataaaaagacataaaggaatctcaaatacatgtttctgagtgaagccaatcaggaaatgctacatactgtatgactccagctacatgacattctgggaaaggcaaaactatggagacagttaaaaaaaatcagtggttgccaggagttatgggggacagagggatgagcagatggagtacagaggaattttagggcagtgaaactcttctgtataatactataattatggatattatgttcagatttttaaataaaactgaaatttaaaatagagtaagagggaatcaggttgatttgtttcaactgaaattcatgatcacaaagctcatgtctttatgcttcccagaaaaaaatattccctgctccattcattctcatcctttcccagagtaacagttcatatttattttctctccttcccatctttgctctttgctgatgactttattttctatttcacttgtaaaaaaaagtggtcatttgacaagaatttcaaaatctccagtctctacatctgctcatcttcatatatctatacctacattctgttatctctccttttcatatgggtgaactgtctttgcttctaaataatgtccacccctcttactgtgactgggtgctgtgtcttgttgtattaggattctctagagggacaggactaataggataaatgtatatataaaatgggttattaaagagtgttgactcgcacaatcacaaggtgaagttgcacgataggctgtctgcaagctgaggaggaagaaagccagtctgagtccccaaatcccaaaagtagggaagccaaccgtgcagccttcagtctgtggctgaaggcctgagagcccctggcaaacccctggtgtaggtccaagagtccaaaagctgaaagaacctggagtttgatgtttgagggcaggaagcaaccagcacgggagaaaggtggagccagtcgagcccttccatatttctctgcctgcttttatcctagatgcactggcagctgattagagggtgaccacccagactgagggtgggtctgcatctcccagttcactgactcaactgttaatctcctttggtgacatccttacagacacacccaggaacaatactttgcatccttcaatccaatcaaggtgacactcagtattaaccatcacacctgttatctacccatgcctgtcattccagcaattttcttgcttctttttctgcatctgaaattttaatttctccaccaagttcttcacatcaaaaaacaaaaaaagaagttatttcatttaactgaaaaaaaaccaaaaactcataaagagctaatgaataaagttatctcaaacatttgataactttaattataactttaatattcacagcttatatttatcaatagattgtcttaggaaaagaaaaagacttcccataaactagaagaaaatgtaaaatataaccaacatataaacagcaatgtgttaaagaataatatataaagaataatacaaataacaaataatgaacaaaggatatagacattatacaaaatatgaaacatgaacagacaatatataatgcttcatattggtaatcagggaaatgctattaaacatagaacaggatgatgttttacattagccagcttgacaaaaatttaaaatttcaatcacaactgtcagagaagttacagaacaaaggaaactcttatacatgacttgtaagtaatgagatggggaaggggacatagaagtcactgcctcacaatcaatggcggttactcaattcactagtcagtaatgtgtgctgtaagtttcacaatcattttatgctttttgtgagagtaatagtttaacaaaagtataatttttattaatctcacaataaatttgacctaacattttatgtgattgaattcctttagaccccattattttattatggctagtttcctgtgttttattttgtagatacatataataactctaaaagacagaaagattttgtaacatcagttacttctgggagtgaaagtgggaggagtatttttttttactaaatattacttactttttaaattttacactaggataatgtattactatattctgtaacaaaattaaaatataacattttaaaaagttttaaattaaagtaaaaagttgagtagatgagagattctgtctctaatcaggggctaatgactgattccactataaacaactagaaaactagacaaactatagaaaaccatcattttcaaacattagacaatcagcaactaaggactgtttttctccagttgagaagagaaacaagcaatgtaagccctacaatagccccttatttctgcctggggatacttactggacaacaccattggcagcagaacccagacagagcttggagaaatccctgaattgaagagagacaaatattattttaggagggctaagtgagcatctcaaatttaaagtaacgaactatacaaagaaagagctccagaaatcagcataggtttcccctgagtgacccagggactggctaattgagtgagcatccagccccggatctcgtgtctaattcccctcctgaatgtccaggatcactaccttgagctgtcttcatatctgcaaatgacagattcatctctgcccctcaggactgcagaaacctgtgcaaatactttctactttttatgaaaaacatgcacaatttcacaagcaaataccatttcctgtgttttggagcattagctcaaactttggaattcagagttatgggttagaccctttactcacttcacctttctctgcatacttgtgcctgatttttcctcttttttatttttgtttttgtttgagacagagtctcactctgtcacccaggctggagtgcaatggcctgatcttggctcactgcaacctccttctcctaggttcaagagatttataaaagagcaatataaatccctgtggaattccccttttacttaagaatttaatatcagcaaattagtttaacaaggctgttttgtaagaggctgcggttgcattcaaaaattggaatgggaacaacgacttgtaaaaattcaacattttatttatttatttatttgagagggagtctcactctgtcacccaggctggagtgcagtggtgtgatcttggctcactgcaacctgggcctcctgggttcaagcgattcttctccctcagcctcccgagtagctgggatacagaaacgcgccaccacgcccagctaatttttgtaggtttcaccatgtcggccaggctggtcttgaactccctacctcaggtgatccacccacctcagcctcccaaagtgctgggattacaggtgtgagccaccacacctgaccaaaagtcaacacttgaaactaccacctgttatattcactgtgtctgtgattggacatatctttttcggtggccaaaaaattataaaacggacacagaatagtctcttcaaaaaattaaggatgttctttcttcttaaaaggattataaggccagacgcggtgcctcacaactgtaatcccagcactttgcgaggccaaggtgggcagatcacctgaggtcaggagttcaagaccagcctgatcaatatggttaaactctgcctctactaaaaatacaaaaatcagtccagcctggtggtgggtgcctgtaatcccagctactagggaggctgaggcaggagacttgcttgaacctgggaggcggaggttgtggtgagccaagattgcgccactgcactccagcctgggcaacaagagcaaagctccgtataaaaaaaaaaggtgtgtgtgtgtgtgggaggataataaatataattcgaactggcatctaaattaattttagtcggtatgtgtgtgcacgttgtgtgtgtggatgtgtggatgtaaatggcagtaaaaggtaaaagggaaaggcggtaaaaagggagatgatctaacattttcaaaactttttatttttgtttccttttgtgttttatttatatatttttggcagcaaaattgtgtttactaaaaaaaaatctggactatgaacacacttcactgctttgaagaactccaagccaaataaaaagaccaatcaatattaaaagcagtataactggttactttcttaaaaatacataaaaagaatcaaatgcaacagtgtagggagaaaatcacccccatgtcagaagtcatgacttcttccaaataaagaatatgacccatctgccatagtgaatcaatatttatttcaggacatgccatgtcaaaataaaacaaagagtcaacccttgcctttagcaattatattgtattataaaagcactttataactccatcccatctttaagtataagttactggtatgtgggctaatgattatctgtaagcatttctctattcagatccataatccaagtgctctctgaatattacaaagtgacaataagtgggaagtggaggaggaagaggaaagagaggggactaaggttctcccagtttaaggttttgttgcaatgaggggatgaggaagtatgaagatacttttgttgtcttttcatctttatactgtgttaagtaacgtttacaacataaattcagcaggcttttcctgacctgtaactcgaagttttcttcctgcaaacaatgtatttacaaatgtgtttattagcttacacagcaatctcacaataactagtaaagattaaaagggcacactcctagtatatttgtttgcagtgttttaagggaaatacatattgccatggtgaagctctaaatagattcaacgaaacatctaaaaatggaaagttgttaaaaaaaaaaaaagcaaagaaatatcgccaaagaaaaaatattaatcgtagcttaaatataaaactaaatcactagttaaactatacagatctaatacaaaccaaaaccagcctgaaagacccaaccttaaaaaatgctaaaaaataaggcataaatctgcataatattcagttttatttccattctctcctttccctctactatgtatgctttacctgatctgcctctaggggcttacaagaaaacggtttccggtttccgtcttccgtcttccgtcttcaatttgacctcaaatgtcctgagcaaagtttttgctattctgctgagggttcttttgctggtaagctttagatatcgttatttctgctaattcagtagttttgatcgtagtgccaaatttaaattcttccactggttcttctgtaaggaattaaacttttatggtgtcttgcctgcatagtattatttttttaagaaagaaaacccaagcaaaatctattgcttacagaggtttcttactttttaaacaaacagaataactcttgacaattttaaaaccttgggagaaatagttcattagaacttcattatcttaccatgaagaagtaaatactaaaaacctgttctgaagcacttggttacttttctctcccagagtctaataaagcacatgtgaaaggaccatttgtgttagtcagaaatacattttatgttctgctacttataagtactcagtatgttctttaggactcattttgaagatgcaccaggaggcttttctcattcaagcactgcctaccgtgatcgctgaattctgacctcaaagaagatctaagtaatttacatcagtgctcaagaataattctggacatcttggtccacagcctacagcaagtggtatctgtaaaattaaaggataattccagtgggcttggtcggactgctgctttgccatctcttgtttgttttgaggaagtggggggaggctaggtaagaacacggaaatagggaacggggtaagggagaggtgagaagagcaaggagagataaagcaggctgtgaacatactgctcgttaaccaagccatactcatactgttgagatttccatcattttgaagtacattatcataacattaaaaaagaaaaaaatgttaagaaaatgtatctaatttttaaagttatcaccggaatatgctgaaataatttggctttttgtaaaatataaataatgaagacgctgactttttttgtgcttgtgaagctaatagatcacctccacgagacaggcagcaatgatgaattgcaaaacgttattaatgaagggaaaaggttcaagccaatattcacactgcagtcaatgaaagagtaagggggcttctgaggaagggttgaagatgacatgggagagtagcaggaacaacccccttcgctgactgtttgctcctgaggcttttccagttttatgtcactcatgtcttctctgcttccgtcctgtgtgctttccattcccggcaaagctgctgctacacgtcgaaagagctgctttacattgtatccagcttttgccctagtttcaataaacgtaacattcagccctttggctttcctctctccctcctcaactgacacttgcctcttgtcagcaagatctgttctatttcctactagcgtgatgataacatcacttcctctttctgttctgacatcatcaatccactttgtagtttgctggaatgagttaacatttgtgatatcgtaaactactacagctgcagcagaatcacggatgtacctgggaatgaggctacggagacgttcctgacccgccgtatcccacagccgaagcccgattgttccatcctccaagtacatagtttttgataaaaagtcaatgccaattattgcctgataggtgttgtcaaaactgtcatacctgaatctggtgatcaaagatgtctttgcaacgctttgctcccccaggaacaccagcttgaatttcctcagcggattcccgaagtctccgcccgcggacatggtggaactagaggagctgtcgccgcctcagcccagagacctcccggaccgatgctcctccagccggctgacgaaaaaggcgagcggaagggcgggcgcgcagctctctgcgccctgcaagggccggtggaggagcccggctggaggagcccggctggaggcagcaggctcgccacagagctgcagccgcctgacctcccggcagagtagccgagcacggagcgagcccgcggctgggaagggaaggagggcggtgtcgcaggagccaggggtgtgctttggcttcccaaggctagggccgttccctccttcgcacccggctcagagacctgcgggagagagacggagggtgcggagcccaaaccgcagatgtatccgggatctctcacgcgcgggcttcggcttccccagccgccgccgccgcagcccaacctgctgagtgcgcgacctctggccagggcgagccagggcgcctcaacacagttttttaaatacacaaaacatatgtactaaaaacaatggtgcggtgaaaacaaaataatgcaaactagaaaaaggacaaaattgacattttaaaaactttattatgtattattaaatatatattaaatagaaatgttataaaatttaacgtccctatctccccgtctctgtgagaggtcagaaacctaacttttctaagccacaattaagcaaacacatctggcctaatcacatggaccaacatctctcctaacatcaggcaggaagtttcagtagctcctgcaaaactctcccaccttgcatttgaacagaaatgtcaactgatacaattacccaagacttgtattagactgaatctcacaatcacactcagcctgattattaacccttctcctgcatcttgctcacctaaatgtatctacattttctatgaactgaagagcttagaaatgtatgtcgtccatgtattatagtgtaagttattgtaatatagaaatatggattttctttaactcccattttctgcctaggaaatagcaatgttttttgagtatggcaagtgtttccaagcattcagaagtggagagtgtaggatatccactgcaaaatgaggtctgcttgtcatcctcttagtctccactgctatccctccctcatctctctctgtttcattggtgagtatggaagatcagtcacttttatatgaaatgaaaattgatgaaactaaggtgttgatttgattatccaagcaaccatttattgagtgttcattacaagtcaaattgtgttctggagaacagctcaggaaatgaatgtttgacatcgatgtacataacagaaatacgaacataccattaaaaactcagacctcttatgacaatccagattctcatgtaagttttgtgaagctctttcaagatgaaaatgtaacaattcaaaaaaaattatttaaacaagtcattcttgagacataaaaatggaattagaagatcatatatggctgtttcactagctgaaatctaaagtactgtttttagtcaattaacggccatataattgttagttttatatactgatattcatcagaaattaaaaactttaaaaagtatttctgtctcattctactaattttaaaatttcatttatttggttatatttcttcattttacctggccttgaatacttctttcctgcccagcattaagtttaattaatgtctaatttgtttacttggtttagttacttttgatcatgcttggtacacttcttatggaccaggcatgtagaaatgtttacaagtttatggtcctcactcttccaaatccctaatggcggcacccaacagacacataccacaatgtaaacacatactcacacgcacctgcacacccatactcacccacctacacgcagacacacacccatactcacccacctacacccagatacacctgcactcacccacacacacccagactcacccacacacacctgtagtccccagctactcccaaggctgaggcgagagatgcttgaatctgggaggcagaagttacagtgagccaagatcatgcctctgcactccagcctgagcgacagagcaaaaccctgtctcaaaaaaaaaaaaaaattagacaattgtggtagcccatgcctgtattctcagctacttgggggagctgagttggggggatcacttgagcccgggaagtcgaggctacagtgagccgtggtcatgccactgcactcgagcctgggtgacaaagcaagatcccttctctacaaagaaaaaaaaaaaagaagtcatccaccatgggcactgagtctgataaccacatactttcctcagcataaatctcccagtagagttgcttttagaaaatagaagtcatcccagcgcagtggctcatgctgtaatcccagcactttgggaagctaaggtgggagaattgcttgagccctggagttggagaccatcctgggcaacgtagtgagaccccatcgctatatacaattttaaaaagtggctgggcatggtggcatgcacgtgcggtcccaactacttggaaggctgaggtgggaggatggatggagcccagatggtggaggctgcagtgagtcatgatcacaccactgcactccagccccagcagtggagtgcgaccctgtctcaagaaaaaaaaaaaaaaaaaaaggaaaaagaaaatagaagtcaagaatgggggcccaaatgactgttctgagtttctttggtctgtagttatttttgtattgtttcacagcctttctcaaaaaaaaaaaaaaacaaacccaaacaaacgaaaaaaccaccaccactaccaccaaccaccacaacaacaaaacaggttttaagtgacctaataggtattctgtgtctctggttctttttcagagaccaaaagactaggagcctggcttctagttttcaaaagagctaagtgactgacctaggctgatgactcgcaatcctcgttttacagttgaaccacctgaggagctttttcaaaatacacatgtctggtttccagacccagagattctgattgggtaagtcttgcctcagagatgggaatgtgttctttttaaaagctccacagataattttaggaggcaatgccagttaaaagcccccaaatcagaccccattcagcagatgctagtgtaggttaatactgtgtgagaacgctagaaaaaattatgtttgtattttctataagcatatacagaaagtatggtacaatgaaaaacatggttatagtaatgccaaattgccttccaattaatttcttatgaagatattagttaattagttgaattaatttctggtcaagatatactatgacctctattatttttctattctaaaagtggaaaataagatactctattactatgtttcaataataaaaataatcaatattgattgtgtaccactatgtcagagactgctaagtatgttaaatagaattatcttactctcttttcttgtttatttttttttgagacagaatcttgctttgtcgcccaggctggagtgcagtggcacaatcttggctcactgcaatctctgcctcccaggttcaagcaattctccctcctccgcctcccgagtagctgggatttcaggagcctaccactgcgcccagctaatttttgtatttttagtagagacgaggtttcaccatgttggccatgctagtctcgaacttctgacctctcaggtgatctgcctgcctcggcctctcaaagtgctgggattataggcatgagcactgtgcccggccacaagctagactttctatgaagaggagcagaaagtaactttattatttctttctcacccctctccaagtaaatttgctttgtggattgttccccaccttccaccgtatctctggatggaatttcaagcagatcataggatttccagtcaccatctgatattatccattctagcccgttctatttgttacaactataaactttcttctaattcagaatgtctgttctcctccagctgggagaggctcaggagcctgcagtggggagaaggatgcagttgacttcaccttctcctctattcactagtaatcgctgcttgtggtcccttgggatggtgggaatagttagggagaacaaggatcatccttaaacagcagctgctggctgggcacagtggctcacacctatattcccagcactttaggaggcctaggggggcagatcatttgaggccaggagtttgagaccatcctggccaacatgacaaaaccccatctctactaaaaatacaaaaaatactaaaaaaaagccaggcatggtggtgcgtgcctgcagtcccagctgcttaggaggctgaggcgtgaaaatcacttgaacccgggaagcagaggctgcagtgagccaactgcactccagcctgggtgacagagcaagacctcgtctcaaaaaaaaaaaaattaaaaaaacaataaacagttgctgccttgtgatcaggcagctgggtgctgtgtacactgtgtatccagtctattggctctttctctttagagggaatgtagtagattttgagacactgttcatcacctgggatctcccttctgcagtttccttgatggttgttcagatacctcctccagagtgccacttgcagtttcaccctcagagtctgtgttccgggaagaattacccttttattgagatcacttccatccttcaggtgggcctgtggtacagggtcccttttaaacctactcatgtccagtgccttctccaggatctgtatggctcacagtataaacaacttcagtacccctccagtgggataatctgcaagtgcatgcagttcacagtgcggtggtgcttccttctctcccagcaagcagtccaaaccagtgtttactctttggaatcagatgttaaatcattccccaaattccaggggactcatgtcaagctctacaaatggtcctgttgaagccattgtctgggcttgacttgtaggaaacgccacagctcactaggacctctttccaatggcctctgcagcatcccagtggaatctcggattgtaagtgtccgcccagcccctcaacttggaatgtaggagtgcctgacacctattttgttgttggcatttggagtatctgatgaaaaccaaaatactcaaatttaatatacaattttttttgaagggcagagggagaacaggcatagaggttaggtcactattattacgttcttgaaatcatttcttttttttttttttttgagacggagtctcgctctgttgcccaggctggagtgcaggggtgcaatcttggcttgctgcaagctccacctcctgtgttcatgccattctcctgcctcaacctcccgagtaactgggactacaggtgcccacccctcgcccggctaatttttttgtatttttagtagagacggggtttcactgtgttagccaggatggtctcgatctcctgatctcatgatgtgcccgcctcagcctcccaaagtactgggattacaggtgtgagccactgtgcctggcctttgaaatcatttccttatggtctaacatgttagaatgtatcattgagatcactataaatcagaataaatactccttttgaattatgagatgatggttaggtgtggtggctcacacctgtaatctcagcactctgggaggctgaggcaggctgaacacctgaggtcaggagttcgagaccagcctggccaacatggtgaaaccctatctctactaaaaatacaaaaaaacaaaacaaaacaaaaaattagctgggcgtggtggcgcatgcgtgtgatcccagctactcgggaggctgaggcaggagaattgcttgaacccgggaggtggaggttgcagtgagccacaatcacagtactgcactccagcctgggcaacagagcaagatgtctcaaaaaaaaaaaaaaaaggaattatgagatgaatgaataaatttagatgaatgaagacatgtatacatttacagcctgccaaataactacttgtaacatttgggtgaatttctttatttttcatgaatgtgttaattttttaattcaataagcaacatgcgcaaaacaatattctggactcctctggaccctagatacatacagcaacaatcttggaggaaaaaaacaggtagcaagaaatcaacatttagcaaacacctcctctgtgttaggccctaaataagaatttcaatgcatagtcaagatattcatatgaagtctcttaaatcccatgttttaaaaaatacagtaaatcattttttggtgaattccttttcactagagatacgattggactacatgttgactttataagtgccataatcataatacgaaataatttcccatgtttttaaaatctcttggtaaataatttcaaagtttgcaaaagactcctgtaattgtatatcccataattatttaaccttctaacaatgcacatttactctttaaccattttatgtatttcttattttcttccttaggctaaatccgtggatatagaattactgagtgaaagaaccgttataaagctcttggtacttactgcaaaattgcttttcagtcgggttttagcattttacgtttccactaccattctatgaaattgccatttctggccaggctcacacctgtaatcccagcactttgggaggccaaggcgggcagatcaactgagttcaggagttcgagacaagcctggccaacattatgaaaccccgtctgtactaaaaatacaaaaactagccgggcgtggtggtgcacgtctgtaattccagctacctgggaggctgaggcaggagaattgcttgaaactgggaggcagagattgcagtgagccgagattgcaccactgcattccagcctgggtgacaaagtgagactctgtctcaagaaaaaaaaagaaaaaaaaaagtgctatttttgatgatggggggcaaaaaccttttgctattttggtagattaaaaacggttatctagccattttaacttgtatttatttgattacaaagtgaggttcaactcttctttgaaggtgcttgtagttcttgttacataataatattttaacaagaaaaatagaacggtttttccttagggtaaataacatagtatctctttgaggccaacattcatgttcattattacctttttacaatctggaattttccattcagaatatatggcttattgtctcagttcagaaattagattcttgctgcttgtttaccccagttggctctgcagccctgagaaaggtttttcagttcttgcaaacatttgtatgtagagtagattttattaccatgtagaaacagaacagaagttcttgacaagtggaagtactctgtgatagggcagcctcgagtgaacaaaacaggtaaattgtgaaatttttcaagtatcagaagtaacattttttcctaaggcaggaaacagtatactcacaaagagatttttacatctgcctgggtcttggtggaatcattaagggaaatgtgaattaaattaagaaaactttcttaaaaggcttttgtctttcaaataggcaaaatgagctaagaatacagataaaggtgtgtgaatgagaacaagttatgatgaccccaggaaaacccttctccgagttacctggccaccagctgtgacccctctgaaggaggaggaaacaagcactgctgttcagtgagcctgctcttccaagatgccaactcatctttatttttctttcctaagtatcttacacatttacaggatcatataaatttattttccaaaacaaaatatttttgttgtttcacccatttcaaaacaaacgtgtttgtttttaagttaataatgttgttaaaaactcagcttataaaattgaaagttgctaggagtggtggctcatgcctgtaatccaattacatatatacatatagatataatctcttctataattggtttccatggtcatatatgcctattttaaattgtattttattttattttttaagagatgggtctcactatgttgcccaagctggccttgagcacccgtgctcaagagatcctccagcctcagcctcccaagtagctgggactataggtgtgccactgcactggactaacatatgcctgtctatgtttatacgtataaagttattcatccattaatattagtgcatagaattctattgtatagatgtgccttaatgtatttaagaaatcctccttctgatgggcttttaagtctctacttttttactattacaagcaatacagcaatgaacatgaatttcgtgtatttgtcccactttggtatttgttctcttacaaaaaattccaagatctggaatttgaagattaaagaatgaatacttttgtctgggcattgtggctcacgcctgtaattccagcactttgggaggccgaggctagtggttcacctgaggtcaggaatttgagaccagcctggccaacatggtgaaaccctgtctccactaaaaatacacacacacacacacacacacacacacacacacacacacacacaaattagctgggcatggtagcaggcacctgtaattccagctactaaggaggctgaggcaagagaatcgcttgaatctgggaggcagaggttgcagtgagccgagatcgcaccactgcactttagcctgggcgacagagcaagactccatctaaaaaaaaaaaaaaaaaagaatgaccttttaattatgatatgtatttcttccatactgccttcaaaactgtgggactaatttatgcttctaaccgaagtatatgatagtgcccatttccccacaatctcaccaatgttctaatgggctgtctgtcctttgcttaccttttcataggcgctccttgttttttctgatcttcagtaccttgtcatttagatgttttgcaaatatcctttctcacggtctttttattctgttgggccttttgataaacagaagtttatgaatttagtcaattttattcatttatttgtattaaagttatattcttttttttttttttttttttgagacggagccgctctgtcgcccaggctggagtgcagtggcgcgatctcggctcactgcaaactccgcctcctaggttcacgccattctcctgcctcaacctcctgagtagctgggactacaggcgcccgccacgacgcccggctaattttttgtatttttagtagagacggggtttcaccatgctagccagaatggtctcaatttcctgacctcgtgatccacccgcctcggcctcccaaagtgctgggattacaggcgtgagccaccgcacccggcctaaagttatattcttttacagtatcttctaacagttttagaattttttttttgacatttaagttttcattctacctagagcttttttttgtaagagagaggtttccaactttaccttttccatctggatgcccaattatcccagagctatttattgagacattcagtcttcattgatgtgccctgtctttacttatatgtatggatctgtttctcaacactctattctgctccattggcctgtttatccttgggctaacacaacactgtcttaatagcagcagctttataatcattgttagctgataaagtatgtcctctcatcttgtgcaataggattgccctttcctacacctttgcaaattctatgcattgtcctgtgttcaaaaacaaaaaataaagctgttgagatttttattggattgaccatgtgaactaatctggagaacattgacatatttccattactttttttttcttttttttccttaaggtcaggaaagcatcacatatttctattactgagtcttctaaacgatgaaattatctgtctccatttatttagatctcctttaatatatctataatttttaagaggttttacacgttgttagattaatttccagctacttgtactttgagatgctattataaatgacttttttaaaaagatggggtctcactattgttgcctaggctggtgtcaaactcctgggctcaagtgattcgcctgtgttagtctcccaaagtgctgcattacacgcctgagccaccgcaccaactgtttttttttttttttgagatggagtctagctctgtcgccctggctggagttcagtggcatgatctcagctcactttttttcattttctaattgtttgatggtagtttttatgaatgtagtcaattttttatattgaccttatacccagcaaccttgctaaataaatttattaattctaatagtttgtagattattttcagtttttcaggtataaaactgtccagaaatacagttttatttctttcaattgtgtataccttttatttatgtttcttcccttattctattgcctagaacttccagcagtgctgactagaagtgcgccccgttcttgacctcaaaggagaactttcaacattttgcatcgtgtttattctagagttttgtagatctcctctgtcaaaattaggaagttccattgtatttctaaatttgctgagaacttttattaaaaatggatgttaggtgtggacgcaggtggctcacacctgtaatcctggcactttgggaggctgaggcaggagaatcagttgaagccaggagttcaagaccagcctgggcaacaaagtaagacactgtccctacaaaaaaaataaataaataaaaaacaaaaaacctagccaggcgtggtggtgcatgcctgtgatgatcccagctacttgggaggctgaggtgggaggataactttagcccaggagtttgagtctgcagtgagctataattgtaccagtgtactccactgtaggtgacagagtgagacccccatccctgagggggtggaaaaagaatggatagtggaatttatcaaatgccacttctgcatttattaagatattcatatgatctttctccttttatctgttactgtagaaaattatactgtttttacatatattgtttttaaaattataaataaaagtcatccaaatgagacttatttccatacagatgagactgtagcaagccattcacttccattgggtcattttttttttttgcacttcgttttaagcaattgaatttcaatgacaatataagcaggtgtttatcatgagtgtgtgccaggctccttcctgagcactttgtgtgtattatcccataaatcatctcaacactcagtgagctagctactgccattcctgtttttcagatgagaaaactgatttggagagatactgagtgatttgcccaggtcacagctggtaggtagccacgctaggatttaaatctggtctatcttgaaaacatttgatctgaagccataccagtgcgttttactccatgcagccatccgaatcacatgagaaacagtcttataatactgtgccccagagagtagccagccagactggttctcagggactagtgtaccatccaaaatacatttattagaaaacaagaaagaagaaaaataaacaaaccatccaagataagaagccagagaaaagcagcaaaataaatccaatgaaagtaatggaaggtatacattttaaaaaacaatatagaagacaataactcccatgaaactgtaagattaacattctggtgtttaaattttgttttttcttttttaggcataaaggcaacacaagtggtcaggctcagctactctggttcctacagactttcccctttgggatagcgtctctcaccatcttgactgcttaccaacagaagcgccaaaaccaaacttgaggatgtccacaagcttgctctacacttctacattcatcctcatcttttttgtgtgtgtttgtggggtaggggaggtgcagtgtttactcagtgatctttctactttctagaaagtgtctgtccttcaaaactatttaagagcctctcattagtcattttttctcttatatgctctggttgagcttgaatagaccagttgttgcttaagaaagaaactgaaaagattttagcttttcagtcctatttggcagaggacttcagctaccttcttatggtctttggctgtgttggtgccctcatgtgctctgggctaagccacatactaaattgactttttggtttgtatacccttgctctcgccttctgatgaaaacaccttaccctcaccaccaccatctttgctctcctttcccaaaactctttccgccttgctgcactaagatagtgacacctccaccacacgtcaattccacacacatttattaggtacctgtgaagcaggatcttatcctcttaaacttccacttctcacactagagagaaagataaggaagatgagcaagtgcctggaatggggcaggctgagtggtcacacaggcacagaggcacactgagaacctacaggggagactgcagagtgccttccctgatgctgcagctggaagtcatccttccctccacctggcccctgagacactctactctgtagtgtgcagtctgatggcactgctagatttctttttcagctcagggccacagcttaaacagctttacctttcccctcagcacctgtcccactaccttgcacacaggtactctatccgtgtttattgaacaaaggagggaaactgatttcactttcacttgttcattatcattccaatttttatgtgaaaatggcacaacccatttggggtacactcatctcaaaagaaaagcccaagactacctctgactggtaccaccttttttgtgggttccttggtgagaaacctttatctttttcatacttttctattctccatcacttctccaaaagtgtctctttccagctctgatttattcaaaacacacaaacattcctgtttagagattctagcccatggattatccggctagttagtacctctcctgttcacttggttatactttattattgctcagaggttggggaggcagaatgactgtgtcccctcaccctggcagaatgactgtgtcaccactaggagccattagggcttcttcccaggaggactgcctgcttgctttctggggactagcccttatttcccttctgtggtccagtggggcaagtgatttgtattagacaaatatttataagaaacaaccccctccccaaaatagagccaccaagtaaagcacaagcctgaaagatgatgaactatgaattgtctctagtggatataaatttctgcaaatatatctcagtctttctctcttttctctggtgattaaaaagttggtttttggtaaggaaaaggatttttgaccatagagttatgcatcatggaaattcaaacccgatttcttaatacctggtcttctccgaagagaaataatgatagtaatagtggtgctgggaacaatatggaagattattgaatgaaatggattaacttgaataaaatgctgtgaattatctctagctgaatgcttttcttgtatttgtcagttttgatatattgatgcacatttgattctttatctcaaatagactttactagggaactgtttatacacttcagatcccagtttgtttttcactgataaagaaatgcaaagcactgtggttgtcgggtatatatgtattatatttgtagacctgtccatgccccacttacctcctccacgtacagtgaatcactacggtagacataagtgtctccttttcattgtaggattgtctcctttttgtttctgtttttattcaacatttgataaagtctatgcactaagtaaggagtgttctggcatttttttaatgcacgaagtccaggatgcatcacttaacaacggggatgcattctgagaaatgcattattaggtgagtgcatcattgtgcagatatcacagggtgtactcacaaacctagatggcggagctgactacgcacctaggctatatggtacagtctgttgcccgtaggctacaaacctgtacagcatatagagtagtactgaatactgaaggtaactgtaacacaatggtaaatatttgtgcacctagcttttctttaggatgggattttaaaaaaaatagacaaacaggccaggcacagtgggtcacgcctgtaatcccagccctttgggaggctgaggtgggcagatcacctgaggtcaggagctcaagaccagcctggccaacatggtgaagccctgtctctactaaaaatacaaaacagccaggcatggtggtgggcacctgtaatcccagctacttaggagactgaggcaggagaatggcttgaacccggaaggcggagcttgcagtgagccgagattgtgccacttcactccagcctgggcaacagagcgagactccatctcaaaaaacaaaacaaacaaaaaaatagccaaacatagaaaaggtacagtaaaaatgtggtgttctaatcctatggaaccagtgtcatatgtgctgtgtgtcattgatcaaaacgtcaatatgcaggcacgcctgtataaaatcctttcatcttatttggggtattatcatggcttagatgcaaagggggatctagtgagcaaatggtgcagatcgttcctttcatagacccataaacatctcagtgaggtgaagtaacttgcccagtatcacacagagaggcatgattctgggcctcgtgttgcccacctcccccatcatccaggagtttagtagtaagtctgtgaagcaacaaatttaaaaatggagacatcttggctttgtgtggtagtcatggtggtgatatgggagaaacagctttatgttgattttggatgagaaaaggccagaggcatcttggtggaagcaaccatggaaaaaaaccaggctaaactgttttcatacccactccttagatttccaaagcacatatagtttggaaaaataaaaaaggacaaaaaaccgacaaaaaaaaaaaacaaagacaaaacaaaacaaactaatgacctcagaacttggaggggcaacccacccctacatctggtgccccccagggacaggccatagttgaaagaactaatagaacactcaaaactcaattagttaaacaaaaagaagggggagacagtaaggagtgtaccactcctcagatgcaacttaatctagcactctatagtttaaattttttaaacatttatagaaatcagactactacttctgcagaacaacgtcttactggtaaaaagaacagcccacatgaaggaaaactaatttggtggaaagataataaaaataagacatgggaaatagggaaggtgataacgtgggggagaggttttgcttgtgtttcaccaggagaaaatcagcttcctgtttggatacccaccagacatttgaagttctacaatgaacccatcggagatgcaaagaaaagcgcctccacggagatggtaacaccagtcacatggatggataatcctatagaagtatatgttaatgatagtgtatgggtacctggccccacagatgatcgctgccctgccaaacctgaggaagaagggatgatgataaacatttccattgggtatcgttatcctcctatttgcctagggagagcaccaggatgtttaatgtctgcagtccaaaactggttggtagaagtacctactgtcagtcccatcagtagattcacttatcacatggtaagcgggatgtcactcaggccacgggtaaattatttacaagacttttcttatcaaagatcattaaaattcagacctaaagggaaaccttgccccaaggaaattcccaaagaatcaaaaaatacagacgttttagtttgggaagaatgtgtggccaatagtgcggtgatattacaaaacaatgaattcggaactattacagattgggcacctcgaggtcaattctaccacaatggctcaggacaaactcagtcacgtccaagtgcacaagtgagtccagctgtcgacagcgactcaacagacagtctagacaaacgtaagcataaaaaaaagcagtctttctaccacagggaatggggagaaaaaggaatcactacaccaagaccaaaaaggagaagggctgtgtcaggtcctgaacagccagaaggggggaggcttacggtggccacagaccacaggaggggggggtctggaagtcaaacccgagaaacaagagagcgtaagccataagaaacgatcgacccagaagccagtcaaacggaaaccattacaaagacgcgtaaagcaacataataagacagatacnnnnnnnnnnnnnnnnnnnnnnnnnnnnnnnnnnnnnnnnnnnnnnnnnnnnnnnnnnnnnnnnnnnnnnnnnnnnnnnnnnnnnnnnnnnnnnnnnnnngaattctttaaaaaatattcaaataatctgcaagaagggaagacagaagaagcaggaggataaaaaccagaagaaataaacataacacaaataataaaatggtagacttacgcggtaacacagaaattacattaaatgcaaatgatctaaatacacctatcaagagacagagattggcagagtagatatagaaccatgacccaattatatgctgattataggaaactcacttcaaattcaatgacatacatgagttcaaagcaaaagaatggaaaattgtaccataaaaacatttattttaacaggcaaatgtagctatattaatatctgataaggtacagttgagagcaaagaaacttaaggaagacacagagaaagattacataatcacaagtagaatcaatctgctagaaagacataatgatccgaaattcaacaaacagagtctcaaaaacatgttatttaaaaaattaaagaactaaaaaaagaaatagacacatttacaattatagggtatttaaatatcccccacctctcaggaacatgcagaactattacacagaaaatcagcagggcatttaacaacgatcaagcaacaggacctaattaatatctgcagaaaactcaaagcaacaacaggagaatatatattcttttgaaatgcccataaaatgttaaacaatatagactgtgtgccaagcttaaacaaatctttaaaaaatgtatagaatttaaattctatacagtgtcttctctgaccacaatagaattaaagtagaaattaataacagaaagaaaaaaggaagatctctaaacatacggaaatttaaaaacacacttctaaatagcctacgtgtcaaactgaaagtctgaaaatttttttaatatttagatataaataaaaacataaatgcgacacatcagacatcagcaaaaatagtagagtaaggatttccacaagctctatcctccataaaagcaatgagaaaactggccaaaacagtaagtttttcagaactctagatactaagcaaaggcttgcagcaatcctgagtgtgaatttaagaaaagcagctgaatctctgtgagaatagtgtgctttgtggcatttaacatgtccatttcctgttctctctctaattttgcaggttaaaaaaaaaaaaaaaaaaaaaacagccgtttggcagcaactagaggaggcacaatgtggtcagagatccttcaaagcctctttctcaaagaattgtcattatttgactagtctgttcatttcccaaaagactctgcatgcaaggctgtctttttgtgacctgattcagagcttgtccagtgaaaaaaaccttttcccaggggcatttgttgaagccattcatagtcaattttttaactttgtgactgcctaaagaagtgaataacagtggaggctaataataggctaaccaaatgtttaaaaggaaaagtgggacattgaggtgtatatagagactctgtaaagctatgacatttctggtaatcagaaagttctatacacatatatagggctatgtgcatgctcaagaaacacctgagaaggccctaaggccttcttacttctgtactttgaggctctgctcaagcaggaagtaaagggtaaggcaggcttgttaaatgcctggctgaatgtaaaaggtgtgcccgatatacagaaagagctcctcagcaaagaatggtgacttattgataccatacgtttaaggaaatttgtgtccactctttagttaaccattaagcgaagtgagcagaaattttactggtcactgatgcagtttggctctgtccccacccaaatctcatcttgaatcgtagttcccataatccccacatgtcatggaagggacctggtggaaggtagttgaatcataggggcggttaccctcatgctgttctcatgatagtgagggatttctcacgagatctgatggttttatatggggcatttcccccctttttttggcacttctccttgctgctgccatgtgaagaaggatgtggttgctttcccttccaccatgatcgtaagtttcctgaggcctcccaagccatgctgaactgtgagtcaattaatattctttcatttacaaattacccagtcttggttatgtctttattagcagcgtgagaagagactaatacagtcacacatggcaaagaatacagactatacagaattagccactaaacaaacaacaaaaaaaacctaaacaaaccccaggagtggggaagaatctgattttcacagttgccaaatatactactataaatttccagtttggaaaaaaaaaattacaaaatgcaaagaaaaaagaaagtatgacctatacacagggtaaaaaacaatcattagaaacttgcctctgagcaagccctaatattgaacatacaaaaaaaaaaaattaagctcagctattttaaatactctctaagagctaaatgaaatcatgccttcaaaaagtgttaaagtctatgaaaatgatgtcccaccaaatagagaataacaataaagagacagaattttttaataaagaatcacacacattctgaagttgaaaggtatgagaactgaaattaaaagtttcctagagataataaacagcagatttgagcaagtaggagaaataatccaggaatatttcaattgggattggaacaattgagattacacaatctggggaagagacagaaaaaaatgaacaggaaaaaaaaaagattaacagagcctcagagacctacccagcaaaccaatatatgcataatgggagtaacaaaaggagagaaaaaaagggggaaatgggaagagagagtacttgaagaaatagccaaattttaatggaaaatgttaatccaagaaattaaataattccaaataagacaatttcagaaatccatacctatttacattataattatactgggggaagtcaaagacaaagagacactcttgaaattcacaagtttttcatttaaagctatggatgcccagaggcaatggaagagacagtcaatgtactaaagaaaaggctgtcaagatttctatgtgcaaaaaaaatccttcggaaatgaaggaaaaattaagacattccaagataaacaaaaactgagataattcagcaatggcaaaccctttgtataacaaacacaaagggagttcctcaggatgcaatgaaagaatactcattgtaaactcaaacctaaataaagaaataaaggagcactagtaaaaataactccatatatataaataaaagacagtataaatttattttaaattccttttttctctaataatgtgaggtacatgcacaattcagtgaatatactaaacaccattgaattgtacgtttaaagtgggtgaattctacatgtgacttaaatctaaataaagctgtttttaaaaccacataaataattatactactgtgttgataagcttataatataaatacttgatttatatgacattaataatacaaagaagaggaaatggagataaattggagtaaattttctctatgattttgaagtcaagttagcattaatcaaaactagaaagttttaaaccaagacaatagttgtaatgccatcaggaagccatgaagaaaataacacaaaaatgtactagtaattaaagtggcatactagaaaaattctacttaacacaaaagcagggagtattgaagaaagagaagaacaaagatataaaacatatagaaaacaaaaaccaaagggacaaatgtaaattctgttatagctgtacttacataaatgcaaatgaattaaacactccaatcaaaaaacacagattgatagaatgaataaaacacatgatccaactatgtgccatctataaaagccaatcttttgagtcaatgatgcaaatagtttgaacataaaaaaaattgaaaaaataataccatgcaagcaataaccagaagatagctagagtggctacagtaaatcagaaaaatttagactttcagacaataattattactagaaatttaaagggacatgtttcatgataaagatttaacccatcaggaagatgtagcaactgtaaacatatatgcacctaacaacagaatccaaaacacaggaagcaaaagctgacaactaaagagagaaatagatagttcaacaataatatttggagacttctgtacttcacttcaaataatggataaataactaagcagaaggtcaaccaggatacagaagatttgtaccacacattaactagacctaacagacatctctagaacattgcacccaaaaatagcagacattctgttcaactgcaaatggaacatttgacagaatagaaaactgcaaagccattaaaaacaaacctcaatatatttaaaaggatgaattaatatgaagtatgttcttcaaccaaccagaacatttaggaaactcacaagtgtgtgaaaattaaacaagacactactaagtaactaattgttcaaagaagagctcagaagagaaattagacaacactttaagatgaatgaaaacaaaaacaccagatactaaatcttgtaagatgcatctaagacagtgcactgaggatatttatagctataaacttattaaaaaaagaagaaagctctgaaacctaatacttaagtgtaagaatctagaaaaagaggagcaaactaaatccaaagtaaataaaaggaaggaaagagaaaaaaataaataaataaatgtagatatgaatcagagaatagaaaacaataaagaaaatcaacaaataaaattgtattctttgaaagatcaatggattggctaaactttacatttcctggggaaaataagagagaagactcaaattactaaaatctgaaatgaaagaggggatgtcactaccttacataattaaaaaatgactacaagcaaatactatgaacaactatttgctgatatattagaatacttagatcaaatgtttaaatttttaggaagataacaaattatcaaaattcactcaagaagcaaagaatctcaattagcctgcaacaagtcaagaaactgaatttctatctttccccaaagaaaagcataggctcggatggcctcattgaagacttctagataatatctggagaataactaataccaattcttcataaattcttccacaaaatagaagaagacagaatacatcctgactcattctatgaggccattattaggctaatatcaaaactagacaatgatctcacaagaaaataaaactacaaaccaaaatctcaatgaatataaactcaaaatcctcaagaaatccctcaagtagtaaatcaaatccagcaacatataaaaagtaatacaccataaccagatgggtttttcccaagaatatatttgatttatcatcaagatattaatttagtaaagcttatttataaagtataagagaaaaacctcatgatcatctcaaggcatgccaaaataaaaaaaaaaaaaagcatttgattaaatccaacacccttccatgacaagaacattcaacaaattaggactagaaaataacttcttcacacttataatggacgtctccaaaaacccacaggtaacatatacttactggtttaagaacaaatatttcctctaagttcaggaacaagacatggatatctactctcaccacttctgtattcaacattgtactggtggttcaagccagagagcaattaggcaacaaaaggaaataaacacatcaatactggggaaaaaataaaactatctttattcacagatgacatcatcttgtatataaaatgtcttatagaatacaataaaaattattagaactaatatataaattcagcaaggcaaaagaatataggattaatatataaaaatcaattgtatttctatacactagtaatgaataacctgaagatgaaactaagaaaacaattccatttacaatagtatcaaaaagaataataagcttaagtaatttaataaaaaagtataatatttgttcactgaaaactacaaaaacattgaaagaaagtaataagatctaaataaatgaaacattgtattttattgatctgaatatttaatattgttaagatagtaatacttccaaaatgtagctacatatttgacaaaatccctaacaaaatcaaaaattaatttttttcagaaattggcaaattgatcctaaaatttatgtagaaacacaagagacccagaatagccaaaattcttacaaaggaaaagcaaagctgaaggattcacccttttcaatttcaaaacttatacatctataataatcaaggtgatatgattcagttatataaatagacattgagagtccaaaagtaaattcatatatttatcatcaattggttttccacatgggtgccaagagcatccaatggggaaagaatcgtcttttcaaaaaataatgctgaaacaactggctatccacatgcaaaagaatgaagttggacccttatctcaagccatacacaaaatttaatcaaaaggagtcatagacctaaatgtaggagctaaaactatagacacctgagaagaaaacatagaagtaaatcatggccttaagttagggaatagttccttaggtgcaacactctaagcacaaatgatgaaagaagaaatgataaattgacttcatcaaaatttaaaacttttgtgcttctaataatactatcaagaaagtgaaaagaaaatccacagaatgagggaatatgtttgcaaatcttatatctagtatgaggcttatattcagactatataaagaacatttacaactcaatgataaagataaataatccaatattaaaattgggcaaagaatttaaagaaaattctgcaaagaaggtatgcaagtggacctgtgtccagctgctccagccatggctaaaagggacaaatgtatagctcaggccattgcttcacagggtgcaagccccaagccttggcaacttccacatggtgttggacctgcgagtacccagaagtcaagaactgaggtctgggaacctcctcctagatttcagggcatgtatggaaacggctagatgtccatgcagaagtttgctgcaggggcagggccctcatggagaacctctgctacagtagtgcagaagggaaatgtggggtcagagcccccaaacacggtccccactgggacactgcctagtggagctgtgagaagagggccaccatcctccagaccccagaatggtagatccaccaacagcttgcaccatgaacctggaaaagccacagacactcaatgccagcccatgaaaacagctgggacagggggctgtaccctgcaaagccacaggggcggagctgcccaaggccatggaagcccacctcttgcatcagtgtgacctggatgtgagacatgaagtcaaaggagaccattttggaactttaaggtttaacaactccgctattagattttagacttgcatggggcctgtaacccctttattttcaccaatttctcccattcaaaacatgtgtatttacccaatgtctgtacccctattgtatcttggaagtaactaacttgcttttgattttacaggctcataggcagaagggacttgccttgtctcagataagactctggacttggacttttgggttaatgctggaatgagttaagattttggggaactgttggaagggcatgattatgttttaaaatggaagacatgagatttgggaggtgctaggggcagaatgatatggtttggctgtgtcaccacccaaatctcatcttgaatgatagtttccataacccccacatgttgtggaagtgagccggtgggaggtacttaaatcatgagggcggttatctccatgctgttctcatgataatgagcgagttcttacgagatctgatgattttataaggggcctttcccccttttgctcaacacttctccttgctcctgccatgtgaagaaggttgtgtttgcttccccttccaccaagattgtaagtttactgaggcctcccctaccatgctgaactgtgagtcaattaaaactttttcctttataaattgcccagtctcaaatatgtctttatttgcagagtgaaaatggactaatacataggccttataaaagaggcatgagggagcttgtttgccccttccatcatgtgaggacatagcaagaagtcaccagctatgagaaagcgggccctcaccggataccagcaccttgatcttggacttcccagcctccaaaactgggagaggtaaataactgttgtttataatctacctagtttgtggtatttttttatagtagcccaaatgaacagtatatatgcaagaggaaagaaaaaatatatttacacaacaatttgtacacaaatgtttacagcagcagtattcataatagccaaaaagttgaaacatctcaaacttccatcagctgatgaatggatgcacaaaatgtggtgcattcatataatggaacgttatcctgcaataaaaagaaattaaatattaaaacatactaaaatatggataaactttggaagcattaagcttcatgaaagaagccagtcatgaaagaccacattttgtgttgttccatttatataaaatatccagataagcatatctatagaaacagaaaagaggtagtgcttgcctaggactgggattagaaaagagatagggagggacttctaataggtactgggtttcttttcagtgatgaaagcgtccttaacttcgattgtggtgataaatgcagaactctgaatatgttaaaagcttcagagatgggccgggcgcagtggctcaggcctgtaatcgcagcactttgggctgccaaggctggcggatcacgaggttaggagttcaagacaagcctgcccaacatagtgaaaccccatctctactaaaaatacaaaaaattagccaggtgtggtggtgggcacctgtgatcccagatatttgggaggctgagggcaggagaatcacttgaacctgggaggcagaggttgcagtgagcagagattgcaccaccgcacaccaacctgggcgacagtgtgagactccatctcaaaagaaaaaaaaaaaaaaactgcagagatgtacacttcgaatgggtggatttttgggtatgtaagctatatctcaaggctatttaaaatagtcttcatgtagatattagaactgttaaacaatgatatttcacacttcagtaattcttaataattccagagacaccaatgcttattcatacctatagttgttgttcatagacacatcttaattgtagaagatgttgatgaataaataaaagaaaattgcaacatgatagcaaaaaggaattagtcaacccttactagatttatagttcttttaaaagtacttagcatgggctgagctctgtgctaggcattttttaagagtgctgaggaagtggcatggggattctatctcagacatgcacaattcaagctgcaggttagagtaatctgaaagtttttaaaaattactgattcctcaatcgtgcccaagactaaggaaataagaattccttgagggctgttccctggcattagtattctaatgtgccccaaatatggggaacatcattgtgtctgaataacctggtttagaggtcagggagtgtatcagtagctactaaaatatgagatctgaaggagaagggtggggaggagatagtggtgggggtagggtggtgtttgtcacttgcttaacacttatgatccaggcactatgctaggcttgagctaatgattacgcttttgccaagaggacagtcttggaagggcattctaggcagaaagagaagagtgatatgggctttgatatgcacaagcagacagcttgggttttagaaacagcagactccaggaccagaatgcctcttgggctccgctcaaggaattcccctcctagaccaaatgaatactcctttttaccccaggcttccacatctgccatgttcccttctgtaccactttccaggaactctggtttttcctgcatggctctgttgaactcccttaggctgtcaccccaaccccggcacacagccagctccacagaaggggcagctctagttcctgttccctgttcactacctccatcctgagccaacaccctgactggttcatactccacattcctgatcccgggaattccctcacttatttgtccccatttgataacctgacctgttggacactaccaagaagataaggccttggccctccttggctctaagtcaaaatatctttgtggtcataacacccacagtcacagcgggaaacacaactttcagcctagcccagcctccaacacctcccccactcacagtgcagcctaagtgatacagcttctatgtgctccaatccgtctagtcgaactcgaacctaagagaagttctgcagtgagcccatcttttgttgattcagtttcactgggtccatctgaagaggccacattgtgggaggggagggcaaagggcaggaaccctcacattagtaaccaacccaccgaccaaccgtccaactacacagcctacagaactcaattcacctgctcatctaagacgtccgagtggaggaggtgacctgaaaacctgatttcaaaagcatatgcagtgttccttttaagccaatgcaattacatgaaataaagtacaagaaaatctcaattgatttaaagcatggctaaaaggaggaaggaacattggccttgaatacctctggggccccccttccaggacagacttctttgaacctagcaccagggcatggttccaggatggaggatgaggaagcaggctctgagctgccctttgctggggaccccctgtgcactggtgtccctgccagctatgtaaatatatcatctccaattcccattacaatccctgcaatgtgtacatcaccagctgccttttactgtgaggttatatcaatttcaaagactcaaccactgcaagaggcagccccggatttgaagactggcctgccccaccccaagcatgaatatcttccatcaggcccctcctccatgataacataagacccccagcttgttgggtaaggtgagtcctgcttgacagctggaggccacagcaggtagtctttcccatctttccaagtttgctttcacttctggagttttctgaaattaggcccagtgttgccagatgtgcagccagaaacccgggaaggttaaatgacttactcagctatttcacaagagactgggaattgacacattgtattagagcactttctgagcctgtgtggacaagttaaagggctcagcagaccacgcgggactggattggcagcctccttcgctggtagcctcatttctgtctacagggcttgttccatggggtcagcaccatgaccaggctggagagctggggcaactacaagacaccttcctctctgcttaccatcctgaggggcagggcagttgcttcagtgcttggaaaattaaaggtcaagaataaggccattaaagccctcatttttaacctggacaagaaaaattttgttgtaactaaacacaaattgcatcacatcagatgttcccgaacctcaaccttcagctacatcatcaacagtggttgccatgtcaaagatgattctaattacaagaggtgaccagtctgctgctcagcacccatgtggggaagagtcaggggttcttggcacggccttgggtctgcgagtctgcacacggtggaggaagccttcacgcctcctcctgactctggcctcacatattgcaacaacgagaagccagaataagtgcaatgggaggaaatgcctcaagaagatggatttttgttcaatttttttcatgataaaatacagataacataaaatttaccaccttaatgattttaagcatacagttcagtgttattaaacacattcataatgttgtgtaagcatcaccaccatccatctccacaactcttttcatcttggaaaactgaagctgtatccattaaacaataactccccatccttccagcccccgctcttcctggaccctagcaaccaccattctactttctttttcttaagtattgcttgatttttaagttttttactttgtttttacttgatacataacaattgtacatatttatagattcagtgtgatgttgtgatgcaagtgtacattgtgctatcatcaaatcagggtaatcagcatatttagcacctcagacgcttgtcatttatttgtggtgaaaacattcaaaatattttcttctagccattttgaaatacacaatacattactgttaactatagtcaacctactgtgcaacagagcatcaggacttattccctttacctaaccgtgactttgtatccattgaccaacccctccccacatccatccctcttgtcctccctgtccttgataaccactaggctactctctacttccaggagatcagcccgatcccaggaattccctcacttacttttcccatttggtaacctgacctgttggacaccaccactactgggtatgtatccaaagaatttgaaatcattatgttgaattaacacctgcactcccgtgtttattgcagcactattcacaatagccaagagaaggaatcagcctgagtgttcatcagtagatgaatgttgtagggaaaagaaagagagatcagtctgtcactgtgtctatgtagaaagggaagacataagagactccattttgaaaaagacctgtactttaaacaattgcttcgctgagatgctgttaatttgtatctttgccccagccactttgccccagccactttgactcaacctggaaatcacaaaaacatgtgttgtatgaaatcaaggtttaagggatccatggctgtgcaggacgtgccttgttagcaaaatgtttacaagcagtatacttggtaaaagtcattgccattctctagtctcaataaaccaggggcacaatgcactgtggaaagccacagggacctctgcccttgaaagcagggtattgtccaagatttctccccatgtgatagtctgaaatatggcctcgagggatgagaaagacctgaccgtcccccagcccgacacccgtaaagggtctgtgctgaggtggattagtaaaagaggaaagcctcttgcagttgagatagaggaaggccactgtctcctgcctgcccctgggaactgaatgtctcagtataaaacccgattgtacatttgttcaattctgagataggagaaaaactgccttatggtgggaggcaagacatgtctgcagtaatgctgctttgtaattctttactccactgagatgtttgggtggagagaaacataaatctggcttacgtgcacgtccagtcatagtaccttcccttgaacttaattatgatatagattcttttgctcacatgttttttgctgaccttctgcttattatcaccccgctctcctactacattcctttttgctgaaataatgaaaataataatcaataaaaactgagggaactcagaggccggtgccagtgccggtgcaggtccttggtatgctgagcaccggtcccctgggctcactgtggtttctctatactttgtctctgtgtcttatttcttttctcagtctcttgtcccacccgattagaaatacccacaggtgtggaggggcaggccactccttcaaatgtggttttcaaatgtggagtatatacaaaatgggatactatttatccattaaagaaaatgaaacatgattctaatttctgtctctattattttgactgttctaggtaccttacataagtggaatcatatagcatttgtgtttttgcgactggcatcttttacttggcataacggttttgttactgaaacacaagcagtttggcctaggtccattgctcatcacacagaaagtcaatcactgacacaacgagtattggcaggaggaaggctgtatttgggtgctccatccaagtggaatgagagatcagtctcaaatccttctcctcaactaactaaaattaaggccttatatagcatagaagaaatgtaactgtgggtaggaaaacaggatttagagaggggtaaggaagatgagttgatagacaggaatcatgatggatggtctggcatctcattgtctggatgcagtgatttggtgagtttcacttccttgatactatctgggaagagtaagagtcggtaccttaaggaaggaactgagataagacaaatgtaagtttcaagctttaagaccagtaagggtcaatgtctatgtttatacaagaaacaggtgggccagtttcattttcaagtttcatctatgttgtaacatatgtcagaagttcctttcttttcaaaattctaacatatgtcagaattttccttcctttcctttctattcaagactgaatagtatttcattgcatgaatatgccacattttgcttatctcttcatccaccaaaggacacatggtgtattagtccattttcacactgctaatacagacatacctgagactgggtaattcgtaaagaaaaagaggtttaatggactcacagttccacatggctgaggaggcctcacaatcatggcagaaggtgaaaggcatgtcttacatggcagcaggcaagagaaagaatgagagccaagcaaaaggagtttcccttacaaaaccatgagatcttgtgagatttattcactaccaggagaagaatatgggggaaacagcccccatgattcttatctcccacggggtccctcccacaacatgtggaaattatgggagatacaattcaagatgagatttaggtgaggacgcagccaaaccatgtcacctgggttgctcccacattttagctattgtgaataatggggctgtatacaagtatctcttcaagatcctgctttcaagtcattttggtatatacccagaagtggaattgctggatcatatgataattctattttaattttttaaggaaccagtatactgtttttcataggagctatactattttacattcccaccaacagtacatgagggttctaatttctacacatccttgccaacacttgttattttctgttttttttttctaaatagcagtcatcccaataggtgtgagatgatatctcattgtggttttgatttgcatttccctaatgattagtgatgttgagcatcttttcatgtgcttcttgcccatttgtaaatcttttctgagaacatgtctattcacatcctttgcctatttttaagtccagtattttgttctccttatcgagttttaagaattctttagatattcttacccttagaagatagatttttaagggggatttttaaaaattaagttgtgggctttgtgtttgtttgtttgtttataaagacagaacatgcacaaagattgaaagtcaaacagaaccacaggacctagaggaggcgggagcagggccctccctccttctcctcttctggaagcccactgctcagaggccaggccccagtccccgcacctgttcctgctgtgtggcacctcctgtgtcctgtgtgcttgtgctgaccctcactttgagatgttgtctatgaactcctgctgcagaagagaagcacttacctctcatactcactcccttcacacttacacaggctcaccactatctgggcctgccattgtgatttcctcacactttctgtataaaagacgacttgaggtttaaattatcataacaatgaagttttttgtttctaattcagaaagtataccatgacgacattttatttcttttacaccttttttatttttgtgggagttaataagtccttttttgcttgtttagttttctatgtgcctttccctacagtaacccaaagctctccaatgtcaaaagcatcaagaagttcatcagctccttttttcccttggggccctctgcacctggctgccatctgcagagttcccctcaccatctttcaggggactgccttcacctctctcctgtgtgaggtcccttgattcctgcattctatgttttccattttcttgatttactccctcattttgttggggcacatctttcagacagatttctttaaaaggatgcctaggagatcaattttctaggattgtagatgaccaaaaacatctttattttagacgcatcttaatctccttccacaggcaaaaggacacacaaactgtgtataatttacaaatatacacatactatatagcagtagcacaggtagactagattttcatgtatgaacacagatgtaactcacaacaataatactgaaagaaaaaagcaagtttcaaaaggatacataagtccaataatgttttatacacacgcacacacacagtcaaaactcataattcatggagttcatatttatgaattcacctactcactaaaatttattggtaaccttcgaaatcaatacttgcggagattttatggtcattcagggacatgcagatctgggaaaaacttgagtcgcccttcacataagtccctcccctgtggttgaatagggcagggctctctgccttttggtttccttctcagagatgaccagagagggggcagggcagtgcagtgcagtgcagcgctgtgtgagaagctccagccggggcagtggcacaagcttggttccaatcccaagaggcacctgctagctgggcgtcctcaggcacatgacttaagagttccaaaactcatttctgttctacaaaaaaagaagatagaatctaccaggatgtgctgttttaggatttaagattaaaatctatgtgcaatacaatatgtacatatttccctaaggagtaatgtttcagtattcactagtccagttttcatggcagctttatagaacatggcaactgagaataacagatctttctctatagcgagagatagagactgatagaaaatgttaaggcattgcctcattgtcttctttcaagggtgctattggcaatgccatcttaactaatactttatttaataattatctagttcttttgatctggcaacttagtccttcaattctggatcttttcttgtattattccttaagttaggtcttccctttggcctgatggtcctcactgtagagcagtcagggagggacctggccattccattgaacttggtagctctgacagctaccaagtgttctgacaatttccttctggactggaggaaatttctttctccagaaagaaattctccttctcatgccttatattaataagtacctgattaagtaggaagatatgccattttcataaatatagtaaactttataaatgcaataaaattgcaaatattttaaatgtgcctatgtgtgtctgcatatgtgtgtatgtctgtatgtttgtgtgtgtgtaaatatgtgggtgtagggtttgtgtgtgtttcatgacaagttcttcttaaaacacataggatgaaaaataggcaagataattttggaaaaccaatggagataccctaacaatcaccactgctgctataaagctaaggtaatttagacagaatggtattttaccacaagaatacaatggaaaagagagcccagaaagaatttttaaaattatagaatagttttagaaattagaagggtaaagatgaactattcaataaaagttgcacaccaaaaaaaaaaacaaaaaacaattatttcctaggctggaaatcaaatcaacaatgaagtctgtggaggccattctgatgaatgggtggcccatctgcctggtctgcctggcacagtccctaccccatctgttgctcagtgtcattgttaccaatgccctcttctcactctcagaaatgtccagccagcatgatataccatagatcattctacatataaataaaaaggattagtatcaagcaacgattatgaaccctggcaaataagtgaaaatttaaaaataaaaatcacaggaaattagacaaagaaagcaaaacaaagtgagcaaaagatgtgaacaggcaactcacagaagaagaaaccttaatgctgtaaacttgtgaaaagatgcttgacttcactagcaagtggaaaaatacaaatcagaactgcctaggttctgcactcatcagattggcaatatcgaaagcctaaaaatgccaagcgttggaaggacgtgatgaaacaaggatgctcccaccgcaggtgtgagtgtaagaagacttcctgcctcacagagcactcttgtgttatctggttaggatggaaggtccagaaattctatgacgagcacctgtcttcttgaatcttttatttatatccatgaagagacatgaacaggacaggtttctttgtaataaagaaaaattgaaatcacctaaatgagcaaataaattaagccatgtttatgcaaaatcacacaataaaatattcatattatctggatcaatattgaaatgatctagtcctaaaacattcgcatagataagcctcaaatacaatagtgatagggataagaaagttgcagaaaaatatgtaaagcatgatgctgcttataggaagttaaaaacacacaaagcagtgctacattatgtttttagaagacagggtcttactctatcacccttgctggaatgccctggcacgatcatagctcactgaagcctcaacctcctgggctcaagcgatattcctgcctcagcctgccaagtagctgggatatcaagtgtgtgctaccatgcctggctactttttaaaattttttgtagagacagggtctccctgtgttgcccaggctgaacttgaactcttgggctcaagtgatccttatgctttcgcctcccaaagcgacgggtttaccaggtgtgagtcacggcacccccaccccccaccccccagtgctgctcttaaggatgcataagcacataggggaggtatagagatgcatgaggatgagacactagcagcatgctagctacacttctggagagagaaataggatggaacaggtccagtgggtcattcagtgtcactaaccttgctttccttggggccctccatgggcaccctgatgaatccctttagggctgaagggatgaggcctgaaggatgcaccctgcaaagagaaccagagctgcccctagaggcctgaacgtggactccctcgaccacccgcaaaccctgcctgcatgggctccctgggggaagctcccacaggcagagacaggagggctgaggccctgagaggcagcaggagcaaaaggagccatggatctccacctagtgccacatgggcattttcaacccatttcacagatgagaaaatagtggctcaggaaggttaagtaactaggccaaggtcatgcagctagtaagaaaccaagctgagggcgcatgggaagatcacactccctgcactaatggggctgagggagggtcagggacccctggcctcaccattgggaggaaaccaggagggaggcagctgtcagcttctgaagtaaagaaccagatttgcttggcttgaaatgtaacctacacctacgctaaggcagcataaccttgctgtcctctcaaacaagcattggtcggcattggctctttagcgggctcacgtctgtgagggtgataaatatgaaccatgctacaaccgcatggtcaggctccaccgcagagcaccaggcaggggccaggcattgtggaggctgcgttaaaaactttctacacttgacacttgcacgtgagtcctgtgagctaagtactgccagctccgtgtaacccataaggaagtgcctcgcgggtgaggtggccctgcccaaggtcacacagctgcaagcaggactggaactcaggctgcgtggtcctgaatgcccgggctgtcccagcacccgtaccacctctccatgtcagtatggggctgccggctgccaggcagtcactggtcaccgaagcacccctgaggaaggtgaggaagagcccgcgccaagagggtgctcaggcccagccccaggagaacctacctgggagcctggaggggaccaggcaccctgggctatgggagcaaatggcaggagtgctgaatagctcccccttcaggaagacaaaagctccagaagtaggctggctgggttcttggcattttgaacaaagaattggacaaaatgcacaaacaaagcaaggaaagaatgaagcatcaaaaacttattgaaaatgaaaataccctccacagggtgggaacgggcccaagcaagggctcaagggccccgttacagaattttctggggtttaaataccctctagaggtttccactggttactcactgtatgccccatgtaaatggagaggatatttcatgtcacagctgaagtgtctccgtttgatttcgttctaggaagtccttagttccctgcctccaggccctattctcctgcctcacagccaccatctgctgtggcccagtggggagctgcctgctgggggctgccgccctcaccctggtgactccaggctgggctgccactctgctaccgtgctctgcagagcctccatgaactcccactctccctggctcattactcacggatttttctgctaagccccagagccctcttttgagaaattgtgcaccgtgtgagccctggaggcagccccagcccctcttgagaagcttggggccatgatgatgtccgcagctcctgggcagccggactgcagggcatgaagaccctgccacagtcctgctgcctgcagcactggcccagtcaaggagcagctgccacaaccacactagcaccccccatccccccagagcagctgcaaagagaacacaaatgcagcagcagccaagggctgggggtgggaacacttacaaaaggcagagagggtggtggggagcaccagaaacccccagcaaacccatgattttgctgagggagtgggtgcacgtgctggcctcccttagtccaaagcctgtgctctgaattcagaccagaggtgaggcccacagccccaccaggtgccactgacaccttggcttctggggacctgaccaaggaggcaaagggcacatccacccagggagggtcgtgcttcctgtgctcacagaggcccctcacccctgcagccgcacccaggacgcatggtgtgaggccaggcttggaggcagctctggaaggagccggggcctctgtgtgctggaggagtggtggctggtctcttgttttgttttcttgggcccaggtgttcctaccctcctttcaccttctcctttttcaaggtgcttcccaggtttccagagccctcacgcggcccctggaggcctgcaatcctgatgggttcaccccaccctttctgagccttcccctccagatgcaggtgccacacctaccaaaacacttctctgaggaagccccattgtttccctagggacgccctcaccgcacgtggcacgtgatgactgcccagcagtaggtgccaggagaaaacctcccctttgccctctgagggtttgctggaaaatcaactcacaaaaggcagattaattggagaaaaggcatacaaatgtattcacacgcgcacaggaagaaccacaggcggacttcccacccccggatggagtgcaagggcttatgcaccacctcaaggttacagaaaagttgccggctcagagtacagccaggaccaagagatggtggtaagacatggccagagggcagagggagggagggagggcgcctgctggcaaaggccttgttgcgtagatgaagcctcacaggtggcagcctttggagagaatagaaggtagatgtttctttcaggcctttaaaggtggcaggctctcggttaatctccctgcatctacacaaggaaaggcctggctgcatccacgcggattctctacagacttaattttccccacaaaagacagctttgcagccactgctgttggctggctccctgacagccacctcaaaatatgccaaagaaatatattttcggataaaatatttttatttacttcacaggtgtcttcaccaaactttcctggacccccatcactcacaggagggcgttccaatcagcctgcctggcaggcagggccttccgctgccccgaccctgggtgccccctccccattctgggctgcagggaactctgggaggaagctgttcccgccacgcgtccgcaggagcctcctctccatcagtgctgagcctcctctccatcagtgctgcccctcctccaagggcctgctcagacgccaggctccaggaacactcgcggtctctccccggcctcctctcctctccatccagagccctctgttctcaccccgttccaggtggatcccagcatggcaggccgcagtcaaaacctccaaacacgacaacgactccgaggcaccgcacctcccgctgagaaatgatgacttgactgaacattgaatagggctgggcagccacacggcaaaaacagaaggaacagaacccccaggctattgctccttttctatcctttccccatatccattccccactgccacccttcccatcttgcctccttctctttcccaagctataaccccccattccctcagctctggcccccggcagtcccactccttatccggcaaacaagacaccacccaccgcccctcaagtggccccgtggagcggcaccaaggtgcataggcacactgcccgcaccacgcaaccgcatcgctccatcataagagcccagagagggtttgggtggagactgcacgccccacccctatcgaatattattggtccccgagtttgctcatcaagggagagaaatgcggtattcatcaacaatgcagtctctctcatgggagcaagttttgaaaagaaaataagatttctgtccaaatcatcacatgtaagaagtgtgtattggtcagggtccctgcagggtagtgagctcaacccaagcaggggtttcccttctcccgtgtaccccagatcagcctgcagagcttggtcctgagtgtctctgcaccacagtgccacgtgtgagatcaggacagaggcagaccctgctcagtggtgggggcgctctccccggccaccactgccgctgtcattatcatcctcaccactgctgttcccggtgcacaataaatatgccctgaactaaatgaactgcaggtcagtttgtgggcactggctaacctggtgacttgaatgcaggaaggaatgtcatcatcctggagattccatattcatgcactggggtggtgcttgttctgccaatagaccagtgggccatgaagacaggacagatgagtcatgtcttctgggaaagctaaccctgagctttcatctatgcaaagacttgccttagggaccagcagatgcagtgcaccctggggacacagtttgaactccagcctcccgggcactagaagctggcaagctggggaggtgaggggtcacaggagggactggcccctggccatgcagtaggctgacaccataggccctagagtggttctcggaggaacatgaataaagataaagcccacagaccatcgcctccatgacaagcctgcaacgcttgtcacacacatctctttttatcctcctcatccccaatctctggtgtgaaaggcctcccatgacatacttcttttagtctagagggtgcctggggaggatgacaggtggcaagatctaagaataccatcatctgccttctaaaatgcaatggaaacagccccagcagggaacgtttgtgctgaaatattattattatcaattacgttgacactttccacagtacaattctttgtggtatttccaaacatgtcagcatctgctcttttgtttggctctccccagatgccttaggaagagaagggctgtgacctcacccctggtaggggaggggttggaggtggactccagaggctggcccaaggccacacagagggagtgagctctatagaccaagtcctcttggtgccagaggacgtgtggcagagcctgaggaccagggagtaagagggcaagaaaagcggaactgacggggccagccccaggcatcccatgctttggtgactgccgttcaccgtgaggagctatagcctggctcccgcagaaaggcggcctctctgctccttgcaccctcaccactgcctgtctggggctgggatcacaggcttgtgtgttgtgatctctgagtgtctgtgacagctcatgagcaggtaaaagcatgccccaggagctttaaagacattcatgtcacttaacccagtcacatttctggaaacatatccatggcatagctgaaagagggcagccttaaacttcagaggtgccagggttcaaatcctgaccccatcatttacccttcaagtctcctggaaaaatgcagctgtctcctctcacctcctgctcctttgtctatgaaatgggcggcatagttcagtggcctgtgctgaaccacaacagcccctccatgaatagtgaccagtgttatcaatgcaaaaaggccagagtcacaaagatgcttgccagagatgcgcctaaagagcagaaaaattagcaacaatcataccatccaaaaaatagggaaagcttcttccaaatatttaagagtttaacagagagtattttttgtttttgtttttttcttagaaagaaaaatttagtagggacttaggaacagaagccacgtgtgtgtctcacgcattggcgagacaacatggtgggccccccgccataagagaatctttagcgtcactgccccagcggtggtgtgtctcaaagcctgagcagcctgtcctgctgaaggtcacccagctccctgaattccgatgagaaaggatgggaggacacgaacagccacagtggccagaggtgcaggggaccctggaaaccaccacacagactgcaaaaattcataaatgaagagatctaagccccagacagagacacaacccatgacaccttgtgggccccattggtaagttcctgactccaagactcttccagagtctctgccatcaggccggagcttaacaacatatcacttttaaagcatgactttcacttaggttcacagatggttcttccaggatatattttcttcattatgattccaagtgtttgcgaagttacaaaatgtaaagtgatagttatcgataggctgttcagcagaagcacatcacacatgacaaaatgatcccaggtttatatcattgtcctcaggtgcttcagatacaaaagcatttaattccaataatggtttgatcttcttgtcaatctatggaatcagcatccaacttttgtacattcattttgtcagtggtgaggcatttcacattagtaggactgcctttacaaatgcagcataaaagtccaacactgaagataaaatgattgttttgcaatgatggcatgaatacaaattgtgttggagcacagtacgtgttaaaaacaatattcctactaaatttaaaaaatgtgtttgacagaagatatttgcaatagattgtgatgtaactgataattgcattcaagcaagctgcactattccattcaaatagaaattacagttttcacatgtttaaatacttttatttgtacatagagaaactgaacttcaaaatgtttatagcaacactgatgtggaacccgcacaaaaaattaccagtgtagtccagagtttctctctttgctgtcatcaagctaatgttagaaatatttgagacttcaaagatccagtacacccacctaaagagctaacaatcgtattggacccttttgtaaatgagtccctgaaatactaattgcatttagatcaaccatagttgaaaatcattaaagtattcaaccaaagaaacacaaaaacactgtgtttgaagatttatcaaaatgtaattgttgaaaataaacgggaagcccttgaaatttatccacctcaaaagtaagctgaacaaattaaacaatgaaagctcaaactgtgcataaggttttattctgaaattgtataatgttttggaagatctcaactgatagaggtatagtattaattgcataaatttctattctaaacaagaatgaaataaaattgagaagttccatgattttgcaacacctaaatttagcaaaccctttcaaagaatcataaatagagacaacatatttaattagttttgccatataaaaagttttgttcaatcccagctacccaggaggctgaggcaggagaatcactggaacctggggaccagaggctgcagtgagccgagactgtgccgctgcactccagcttgggcaacagagcaagactccatctcaaaaaaaaaagttttgttcaaaaaagcaccttagcaaaccaccatggcacacatttacctatgtaacaaacctgcacattctgcacgtgtatccaggaacctaaaataaaatagaattttttgaaaaagaaaaaaaagcaaggccataagacaattcctaattcctattgacatatttgggctgacatagttttgccagaaattaaaagttataatatcctgcatgatgtattaaccttactgggtaccttagtacctgtagagataatttcctcaatgtaaacattatattctacaggaagcatctatggaaagcaacttcagttttattttccataaaacacaattctgaaaaaacaaatatgcgacttttgtgggaagaagaagtctgcattaaaaaaagtatattttttagaaaaataccaggatcatagtattagaaaaagaaatagctaaaaatcaaattaacagtgacaaaattttaagtcaaatctatgatagattaagtcaagcaataattaataacagttaatgtttcataaaaaagtgttttgaaagaatgtattttgctattttatttattttgtcatatttagactagaattgcatgtttacacaactattatacagcgcatccgctcatttatactgttgttttaagatgctgcttgtgcaatatgcataattgtactgcacgttaggccacctgaggcacctactaaccacaccccgcataaacctatccctagtttttaaatgatgccgttgctctcccaataacaatggcttagttggtgactcaatgcctagaaggagcactagaacacttctatttgcttcctactcactgagtgtgtacttcccactcactaagtgtcaggaaggacataaataacctgacaaaccttagatcccagttactgtcaccctccaacttatcaacaagggaaacgagatccagaaggcttaaggtccatgcaggtccacatatgcagaagagggggtccatctaccacaactgtgagacttccgctgtgttgtacccaccccaaaacaacaggcatcacaaagcacctacagcctggactgctgatgttgtacaacagctcacaccaacagagattgtctctggatatgaaggtcaagggtgatcttaaaaactctcttgctccgacttttctttattttggggagtatctataatgaatgcctatgacttttataatagaaaatgtatgttttaatttgtaaaaggccaggaaagttaatacggtagcaatgtgcagaatagacaaaaggcagaaactaaagacagaaaactcaatttgccagaataggaaatagtcaaagcgcaatttcaacctatatagaagtggtgaaaccacttgtcttcaaaaaagtaaacaagcaatattcaagaggatttcctaaactaccttttcaaatataatttttttattaattggtattagaaaaccaatcatcacagattgatgcaccaagttatcagaaagaggagtcccattaccctgatacttagctgtctctccacatcctgagaaccagggggcagactaacccgtcaagccccacagatctggtggggatagtaaaatggcagacagggtctccatcttaaaggtctattagaaatcaaaacaagcatctttaaaatcataagaggtgctcatgggaaatgggtttgagtgtcaaagttggctaacacgtggtttctgcaggagtccctctgcgttagaaattaaggcagacaagcacgtggctgcctggaaccactggaggaggccatcagcccacgatggcctaaagctccacgtcaagtgaacaagaagaaagactgtccagaaagagggagcggcacaggcagaggcatggagagtgagcaggtgaggctccctcagggagcagcagggaactgagcaggactgggtgtagagcaagggcagtggggaaggaaaggtcttggcgagagggttgtggaaggaaagacacacagaggagatggggcaggagcagatccaaaggggcctcccacagtctggtgtgcaggttaagtgggtgtgtgtgtaggtgtatgtgtgagtgtgtgcatgtgagtgtatgtgtgtgagtgcgtgcatgtgcacatacactagtttctatcctatactttcctgtctaaccccctctcatcccccaagccaggatcccaaggaaggcccagatctgatggctgaatgtgctcaattccaagggcatttgaccaatgtcctgcggtaaccaatgaagcatcccagctcacctgcagccacgctgcacacgataggctggtccaggatgagggatgccaaggggctcacccaactcagaagcacccccaaagttccctgccagccacctgtttttccagttagaaacactccctctcttcagccgcaccctgccccgggccccagcaggtactcataaccaaacaattgccccaagtgaagccgtcaaggcctttgaattccacaaatctgcagctgacaagagcaaccctggcttcctgttggggtcagcccggtgtggggaagaaggatagggataatggggtgggctacatccccctcccagtagccacagctcctgccaggaagccctctccacaccagttcctttccaggttctggaaacctcgccctctccacccctttaaacctgggaacagtgaagctccctgcagctgccagccccaggacacagtcttattctctgaaagcttccctggttaggttgttgcaaagaatccctccgttgtaaacttgctgcaaactcctggtttggagtgaaccatctgcctcccgctgggactctgatgcctcctgggaggtgctggttatcaccaagagcctcactgttcctacaactgactgcacaatggagagtgtcagcaaactgttctctgaggagcttggctgcagcataaacacggcactccttagagacacggtccactcgcttcagctcctccctactcggtgacagattgcacctgccgcagtcgagtgttagggcattctaactcacacccacaccttttactgaccccagactaaccggcccttttaagggaagcaatgaacctcccatgaaaccatcacttccacacctccttcctggacttattgctatcacatttatgtcctgttactgatttttttaaatctttgtttcacttgtaagatatcaaatgttctctggacagcaactgtaactatcaagaagagagaagcaagaaaggtgtaggtacactgaccaatggaacaggaataaacagcccagaaataaacccatgcatctccattctattgattttgacaaaaatgccaagaatatacattggggaactaacaggcatttccataaaggtgctgggaaaactagatatccacatataaaagaatacaattggatgcttatctcacaccatgtgcaaaaaatcaactcaaagttgactaaagacttaaatgagagacccaaaactgtaaagctactagaagaaaacatgggggaaaactacacaacattggtctgggcaataacttttttttgatttgaccccaaaagtaggcaacaaaagaaaaaatagacaaactaaaaagcttctacacagcaaagaaaataattaatagtgtgaagaggcaacctacagactgggagaaaatatctacaaatcctagagcagataagggcccatatctaaaatgcatcagaaactcaataacgagaaaacaaataaccctatttaaaaataggcaaaagacctaaataggcatttctcaaaagaagacttacaaagggccaacagatacatgaaaaaaaatgctcaacatcactaatcatcaggaaaatgcaaacttaaaccatgagatatcacctgttagaatggttcttaacaaaaagataaaagataatacgtgctggcaaggatgtggagaaaagggaacgcttgtatgctgtctgtgggaacgtaagttagtacagccatcttgaagaatagtatggtggttcctcaaaaaactaaaaagcaagctgtcctatgatccagcaatcccacttctgagaatacatccaaaagacttgaaatcagtatgtcagagatggctgcattcccacgttccctgcagcaccattcacactagcgacgatatggaatcaacttaagtgtccatcaatggaagagtggattttttaaatgtggtgtatatacacaacacaatattattcagccttaaagagaaggaaatcctgtcatttgtaatgtgaatgaacctggagaacattacgtttggtgaaataagccaggtacagaaagataaacatctcatgatctcatttatatgtggaatccaaaaaagtggaactaagagcagttgagagtagaatggtggttcccaggggctgggaaggcagaggggactgttagtcaaagggtgtagagtttcagttggaaaggaggaataagttctggtgatctattgcactgcagggtggctatagttaataatagaacattgtatatttcaaagttaccaaatgagtagattttaaatgttctcaccacaaagaaatgataagtatgtaaggtgatattgcactccagcctgggcaacaagagcaaaactccgtctcaaaacgaaacaaaaaaaaaaaaagaagtatgtaaggtaatgagtattgttaatcagcctgatttgctaattctgcaatgtatacatgtattgaaaaatcacattttgccctataagtatatacaattattatttgtcaactaaaaataaaaattaaattaaaaagaaggaaacaaggattagaaagggaatcttataaactgaaattgaatcatggataactgcaatgcagaggaaatgctctcacaattttattggggcacaaagttaaaggctagagagaagaaacgatcacagggttgagtttggagggagagataaaaatgaccagtttcccacaagttataggaggctaacataatgggaacatttgctacatttcttttcctgtaagctggacactgtgaaatgtagcctgtggactcaattttgcccacaaatgggttttatttaacctggaagagaattctttcagtgactttgggcagagcgtgtacttatcagtttgccacagtcaacactactccttattgccttacagcaggtacatcactgatttatatgacttgcctggccctgtggttatctgagcaggtgactcttatatataaagtcatcagcaagaatgcgcagcatgttccttccctgctcaggtaaccacacaaaatcaagatgctatttgtctatcgtcaaattgggagacgtggtattcctaaggccacagcttgtgaaagaaaggagctagtctgtgagagggatggcttggggaactgaaagtgaacgctggagtccagcatatggaaaaagatgggcttaaggctttgggagggcatgtgatatcaggagcctggagccggcccctccacagggcagggctcggtggtcagagcttaccagctgctagtgggcacgtcaccttggacagtgccaatgtcagtagcagatagaggcccttccatagatatcctggtctgcataacctctgcaggacccttgaaaaaccctagcagtgataacttgaaccccatcttaaatatgaccacactgaattttttagcaattcatttggagccagattaaatttgattccaacacatgaaggaacacactggtgcacacagcctagtggtaggacacatgtgcacctgttccatggcccttgataaacgcatgtggctagggggtgggctgacaggtgtgtttctagaagagtgaatggacaaatgtcccgtgtggaggtccaaccagtgcagccagtactccggcccttccctgctgacaggtctgtcctcctggtgggctgggtccagccatcctgactgccaagcatttagcacatctccctgggtgtaagccgagaataggaggtgaactaacaaggccctggactgctccaccagccacagaagaggggtgcatagtagatacggctagagcacacccccacacagcagagggattgttaacgtatggctcacctggagcatgttttcctccagccacaagcaaatcattaaacatgtcttctccacctccaaataggaggtgatgggcatgaatgaaacaggtaacaggacatggtgtaggcattttgcagagcaaaccttgaggcaacataagcccctttctatttcagcattttctccatcttcacattagaataagctatcactggagccttagaatgacagctggcagggactcagtgcttactgcatgagtggggagcaactgcaaagagagaggtggggacttgtgcatgaggaggaagcatgtgctttgtcaccgatgcccgggccaggcatggcattgccacagggagaatgacactgagggtgtgcatgtgtgtgtgtgttatatgacatatactatgcatgtgtgtatatatgcacgatctatgtgtatgaatgtgctgtatgcaatatctatacacatgtatcatatatatgcttatatatacacacatacatcatatatgacacattcatacacacatacatatctgcatatatatatacacatgtatatattaaatatctcacacatatggatgagccaggagcaactgcaaactgagaggtggaaacatatatatgtgtaagttgattctgtagtaaaccatatatagttctttttcatggggtggcttcaattattctcatataaccactctgtttcttccctaagtcctgcactgaagggcccctctggctggggacggggatggctgcctaggcttgcctttctggggtgaggtgggcgggagccgtctccacagcggggcctgtcacgcacaggggcccaggcacacctcctctgtaccggcagaccccgcccacgtggacaccccactcccagggcaggcccagcggccccacccccgcagcagctggtcccctcagggccacacctcagtcagggccacagcgcaggaggaagctgccacccctactgctgtcggaggtttgggaagtcatcagtcagggccaacagcgcaggaggaagctgccacccctactgctgtcggaggtgcgggaaggcaggcatgtgggtctcctgcattttgctccgcacagtcatgtgccaacaccaagctgggaagaacacagtctatacagtgaaatgagccagggtctgaattgcggaccgaccccttgctctctatggtatttggggcccagctatctgaactttgacgacctggtctcctcatttgtaaaatatgccagtaacactcgtcatggcccttgaggaatttcactgctggcccatgcgagaaattcagcaaaggtcactgttcttccctggaatgtcctgcagccttcgcccagccaggccaatgaggaggccttcctgatggagagcaaagttaaaacccccgtttcctcagcggggcgtcggcctctctgtggggcctcaccccagcctttgtgcctgactcctgcccttgactacaggagaattggagttagagggaggaccacagggcaggcagatggcagactcctggttcctgggccacctctgctcctcactgtcctctcctctccccagagcctgaggccccgctgcactttgctcatgcgtgcagcgtccctgccccttcccgtctccctctagccagttcccaacgccctgggctctttgcactcaggatcctcagggccgggaaagaactctgctgcgccaggcagggcggggaggtgcggggctgagggctgtcttggaaggtgctcagtgattgtgggtaggggatgggggaaaggaagggataactcgatgaatacctgcatgaactcagactgagccctggacttttcttccacttacaaaataaatgcatgctgccaggcatcagatgtccaagtccttaattttcaaagaaaagagcataaaccttctctcagaacaaactaaggtttgaggaaagtgcacgatgggggaaggaaacagtgggaaagtcagatcaaaccttgtgtttctcagaggagctcttttttttttattgccgcccccgcccgaaggatgtcttatttccatgggtcttggcctctggggtgtacctctcagagcattttcacaccgagggctgtgctgttactatgaaagctaagtcaggggaattcatccaaggtgagacacgtgtacctggtgagaccagcttggccctttcacagcaggaccagagggagaccagccactgggtcccggcctgtggttaattttggaaccatttttctcgtatttatttagtgctatttgatgtgtttcccaggcatccattgccggaggccagtatgttaaggcaagcagcaggaacgtgagaacttagagaaatgcagcagctccacttctctgtaaaggcgctgaagcaactgcagactgggaagaaggagccccagagaggcctcataccaagaggagaggggccaaggaggtggcagaaagcccatgtccccatggaaagtctgttttcacttgttctgtgtggctagaacctccgtaggtgttttggaatatttgggtcatttgaaacctgcaggttatcaggatgtacccagccctccacacggcaggtgtctccctggagggtccagatggctgagcctccactgtgtgccctgctgggacatgccgagctcccaagagatggggcaagggagagcaggcacccccggcttgggagccctgcaggaacaggcatcggactgtgctggctctgccatccccttcctgcaaggctggcaggctgcagggattccgcctcgctggctgcctcaagatgctgcctgctgggcttctgaccccaatgtcctgggacctcctcaagccctgtggtctgtggcccttaggtggccctgctccaattctgcttcccaggctctgactgctggggtggggagagtcatccagggtggcttggatttggagagccttcacccagagtgctctgctccaggcaagctgggcattcacagactagactcggggaggatgccaggagagaggaggccaggctgggcattcacctgctgcatcacgcccaccaaggggattggggatggcaacctggcagaggatcctgtcctcagccacaggttcctgtgagagggaactgtatggaattggggtggcatacctggggctctgggtgacctttaccttgcagctgcccagcaacaaggctgcccaaggagcatggaaacgctgcaggcctaaggcagtgacagaggacaagcagggccccagccctccgaatgcgccagaccctcattgttcacctccaccaggtaccatctcgagtccctgggctggtgtcccaccctagcttccacctctacaggctcctcctgcaggctgtggcctcactcaggcacctagaacaggggccagcaaacccagtccagcccaccatgtggtttgtaaataaagtattactggagtacaccatgcccattcatttatgtatggtctatggccgctctggggcaatgacagcaaaggagtatggtgctacctagaacggagactacgtgaccccatagtctaaagtgttgacgctccagccctttacaaaaaagtttgcccatccctgacacagaatgtctctccccagagattacctactctcagtcctccccagcgtctcacagtgaattcaggactatggccaaggaggcagggcttccaaactcccagcctctgtcctcagcaatgctctgtgcaaactatccctcctgctcttccacatgggatccaccaggcctgctcttggaaggaaccgtgcctttagttttaagtctttgttgcatgaccaaacgaatgtacaagtgtgtgacccggatggtgagtgttcctggttctttctaagccgtggttgaaggtgtccttgaataacggagcatcttaatttagctcctcctcatctaatccacacattaataagaaaatgaaagggtgcctttggaaattatagcctggaggagaaatcaattatttacaactcatattcagttaagtaagcacactgaatgcctagcgagatttctccccgggactaacgctaacgcattaaggccacactcaggcacagtttgcagcggatgcagcccctcatcccctaccaggtcctcacactctctgctcttaccacaccccaacctacctgcctcctggttacctgaaggtggctcacctttatgaactctttccccctgatttaagtagttgccctgctgtgggaggagtgcatctctgccccatttatacatgggcacatgctacatccatggacttgttttggcaaaaggagactaagtgcaagttatatatgccacatccaagccaaagcttaaaaagcaattgcatctcaccttgcttttccctggctcctgcagtgcctactccttcagtcaggtctggaaggaggagatgttggaatcagagccaaacagagacaagcggtacaaccaacctcagcacggagaggaccagaatatgcccccaccaaaacatgcctcttttgcacgaggaatgttgagctgaaggcaattaagaagaagctgaggcaggagagctctctgctctccctcttgcctaaaagcaggacgtatatttacaaacacagaaggtaacccaccaccttcccctctctaccaaggaggacagaggttaagcactgaagacaacttgagacccttgactgccgggagatgttagcaagctcagctgaagagtctcatctgccatttgtttgcctcaaggactcagagtccttcccttgtcttgtcacttctctaaaaatgtacaattctttgttgaagatgttgaataagctagaatccaaagccacccctttgaggattacacatcccctgagtgtctcccatgaaatatgcatgttaataaatttgttttgcttttgttctactccaaataagaactcatgagggttggggagaaaattatttttccttccctacaatgccaacatgtaacatgagctagaaataaatgttatcccaagtcactgagatttcagggttgtttgttatgcagtcaagttggctaacatagactttggaactttccaggacttttcttccctaaaacaaccttacccttctgatggttttgagaactagactccgacctttctccttactcagattcctttctaaagggtcctgcagagagtcatgccttacaagccataaaaccttgttaaacaggtcttctggactcagtatacagtggctcacttttgtaaacctgactctggcatggcaccacgtgacagataacagcagcccttatcttaagcattccttggccaggcacggtgtctcacacctgtaatcccaacactttgggaggccgaggcaggccgatcacttgatgtcaggagttcaagaccagcttggccaacatggtgaaaccctgtctctactaaaaatacataaaattagctgagcatggtgacacatgcctgtaatcccagctacctggctgaggcaggagaatcgctggaacccaggaggcagaggttgcagtgagccgagatcgcgccactgcactccagcctgggtgacagagcaagactccatttcaaataaaaaaataaaaataaaaataaaaataaaaaagcattccctttatggactccaagtttttagacaaagcttaactcttttaaccaactgccaactaaataatccctaaacccacctatgacttgtgagcccccacttcaagatgtcccatcttttcaggccaaacctacataaatctcccatgtattgatttaggattttactgacattcctgtctccctggaatgtataaaaccaaactgtcacttgactgccacaggcgcactttctcacaaccttttgagagtgtttccccaggctggggtcactcatattagcttagaataaactatttaaatattttggtttttccattgtcagtatcagctctctcaaatgtatccctgtattccagaactgtcttctatctaccagaggtcttcgtagcggtcatagaggcacctcaagttcaacataatcaaaaataaattcaccatcttccctaaaatactgttttctgttcccagcgttccagtggcagtttgtgccatgtctatgggatgaagctggaacgacacttcccaggatacctgacctgtgtggttccaggcagcactggccacaggacacattgtgcataagtgttggaaggtggagcagcagcagagccacatgtgtgattctgtgaaggttgctgcggggtgcaggatcgcaccaatggctggacagctcaccctgtgggcctggacagcacacaaacctgccccttctcatcctgggcctgtgggaacagctccatagagaaggtcaccagctttctgtgcaagtttgttactggaaaggggtcctgatccagatcccaagagagggttcttggatcttacacaggaaggaattcaaggagaatccacagagtaaagtgaaagcaagtttattaagtaagtaaaggaataaagaatggctactccagccaggcacgatggctcacgcctgtaatcccagcaccttggcaggccgaggcgggcagatcacttgaggtcaggagttcaagatcagcctggctaacatagtgaaaccccatctctaccaaaaatacaaaaattagccaggtatggtggtacacgcctgtaatcccagctactcgggaggctgaggcaggagaatcacttgaacccaggaggcagaggttgcagtgagacgggattgtgccactgtgctccagcctgggtgacagagtgagactctgtctcaaacaaaaaaagaaagaaaagaaaagaaaaaagaatggctactctgtaggcagagctgctcgactaaggatacttacagttacctcttgatgatatgccaaacaaggggtggattattcaagagctttccggaaaaggggtaggcagtccccacaactgaggattcctccttttttcagaccatatatgggaattgacgttgccatggcatctgtaaactgtcatggctctggttggagtgtctctgagcatgctaatgcattataattagcatatgatgggcagtgaggatgaccagaggtcactcttgtggccatctaggttttgggtggttttggccggttttggccggcttctttaccgcatgctgtttcatcagcaaggtcttttggacctgtatcttatgctgacctcctatgtcatccggtgactcagaatgcctaacctcctgggaatgcagcctagtaggtttcagcctcattttacccagctcctattgaagatgaagttgctctggttcaaacgcctctgacaggttcaatacaaggcagatggtagggccttggggactcacccctgaccatgcaggggtgatggggtcaaagccagcagggttccctgtttgtgcagacggacctgtggtcattgggaacagctctaggaggggcgctgggtgaggcctgggcatgggccctcctcaaaaaagcaaaaagggcaataggggagcacagacaacttaaggggggcccacatagagggaaaaccctcagtggagagaggaagtcaaaggtgagccttccaaatgcttgccgcataggctgcggaacagactatgctgggccaggtggcaccaggcccaagccaggggcggctgcacacagggacctagatatcttcggcccactgcatcacatcttggccctttggtttcccccactgtgtaaagacagcagcaaaccagaggatggctctctgaggtccttttaagctctgacataaaaactgtgcttttgtgctttgcagtttcttccgccagctgtttctgcattttctaaaagaaaatcaacgtgcttgtgcatctttccttctgccatgctctttcccaccacaacccctctcatgaattatgcaaactgcgttcaccacccaaggtgaggctaattaaaaatgttaaatgagactttaaatggagtgtctaccaccacttcatcttggttaaggctggtgagcgactgtcatcctcaccacagagcgtcctgcccagatcccagatgcacgctgtcattaacagtgattaacaggcacagaacacatagcacttaaaggtgcacgatgaatactaaaaccgcggagtggtagaatcattctggggttgtttagatgttgcctccccttcatccccacaatcacacaaactttcattagcataacttcaaatttctagtgcccacttcagctgctaatgaatttaatgaaaagttcccccagggttggtctctcaaaaattcctctttattttgtggaaaagacatttagaactatagcaagaaaaatcccagctacaaaacggaagcagccattcaacagtatcagtccctacaaatgcaatcaaaatgacactttaaaaaatgcaaaagcgccgctgacacccagcaatctgactcttctagaaacagcctcttccctggcttttgtgacaatgcctctctcacaccaccttcccacatctccagcctccccagctgctcctcagcctctgtggcactcaccctcctgggccctgactcaagatgtctgagcttctcagaatgcctctgtcctcacttcttacctccacatgtgtcatgctggccaaccccagccacagccaccacctgcacaccaggaactcatccattacttgcccagtgccaacctcgcatgtggcctccagacctgctgacctgccatcctgctctacctcaacatgacggcattatgaggagtgagaaacataggaagtaaatccatcaagcttttcatacaagaatgtagataaacaacaacaacattgacaaaataaacccaaggatcacacaaggtacagagaaagaagcacatgaagacaaccacacaaccaactttacttaaagaacaaagatgtaactatcataaacaaaatacacacaactcacatccaatagttaccaagttttattcccaaaatgcaaggataatttagagtatgtgttgtcttttttccctattgagtcctacgttcgcaaagcagagcaggaaaagcagagctatggggcaggcgcctgcctctggaaccatccatcagagccttgagtttggaatccagcaatgagagcagacctccctgcatcttagctccacaagctccagagccctgcatcttcataaagggtgcttgacaaagtcttaaggaattaatgaatatatgacactgatgtgatgtggtcaatgaaatgctaatgttttatagtttcagttttcttcattagataacagccttcatgctttctcattaaatgtgtggtggaggtaattcacaatgtttacataaggagatccaggcacaatgcaatccagggcccacacagagccactaagctagtgagtatggggacagctccagcccgggtctttcaggcaaattcagcactgtgtttcttccggagcttcgcatggagcaaagccatccaaagctaaccccaagaagcttgctctgcaaaaagcatgcttagaaatgctatttgggaaggtcacgttgtatgttagcatgtccatagcttggagaagtcctgcaaaaaggaaacctccttaatagtccccaaagttactaaaacaccagctaattttctttttctgcaatacccaccaacatcaaggataaacaatttgggcagctgtcctttgctaacagtgaaaacagcccacatgcaggtattaatggttagtagcctaatttgttctgccagcctggggatttggcatttcaatcacccaataaaagtggaaattctgtaatggtgggaagtgcaatccacctgctaagcaggaggagctgattgctttttggataaatgttctctgaaatgttagcccacaaggaagtcctgaaagtcagttctgggcagcaggaggagaagtggagcagtagggaccacccaggggaaccagtgcagaggcctgggggagccccggcagggacagatttaaaaagaaccaagttccgttcgcgtcagtacttcaccaagcctgggcatgtctgggcctcaggttctcaggtgtaaagtgagaagtgattatccagtctttgctgatgtctacaaacatggtgctcagtaagtatttactcagcatctactctgcagaagaagcagtccttgttcccaaggagtttcagccaaggagagagaagagtcaaatgcagtgtattctaaagaacaataaaggccaggcactgtggctcatacctgtaatcccagcactttgggaggccgaggtgggaggaccacctgaggtcaggagttcgagaccagcctggccaatatggtgaaaccccatctctactaaaaatacaaaattagccgggtttggtggcgggtgcctgtaatcccagctactcaggaggctgaggtaggagaatcacttgaacccaggaggcagaggttgcagtgagccgagatcgcaccattgcactccagcctgggtgacgagagttaaattccatctccaaaaagaaaaaaaagttaaaaataaagaacagtaaatacagcagacactgtgggaaccaggcagagcaccaggcgtgaccggaggctgtaccttggcacagataatgccaaggtctgctggggtacagttcttagagctggattattagatgtgagcctatgataacagcagacaacgtgaaggcacccccaacacacaccagaaaaattaaaagagaaagaagaaaggaaatgctctttctggctgcaggggtataatcgatgacgtagatcactttttttgtaaagaattcctctccattgtacaacccaaccagccatgtctctgagctatgcaccatgctgtgtacagaatatatttatatcccttaatccccatgctctctgggctaatacttccttaacctgaaatagttttccttttagtgcattcctccttgcttcttaagcatgtcactctaaagaaatagagccagtgcacacacgaacttgaaaatttagctctgttcccaaattactaaaatcagcatccactgacaattccattttctttacaacaggtcaaaatgttgaacagcagccgaaaacaggtatcccagaatgaaaagcacccagcagacaagcagttcccagctctctaagcctccccctcctcctccgtaaagtcagacccatattgcctgcccagggagcccctgcaaggaaataccaggacatatgtgacagctgtttgatatataagccatctcacaagggaagatgactgttattactatctaaacagataaatggaggtatctgtgttgatagtacattgtattattctcagtagaaacattaagttaatcagctcttgagagttaaatcctatgactgggcaaggcctagaaaaggagcagatttgggaaggggagagaaaataggcttggttttggtgtaggagctagggattagggagcaggtaggaccacagacggacaccagagacccagttcctagtcacccacgtgcgtccagcacctcatcctccagtctcccctgagacagcgcttctgcatcccagccatggccatcgacccttgcacgggcgcagatccaggtgcaagctcttcagcctctccctatctgctgggtcatcctcaccagcaatcagccatgctctggactgtctcatggaaaaacaaacaatgccttctaaagacttcctcatttctcttgttatttttttctcacataaaactttccaaaagaattctccaactctctgcctctacttcccctcccactcgctctgctactttctctagatgagcctcagttcctccccaccatactgacctctcatgatattcagtgcaggggaatgttccctctgaaaatccgtgtcctcttggctcctgcgacaccatccactttctctcctgtccctggccctcctcctccagcctcaccaagtgcaccctgcccctctttcctacatgtctgtccctcttctcaaacaccttcaggcagttgctcttggggttccttctacccacaaagtgcatcctagggcagcccctcctcctgtttgtgctccttcccattccctgagtatctctctcatggcacagtatgcaattatcttgtttctatatcattcagctgtctgcagcctgtcctccttctgggatgtaaggtccttttggatagacaccacatttgtctgctatcagtacctgctgctgtattctacctcaatacagcatagaaactcaataaacattttctgaatgaatgcataaattcactcattcattcatttattaaagcacagagaatagccatgtatcagtcaacataagctgggctgagctactgcaacaaacaactcccaaacctctgaggctcaaaacaatacaggtttattttgttggtgaaactataaagccactgtgggttagcaggggaattctactcgctgtggttgtgtaaggagccagatggacaggacagctaccaggccagagaggggaagaaatccctggagggctgcagggcagcagttaaatgtcccagctgcaacaggatacccttcacttccactcacagctcactgctcagatccaaccacagagccccccaagcacaagaagatgagaaagagcagccttctatgtgccaagggaatggcaagcctggtgtcagagcagcgctaggactgccacagccatgaattgggacactgggaggggtcgcaaagagtgagaggataatcagaaagcatttcaaagatgcggtgctcagtaatcctcactcctgcagaaggaacaaagaagaggagatctgcgagtgttcatcacatttggcaactaattggtgactctggacatgaagtgctagtgcactggggatgtgtcagaggccaaactcactaggttgagcaaaagagagaagtgaagaagcaaacacacaacaatagacaacattttcaggaaatgcgacggctgaggaggaattgaggcagtagctggagaaagacaacgggccaaagtggtgatgctcctgggtaaaaagacagtcatgtatgcattggggaggacaggctagagcccccaaagatgaaatagatggaaatgaaggaaatggagctagtggctcttctgcaagctttggagtgggaatggaaaaaggtagcaatttaggggcgatgagcctctggctggggtgggctgggaatgggaccaagatcctggcagctctgcggggaccccgatgaacccctgcaggactttttcagctgttgcaggatcatcatcttacattctgctcactcaacagatcagaagctgcagctgtgagagaaggaggcccggatgacaaataaccgttaaagtaattttcctgggtcaagtaattactgccccacaaagatgagaaggcttgaaaggagaagggtacagccaatagcagtcagagcacacatgctgaggctaagcagccagagaggtggagggagatacatgtcgggaaggggatgggcagagtgaccagaaaggtcagtcccaagggtggacgagtcagatgggcaaggtcagcacagatccagctgcctcgtccaggctggcatgcaggccggcaatgacagagcaactgaggttgtgcttagtattttttaattttttcatttttaaaatcaaagaattcctttttttaactaatttagtaaaaggatttaaaacaatatctgggatacgagggcctcagtaattatttgttaagtgaatgatggaatgggaatgttctatagtatccctcaaattttcttcagttccctaaatttcatttcacttactaaatagaaataatgattccttccttatattgttattctgaaagaaataagatcatgttacacaaagtgctttattaatagtagctgtggtggtagtggtggtggtggtgatggttgtgatagtgataatgatggtgatggtggtggtggcgatggtggtggtagtggtgacagtggtggtcatggtgatggtggtcatggtggtagtgacagtaatggtgatggtggtggtagtaatgatgatggtggtggtgatggtagtgatagtgataatgatggtgatggtgatggtgatagtgatgatggtgatggtggtgatagtggtaatggtggtgataatgatgatgctggtgacagtggtgatggtggtagttttggtgatgttgattatgatagtcatggtggtggtagtgatggtggtggtggtggtagtgatggtggtggtgatagtggtggtggtagtgatggtggtggtggtgatagtgatggtggtggtggtagtgatggtggtggtgatagtcgtggtggtagcgatggtggtggtggtaaggatggtggtgatggtggcagtgggtgacggtggtgatggtggtggtagtagtgatgatggtgatggtggtgatagtgatgatgatggtggcaatggtggtgatagtggtgatgatgtgtgatgctgatgatgacaatggtcgtggcaatgatgatagtgatggtggtgatggtagtgatggtggtggtggtggtagtgatagtgatgatggtgatagtggtcacagtcgtggtggtggtagggatggtggcggtggcaatggtggtagtggtgacagtggtggtcatggtggcagtgatagtaatggtaatggtggtggtagtagggatggtgatggtggtgatagtgatgatggtggtgatagtggttttggtgatggtggtgatgacagtgatggtggtgatagtaatagtggtggtggtgataatagtgatggtggcaatgatggtggtggtggtggtgatagtgatggtggtgattgtggtggtggtggtggtagtgatggtggtggtggtagggatggtggtgatggtggcgctgggtgatggtggtgatggtggtggtcatggtgatggtggtggtcatggtgatggtggtcatggtggcagtgacagggatggtgatgtggtggcagtgatgatggtggtggtgatagtggtggtgatgatgatagtgatggtgatggtaatggtgatggtggtggtggtggtggtagtgttcattactgtagttaagactgtgttgcagattgttgaagctgttgaaagcctaaccttagagtataaagaccttcattttggtgggggaaaaaggatctttacatccacctctcctctgtaagtgggcctgtatgtaaaactttccaggacaagtgagaaatggtggcactcttttaaaacctctgtgagatgattagcaattagcttttgtggtctaacctttaaaccctccctctacagtgaagaaacaaagcccttgaatgtgtatatgctcttagggctccatgtgaccaagatgaataatgatgtactcagtttagacaatatgtacatgaatatggttcttgaaaaatcaaaccaatttttgaaaattaaatcttattttatatttatttaaggaggtggatatttatgaataagtctccctgtttctttataaaagattcaattttcacatattgggttcatttaaaggaaggggcagcatctgtcttcattgactgtctctatgaccttcccaggcctgagacaggcttcagagagtagcagacaagttctgggcactgctcctgaccttatggagctctgtggcaccatccttggtagctcccaagcctacacgtgaggtctttgtgctttctgaggagccacctcttctaccattagtaggggtttctaaaggattggtccttggtggaaaagacccagatgggaatctcatctgttcttagttatgttagctttcttgggactcagaagaagtccttagtgtgagctggtcagggactattgggattattagttttattaccattgtataaatgaacagagcagcagatctgaacccagaaccaggtctcttcacccaaaggcaggtgggctttcaccctccctaccctcagctgctctaagggtagaccagttacattggtcccactggcccattctctgagagtagaccagttacaccaccaccatcatgccagaccaccagagatgtgatctcacctaagcatccttaatttggggccagatatgtctctttcctcctgagtctttaaaaagatgtgttagataaaataaactgaaaaattaaaggatattcaattcaactgaacaaatactataaagcagcctccactaagcactggaattctggtgatgccttcaaggaactcagagtcaagttggcacagaagaacaaacaaactaagacttgctgccacatgcgggagccgaggtgcccacactcaccacccagggccaacaggtctcttcatctggggcctggaggtggggagacttcccagggatgtggcacttgcatggggtgttgaaggcaagcaggagttcaccagggcttcaagtggctggcaagcttctggtcaacctgagcagcctgggctcactgggcagagatgttattataatgacgatgtcacaatttggctgggagtggatggcccacagactgcttccctggcttcagccctgcctggaccactgcttgaaaaccactgattccctgaccttggggctcgcacctcctgctctcctgccctcctgccctcctgccctcctgcggggacagtgctcactctacaggaggttgtgaagcagaaggcatgcacgttccagccctcaggtcacagggctcaggctgggacagggcctcaccatctcagagtccagagggagagccactctccacatccagatcccaaggtggagcccacgacccacgagcccatctgtccccctctccagcctcagacacctcctgggctccatccttccattctgaacccatcccagggaacaggggaagttctgtgctctctgggccacagcctggcactacgcctccgatacaggcaattctgtcttctcgccgtcccctgcacagtcttcagggcctgctcaatgccacctccccatgacgcctgcccacggtgccccagctgaaagcctcacagcaccacccaactggcccagaccctctgtggatgcatcttagggcagactctgcctgctgagacccttcgaaggtgctcctccatgtttccctggggtcctcaagccagctgtgacctgggattatgccacaggccagagagctgattcaacccctcctcggggcagcgcttctcaacttttcactgtgattatcatcatcaccccctaagaagaaaaactgagattaattttaagagagaaattaaggaaacgaataggaaaagcagtagagattgttaaagctgttcacagaaaagagaagtaatgtcagtgacgatgtcagatgtgcagtaatttaatttaattagagagaaattaagcactgaggaatgagtttgccatgtaggaccaaggcctggaggccatggaccattgtaaaatctgttgatttgcactcccaggaaccaatcttctctccctggaggacgatatcaccctgttgaaaatgcacgccatagaggagaaattcaagtgaacaattatgttaaaatgtggccttgacaagaccttcccccagccacacgtccccacgtccccacgtccccacgtccccacgtgttcgcagacggtttgggccagccgggtggtgctgtcaggctttcagctgggacaccatgggcaggcgtcatggggaggtggcattgagctggccctgaaggctgtgcaggggagggcgagaagacagaattgccctttcccggaggggtagtgccaggctgtggcccagggagcttggaacttcccacagtccacagaaggcggcctagttccccacttctcacagctctccaagatctggagcgcagcgccacctcctctccaactcatccccaagcccagccttggcccggcattcctcccaaggttcccaccactgcttcaaactcagtttgccccaaactgtgaagcacctctgcttgggcagaggaaaaatacttccaaatgccttcccagaaaacagggaagagctttcccccagaagataggatccctgtattggaacagagctctgctgtccccaggaccctaccttccccaggttctgatggacaaccctgtgcccacatagggctaggccatcccagcccccgcggtatggaggaggttaaccgaaatgtgaaactgggtaacagctcacagttttatagtccctgtaattatttaccaattaaaaagaaccacaactgtttatcatagggctgcgtgcatattaatggccggcaggctattcgtgtgatgcttctgctggggaaactcaatattacttgatgccttactacagagctttctgacagggctttaaacatcaatcaattatttaaagtcccacatatattgactttttttaattacagagctttccagagctgagggaacgtaaaggaagaaagaatgagtttgctgcaaagaacactccatttgtcttagattttgatctatttcccttctgctttattaagacctcgctttgttttatagatcctatgaccaggtgtcgatttgtttccaagacatggtgcttgattattttttcttgggacaggagcctctccaccttaattggcattctgggagggatggagccttctggagagggcgtgcattctgagcagttcaatgttgcttctgcagtgctggaggccccaggtagcctccctgatccacaacgttcactctggttctattgggaatatcacaccatggaaggggataacaagagcgtgcaggtctgtctccaaagagaggaccatagctacacattagaaaatagagctacatttatgaaaactttatatacgagatgtgatttaaaagacagccaagggaaatacaaggggcagtgtttctgcgtctgagagcagcctgcagtccagcagtcaggcaagctcactgacttctaacatcgagccttgtcctagaaactggaaacacgatgtggatgagggagagcggctgccctcaaagagctttcagtctactgggtaaaggtagccaataaacacttaagcagataaagaggataatttcagatatggagaagctgaaatgggtgtcatggagaggtgagggaagtgctattaggggtggccaaggacagcctcgctgagatggtgacatctgaggagaggcctgaataacaagaaacaggcaatcgtgtgcagaagtgagagaaagtcacaccaatggcaggaatagcagatgccaaggccctgagacaggatgtggcatgtttgagagagacaagaaggtgcgtgtggatgggcatgaggccagagtgtgggcagtgtccaaggcacgcagagccctacagggcaccgcgagaaggctgtgctctctctcctgggcatcagaagaggcctccggaaggctccagcaggggcatccaggatctcctttgtgcatagaaacagcacgctggctgctggacaagaaatggaccccagcaaacaagatggggtggggagcccagtagagatgctaccaccataacccaggtgaaaggtgtgctgggctggaccaggtgggcacagtgaggagcatttatggccaagatatattttgaagatggagtcaagtggactctgaggaccaaagacaggcatggcagagctgggcagggaattggctcttaccctgggccagggagcagctgggaggccatgggagcaggagtatatctggccccgggtccccaacatgagtctctgcagcccctgccttaaaaatatagtgtattaatagaaaatccaaggcatatgaagcccagcagaccaggaggtgactgccattagatagtctgtactcacagttcccagaggaggcacatcacccacactgggccacggagaaacacggaggtgggtcaggaggcagaaggaggggaaacatgggcaggagtcttcactgtggttttgtgggaagaaagaggagaggcaagggtccgcgggtccaggactggctgctttgcataacctcggggctctgttctgcagcagctgtccctagttctctgacctgactttggggtgactagggaagggggacagtggcctggagtatgagagtcccgtagaggagtgggtaagactctggattgcttggttcgcatgggaaaggcacagagttgttccctgtctctaggaactgacaccctgggaggagctgtcccttcagtgtcagcaagacactagatgtcaaagcctcagaatacagaccctagaaggcaggatgcacacagcctcccacctggcctctgcctctgccctgcccacctgagtgcaccctgccttgggcagcttgctttcccacactaaggcgcactcctagagagccctggccctcccttcctcctgcctgttccccagctgcaacccagcccagccaccacagtctttgcccacactgctctacccccacacttgccccggctttcctggccggcggttccgaggctagcaattaccctaagggtccaggaaaggagcacaggggagaggaacagcagtgtgctcagctctgctcaggcacgagccaggacaccatggtcctcgagaaataaactccaggccgggtgcggtggcttacgcctgtaatcccagcactttgggaggcggaggtgggcggatgacctgaggtcaggagttcaagaccagcctggccaacgtggccgtctctactaaaaatacaaaaattatccaggcgtggtggcatatgcctgtaatcccaactacttgggaggctgaggcaggagaattgcttgacctccaggagacggaggttgcagtgagctgagatcacaccattgcactccagcctgagcaacacgagtgaaactctgtctcaaaaaaaaaaaaaaaaaaaaaagaaagaaagaaaaagaaaagaaaaagaaaaaagaaaagaaatgaactccccacacatccagcgccccaggctctaacagccagggctggcaatttagttagggcacagaaggcccactgcagcctcgcctggggatgcgctatactgttcctaggaggatggactccacgcttctcagtttgaggtcctgtgacagcagcagacctctggccaaggtcttctcagcttctagctggccaggtatgatggcacgcctggcttaaggcccacggggaccctcctcaatcctttctcacacctcagccgcggccacttcacccctcccagcctccctagcacagggctccatcaggggctgtgtggctgcgtgtggctgcgtgtggcaggtgaagcaggtgaggtctgggagggtggcgcccagtcccagctgagcacttgctcagtgtactgaccttctttgcactctctctccccagcctgatttcagagccattttagatggggaggattcgcctactatatccagccgggctgtgggtaccaggaaagggattgaagaaacattctgtctagggccgaggagcagctcccagtctgcagcccccacgagtgcagaggctttgtgctctgcaggtgttcatccgcaaatgaggagcggtactggctccgcctctgtggagaatcaggacaaaagccttcaggacacagaaggatacagttatgcatatgtgtattaataacgaacggatttgtgagccgagtcctcaaaggggattatcctggggacggggtttccagtgcatttgctctgaggtcttgtctttggctactgctgcatgtcggagacaaagttcaagcatgagggataaacgtaaacctcggatcttactgttttcttctggaaggtgggcctccgtcctgtccacattcttgcagagcagtgaagctggaaagtcttctgattaagcaagtctctcctcacacccgaagcacatttgttcctggggtaggacgtgggaagtcagtgttggactaagggacctggctcacactccaggtgaacttggaagaacttgtaacccccatctccgtttcccccatgtattaagtgagggctttaacacctgtctttcaaaccttacacaagtgttgtgaggttcaaataagaacataggaagcatgaacctacatgataaatgaatggaaccattaactgtcaaatgcaattagcagattcttagtcaataaaatttactgtggacaaacgaatgacctaggatccccactccccctacacacacacacaaaattgactttagctaaaagaaaaaagcatttctatgttgtagtattaggtaggtcagccagcctatctctgtgtgtaattcatcctataagcaactaaaccacatagattcccatgaatatgtgtggattctgataacagtgtcaagatacaactattccattggaaagacaccccagccatgataccaacagcgtcccggatcctccctccttaccccaagatcgctgtggccaaagtcctcctctagaactttcttgacaacctcttttccatcagagtcttcattatgccccaaagattattcatgggcctgctaaccattgatttctatattcaggggagaaacactttaattaacagaacaatcaaaatgtgctggactatttttcatggctcacatctgctgaagaaatgcaaagtgttaatttaggaaggtatcaatgtgtctattgtagataatacaatgcgcattgcctggtacattttaaaggaattggagacaggcacggggcatatgcaattatgagctttgtgaaatacagatacgacatcctgtgttaataaaaaccctggacaccactgagcatgagcaagtgatggaaaaggcgctaattatcactgcaggttggggcagtgagcctcagcagagatgacacggcctttctgcaggtgggaaagggcttgctttggtttttgcttttcacagaaacatctttacatatagatgaggtcatctttgatgtgtgcagagaccatcctgagggcctttccaggcatcctgggccaccacgcagcctcctacctccagtgagaccctcccatccattcctcacctgaaggcgccttcttgctgcgcctcacatagcgggaggagacagtgagctttctggggcctcttttaaaagggcattgatcccattctcaagattctcaagggccccaccctcgcaagaacccaatcacttcccagaggcctgaaggccccacctcctaatgccttcaccctgggggttagatttcaacatggaaattctgggagaacacaagtattcagtccatagcagagggccccacagtgtcacctgtgccaggcccacagcaggtcctccagaaacgttcgtggaataaatgaataatcaagcgaatgggggagcccttgaacagagccagctcaagtctctgaccagttcctaggggctccacatgaggccggcctgtgaacacaatgacaagctaacatctgtttagagtagaagggggagtagcctgggcgggtgtccagaggcagcactggccaagcctgagctccacctgcaggaaggagtggacccgcagagctctcccactgctaacccaggctgagggacagcttgaatcaacacagcagtgagcccgcggcaggcccaggaaggctgatggccaatgttccactctaagaaatgtttcctccttctcttatgagtagataaacaagcatgactgtccttctgtgtgactgggccactgcggtgggaggggatctaaataaagaggagtagattgtcccagaacattagctggaggtgttgctagggtcaaagctccacaaagtacctgaatgcaggaagaggggacagagcagcaaagcccaacccagggccagctttcctgagagaagaacaggatccaggaagagtccaaagacgccatacagaaacagggctattgatattagttaaataataacatgagagggcccatggccctcaacaagtaagggctcctgtaggtgaggcttcctgcaggtgagggagaaagagaatgggagaaaatatctgcaaatcatttatctgataagggacttgtatccagatatatgaagaactcttacagaccaataagaaaaagttaaatagcccaatttttaaaatgggcaaagaatctgaatgaacatttttccaaagaagagatacaaatggctaagcacattaaaaaaattaacatcattagtcactagggaaatgcaaatcaaaatcacagtgagattccatttcacacccatttaggatggcagtactcagaaaaataaaataacaagtgttgtgcaggatgtggagaatttgaaccctcgtacattgcctgtaggaatataaaatgatacagccaccatggaaaacagtatggctgttcctccaaaagttaaacatagaattaccatttgatccacctattcccctcctatgtacatacatacccaaaagaataaaaacagatactcaaacaaatacacatacacccatgttcatagcagcactctttacagtagcccaaaggtagaaacagcccaaatgtccatcaatggatgaacagtgatatgatttggctctgtgtccccacccaaatctcatctcaaattgtaatccccaggtgtcaagggacagacctgttgggaggtgattggatcacagcggtggcttcccccatgctgttctcatgagacctgatggttttaaaagtggcagtttcccctgcgctctctctctctcctgccatcttgtgaagaaggtgcttgcttctccttcccatgattgtaagtttcctgaggcctcccgagtcatgcagaactgagtcaattaaacctctttcctttataaattacctagtctcaagtagtatctttatagcagtgtgaaaacagactaatacaaatggataatcagattgtgatatatccatactatggaatattattcagccataaaaagacatgaaatactgatacatcctgcaacatggatgaacctccaaaacaatatactaagtggatgaaatcagatacaagaggtcacatattgaatgagtccatttgcatgacatgtccccgttagataaatccatacagactgaaagtagattggtgatttccaaaagcaggagggagggagaaatggggagtaatttcttaatgggtgtgaggtcataatttgaagtgacaaaaatgttttagaactagatagaggtgctggttgcagagcattgtgaacgggtgtaccaaatgccactgaattgttgactttaaaatgatgtattagtccattttcacactgctgatagagatacctgagactgggaaatttacaaaagaaacaggtttaatggactcacagttccacatggctggggaggcctcacaatcatggcagaaggcaaggagaagcaagtcacatcttacatgaatggcatcaggcaaagagagagcttgtgcagggaaaatcccattttttaaaccatcagatctcgtgagacttattcattatcaggagaacaccacaggaaagacccgcccccatgattcaattacctcccaccaggttcctcccacgacacatggcaattgtgggagttacaattcaagatgagatttgggtggggacacagagccaaaccatatcaaatggttaactgttttatattatggggattttaccacaatacatatgtttttaactatccagtgtgtgcagattatatatggaggtaagaaccacaagaaatgaaactgattgttcatagcaagcagggccagagattgggatgggtgggaagtgggcgctgcttctcattggaagtctcacttaacttagtagcataaaatggaatgtatcaatttgatgaaaataatttcttataacatgcatgaaactagttttttccctaacatggcagattagaggcttttagcttgccctggctacttggaaatagcaaaatagtgcataaagaccaactctgagttttaactcaagaaggaaaataggaatccacaaaacagtgaaggacaccccagatcctagggaggagaaggcaggcagaaagccccgtgacagtatccatccagccactgagaaaagtgagtgaagccccaggacctgcgaggggcagaacacctcccctatcccctagggatccaagcaacccacaaagaggggagcactttttctctcccaagtcctggagctgactcagagacaggcttggagacactgagaaagaaagacacctagaaaagctgcaggcattttcccagacctgggactgagagcaggatggcctttttaatccaggctcatacagagtcagtcattctttggcaacccagcagcatggccatgcatgcattttggtctcaggccagagactggagtgcttcctctggagcaagttaggggcctacacagccagaattcatggcaagtgtggaaagtgccccagcagtaggcactggaattgtgatcttccctgtcacaggtctgaggtgggaggagagctgctgcagcgtggtttctcctcgtcccagagacttgtggccagcgcctagttggcaacctataactggtctgtgcacgtcattgccggggtcccagcctgctcctctggaattgtggtgcatcaggacccgctcttttccatccccaggcattcagagcacctgctcacccagatgagaagcctgagttgccccacccttcctgagcagagatcctggtacaggagagccctctctgcttcatgcccaggcaggccgccaggcatctggaacccaccctctcctggattaggaatttaggcagccacctgaggttcccatgcagagctacttggggccaaagaggttttctagctccacgcctaggaacatctctgggcactggtggctgcccactggactcccactcagagctggtgcttgtgccacagccagctcctacccatacaagccaccgagccactcgttggcttagaggccaaatggggcagcacaatagaaaatctgctaacaccaacgcagagcaatggggaactagaggagctcctgagactgctgcctccctgcccccacaagaggcacaggcctgcccacacgcccagcatatgccactacaaccagcatctggggaagccaccatacagaggccacagtaaccaaggaactcagacaggctctttgctagtgaaaacacccagacccagagagctaagccttggcccctaagagagtgatggacccagcacagcccgccaaagcctcccttgagtcaaaggaaatgcaggcatgacactaccgttggcctgaaacagactcagagaggggtctttccttgttgccctccctccttaatgcactgttgttgactcagcagcagctcttcctgtctgggttcagggaggatgggctaaaagagactgcttctgggactgctccagcagctccatcctcactgaacgtgcatttcacccttctccattgcctctgtccccacccgtacctgccaactcttaatcttaagctccacctactggacaacagcctgaacctgtatgcaatcaaggaacacgtacagtgcgttggcacactgaaagcgcccagagacaaagccaatggttcatacacagtatacaccacagtcattcctttaagagaaaaaagagcttaaaaatcaagaagcttcattcaaagaatagcaaattcaacataaaagaaagaagcagcagcagcagctctctcagataataaggaacctacacaagaactctagcaatacaaaaagccagagtgtctcatcacctccgaaggatcaacaccagctaccaagcaatggatcctaactagaatgaaatgtctgaaatgacagagaattcagaatgtgggtggcaaagaaactcaatgagctccaatagaaagctgaaatccaacacaaagaaaacagaacaaattatccaagttttgaaagacagcataactacgttagaaaagaaccaaacagaacttctggaaatgaaaatttcactataggaatttcaaaacatagttggaagacttaacaacagactagaccaagcagaagaaagaatttcagagctcaaagactggggctctgaatcaacccagtcagacaaaaataaagaaaaaagaatgttaaaaatgaacaaaaccttcaagaaacatgggattttgtaaagtcaccaaataaatgacttaagaaaagaaggagcaacttggaaaatagatttgaggataaaattcaggaaaattttcccaaacttgtgagagaggtcaatatgcagatacaagaaatccagagaactcctggagatattgtacatgatgaccattaccaaggcgcatagtcatcaaactagccaaggtcaatgcaaaagaaaaaatcttcaaggcagctagagaaaagtgtcatattacccataaagggaaatccatcacactaacagttgactctcgcagaaacctcataaggcagaagagattgggggcccatttttagcgttctgaaagaaagaaaatgccagccaagaatttcgtatcctgcctcactaagcttcataaacgaaggtgaaataaactctttcccagaaaaacaatcagtaaggaaaattgtcaccaccagactggcccaacaagagatgcttaagggagttttaaatatggtaataaaggaacgaacgatacttgctaccatgaaagcacacacaagcacatagcccacagaccctataaagtaacttgctaacaacactaggacaggaatgaaacctcacatattaatagtaaccttggatgtaaatggcctaaatgccccacttaaaagacacagagtggcaaattggtaattaaaaacaagactcatccttctgctctatgcaagagacccatctcacaagtcacgacacccatagtctcaaagtaaaggcatggagaaagatctatcatgtaaatggaaaacaaaaagagcagaagtcactattcttgtatcagataaaataggttttaaagcaacaacagtcaaaaaggaaaaagaagggcccaaatagccaaagaaattttacgcagaaaaaataaagccagaggcatcacattatccaacttcaaacatactacaaggctacagtaacccaaacagcatggtactgatacaaaaacaaacacataaacgaatggaacagaacagagactcctgaaatagagccacatacctataaccaactcatctttgacagtcaacaaaaaaaaaaaaaaaaaaaatggggaaaggacacactatttaataaatggtcctgggaaaactggctagcctatcaacatatataaaaattaatgcaagtagattaaatacttaaatgtaacacctcaaactacaaaaatccagaagaaaatccagaaaatactcttctagacattggcctaggcaaataatttatgatgaagaccccaaaatcaaaaatagacaaatgagacttaactgaagagcttttgcacagaaaaagaaaaaaaaaagaaacaaacaaaaaaacacctctcaacagaataaacagacaacctacagaatgggataaaatatttgcaaatcatgtactcgacaaaggactaatctccagaatctataaggaacttaaatgaatcaacaagaaagaaacaaccccattaaaaagtgggcaaaggacatgaacagacacttctcaaaagaagacatacaagcagccaacaaacatatgagaaaatgttcaacattactaatcaccagagagatgcaaatcaaaaccacaatgagataccacctcttaccagtcagaatggctattattaaaaagtcaaaaaataataactgttggagaggttgtagagaaaattatatgtttatatactgttggtggcaatgcaattaggcagaaagcagtttggaaatttccaatgaactgaaaatagaattgtcactcaacccagctatctcattactggatgtattcgcaaaggaaagtaaattgttataccaaaaagacacttgcacccatatgttcatcacagcactattcacaatagcaaagatgtggaatcaactcagatacccatcaatggtggactggataaagaaaatgtggtacataatgccatggaatacaccattgccgtagaaaaagaacaaagtcatgtcctttgcagcaacatagttgcagctggaggtcattaccctaagtgaactaacacaggaacagaaaccaaataccacatgttctcacttataagtgggagttaaatcttgggttcacatgaacttaagatggaaacagtagacactggggactcaaaaatgaaggaaggaggaagagggggaagggggcaaaggcttaaaaccttcctattggatattatgctcattatctgggtaacaggaacaatagaagcccaaaccttattaccacacaacatacccttgttacaaacctacgtatgtacccctgaatctaaaattaaaatctaaatttaaaaaatagtaaaactagcagtaaaaatggcaggtggaaaaatcttcagacatgcaagaattcaaacgatatagtacccacaagtcccagtttttaaacttttattgaaattgttttaaaagttaatactcagagtttgtaagatcattttctcattaggatagcttaaagaaataagttatttacctttagaattcctaaagtgtccagagaatttccatcaagtacagttgggcttagtgaaattagaaaatagcttgatacccactggaaaacattgtggggaactgaaggaatcgtctaaatatgtcacagcaaaaagatagcaatggagaaaccacctggggtcatttgacctgaggaggtgagattgtctgcctgtgtgaggtgttttgaatacttaatgtattctatattagccttgcctgggcaggcatggccatgaccgcagagcaggaatcatgccttcattgcagaaaatccctggagcgattcaagatgggttatgactccagattaagatccaattaactgaaacattcctgagacagcaggaataacccttgtacagtattttcaatttgaaatgcactttataacttaatgggtctgacagatagaaatctaaatatttcagttccccaggactgcccctccattaggcaagcatgaacacactaaccctcacacacacataagtcaagaactcacagcacaagtattaagatataaacctctgcagcctccttttagatgcttttagcagaaaaacaacttagagatgataaatttgccatgaggatgagctggttgtgacaggggccccttccccatcccagaattcatcatgaccagttcagtgagagtctctgaggctggcaaggcccaacaaagagtggttccgggttaggcgggtagcgtaggggcaggggggaagctccctgaaggatgttatgatgctatttgataattctcaaagaaaactttggctgagggttcatgcaaaccatagccaaaaggaagacaagctagaacctcaaaggaagccggacggtgtgtccagcccaggagcgaggcggcaaaggagccgttcagggagctcaggagttctgcaaaggtgggaggtaccgagatggaggctgagtggttcggaaagagggccctggagtatcctgcccacagacagtgcaatttttctgcaaatcttccttcctcctctccgctttccctcatctccctcaaccagcttccctcccaaggccaaacattgagggacaactcccctcccctggagaggtttaaccagctgttccctcagtatgcaagccttctggggaactagctctgcccactttgccaatagagtggagaggaagagattgttttccaagccagacatggaatacatcccatcagcgtgtgttgaagatgataaagctctcctccttcggtctcctttcctgcgagccatctttacctgccactgcatgctctgaaacagagattctcacactctatcctctaccggactcacctggagagctgtgaaatgcagagggctgcgacattcccaggtggtgatgaagttgccggtgtgggaaccacattttgaaaactaccacctaaatgttcttccccaagcattccgcacattctctaagcctccaggcatgtttgatagctgtgtgacctcagagacgtcctttaacctccccatgcctcagtttccttatgtgtgaaatgaggaaaataatactttccaccatatagggttgttgtagggatttaatgagctaacatacgtaaagatttaggacagtgggccaggcacgttggctcacgcctctaatcctagcactctgggaggccgaggcgggcagatcacggggccaggagatcgagaccatcctggctaacacggtgaaaccctgtctctactaaaaatataaaaaattagctgggggtggcaggcgcctgtagtcccagctactggggaggctgaggcaggagaatggtgtgaacccgggaggcagagcttgcagtgagccaagatcgtgccaccgcactccagcctgggcgatagagtgagactccatctcaaaaaaaaaaaaaaaaaaagatttatgacagtggctgacatgtagtaagcattgtatatgtgtttgtgattttcactgcctccgtccaacaggaagctctgtttcattgcacaggattctatttcaggagtcccccttatccaaggttttgctttccaatgttttagttacccatagtcaaccacaatctggaaatagatgagcacagcacaataaggtattttgaaatcaagaaagaccacagtcacataactttttgcagcatattgtcttattttattattagttattgttttcatttattatacctaatttactttaattaaggtttatcataggtatgtgtgcatagaaaaaaacagtgaatatagggttcggcacaatcagtggtttcaggcatcttggaacgtatcccccgtggataagggccgaccgctgtaattgatgtattcatcatgtctggtgggaaccctgctaattttctcacaagaaaatggatcagctgcagttgtgtctgccaataccccagttggacgtttccagttagatgccagctgtacatttctcttcacaggtgagtacattccttggcgctttaagtgatcacgtgccttccgaatgccaggtgcggcgcccgctctgcgctgctcgctgcaactgctcccaccctttcccagggcgggtgctccactgcgccattcccctcaatccagggatttaacttcagcgaggctgggagcgctccgaggctggcctgtccagtccaggcaaatcttgggcaattattttactctgtgtcatagatttgtatctttaaataaactgtaagttctttatagacagcacttgtatcccctgtgctggctagaaacgtgtggcctgctcagttcctcacctacaaaacggggataaaggcacccccttcacaggcctctgcaaacacaggtgaggcaatggctgtgaataagggcctggcacacacttggtgctcagtacaagtgcatcctttcagcacccaccatgtggaatgtctgttggcctctccccagatgcctgggacaaaggcgggctctgccatctctgacctcggcactcagcacagtgcctggcacatttgtggctcaggaagtgcatgcagagttgtggggggggctctcagttatgcccctggaggacagggcaccctccctgctgcaagaagagctggtcctgatgaagggagatcaatcattctctcaatcgtcacgtctgcattgagtattgattgctacggtgtagctgctgctctcttaggcgattgtaaattgatcgtttgatgatttgttctgccatcttctctcttttcctgttaagctgagagatatctaatgctggccccatccttgccgaggatggatgttctatggctgatactccttggaggcctgcaggggacttgaggagaactgaagggggccagggaagtccatgcaaacgttcaattttgctctaagctaagagaagttctttcttcaagtatttgatctgatcctctaaaaacagtggttctcaaagtgtggtccccaggactgggaatctattggaagttcaaattctcaggacccagcccagatctgctgaatctgaaacctggggtgacgtccaccaatttgtgtttcagtgccttctaggtgattctgatgcatgccccagtttgagagtcacttctctggagacaccaggaagaacttaagatggagactgtaaccctttgttgaagataaagaaactcaaaaccaatgcatatgatttgttctgtctaatgcggggaggcagagagagaggagagagacaattaaaatacaccagtgcttccgcagatgctctcatgagtgtgccaggctgaaactcccaagggtccacttggtctcaggcactctaattccaggtgcctcaggggatcccaagtgaagatgtccagatagcaactggatataggatctgaagctcccataagagatggggctaaagatgagcagatgacgatctccatccctgggggtctctggagctgtgagaccacatatggagggaatgcatgcagggagggaatgccggcagacgggcacgggggaggcatgaaggagaactcgagaagttcggctctgaggacatgactctcttgtttgcttggctggtttttgtctgtgtaagaccagagagatgtaagggtaggaaggaagaggtgggagagtttggagatgcgggagtaaggggttcatggacaggcgagttccctgagcagaaagaaggggaggaacccagagcccagaagggccgacagcctcagaaagagaatgagcacagccctccactgtaacaaaaggagggaagaagaaatggctgcagatgccaggtggcagccaggcttgcggatggaaactggagaaaccccagaatggcttccatgttcccagagaagtggggtcacccgccgagggtgagggaggagcttggggtgggagaacagtgcagacatcttgaactgttgttgctgtcattgcccaaccgggttcttctcgcccactgcccaaaaaagacaatgcactgagactagcaggaattgcaccaaagaatttaataattgcagggtcagccgaatgaggaggtggggagagaattctcaaatctgtctccctgagaattcagaggctagggtttttccgatgctttggtaggcaggggcctagggaatagggaatcctgattggttgggctggggatgaaaccacaggagtgtcagcactgtctctgtgcagccaagtcggttcctgggaaagggatcacagtccaggtggtgtcttttggtctgccaaaatgctaaatctgcaaaacatctcaaagacccattccttacatttcacaatagtgatgttatctataggagtagatggggaagttaaccaaccttgcaatctccaattacctgattcaggggcagcaaaccaatggcaggtcatggtttccctctgagtcttctccagcaaagctcaggccctaccatatcctaaccttgtcttatagatgcagttcaatctccaaacaaggaggggtcagttttccttgcctcaaagtttaactacaaaccaaattcctttcatagctctcttggcctccaaacttgaataagcaaaaaaatcaacttagcctgtgaggctagaagcaagatggagtctgtcatgttagatttttctcattacatgtaactctgcaaaggtggtttcattgccgagaggggaagagcacgtgagccagcaaatccagcaacagtgctgggggcagggagggtggcctgaccagccactgcgggagtctttccactcttgcaggcagccctctgctttctctcccgaatgtgcccagaataagtgtcccagacatctgtctccaacctgtggggagaaatttcacaaaaaatggctctgcccttagtgggtccaggcaccaggcaagcttggttcaaatcttggctctgactagaatttaaatggtggcctgggggtggctgaggggccacccagcacctcatctgccatctgcaaagagggagagggacgattacacaccgatgccattagactcagccttgatgtgcccagcacctgtgccacgccggccaacagctgtgggtccacagtagatggtggctgcagctgaagccacctcgtgggctctgcatcagacacctacagatgtgttccttgaaccacatgctgggagaggccccggctcaacctccttttttttgcccaaatccaaagtctcttgaccgtgagccacaacaacgcttgtcagtataggctgaagtggccattccctttaaaaagacatctctgggtgttctaggattccagggtcagctaagctgctaagctggtcttccttaaagaggcttcaacataccgagcctgcccaggtccccagagatgggagtgtggcaacagtggatatggacaaacagcttgctccagctggggagtggaaaagcacccaggctccacagaccccactttcctccccactcttgccccagggtttgcaggaggaaagaaaggagccacatctcacactcagagaaccagggaataaagatgccattcgattgctgaggtcccaaaggaagtggcctgcaaaacgtgacgctgcctcaggcagagcagcttctggcccagagacctgcattacagagcttggaaccggtttccaggctgaacgctgatcaagctgcacttctgaaactaggcacattaacactctcattagggcccaggctcgctacaatacaggcctatttaaatgtaaattttgacattcagcccaggactagaaaagaaatagtttccacacctcagcaatggaaaggagaatgaggattatgaaggaggactttttaatcatgtttactttcaggccatcgtggttctaggtcttttttccttcatggagaatactggatttttaattacccgaagctcagagacagcatcccagcctctcagattccccctcgtggccacagatagtctgattaagtgtaattttgttaaaagtgtagctccaagcacagttaattgacaggggtcctggagaagctgaagctaatccaggaatgaaaacatgtaactctgctgaaaacgaaaggagccctgctcgtctcataaatcacaccggagggagagtgccgctcttggtggctccctcccctgggctccaatcccaagccttccaagtagcccagcgactttccagcaacattagcctatctgagcctcagtttgctcatctgcaaggtcgggcgaggacccccagcagagtgctgtgagtgttcagtgtgcgtccaggagggtgggcacccatgccccacaccctcacagcccctgcctcacccagcacccacagcagcccagctgcctgcaggagccaggaccgagcgctcacttttcttattattggtggttctgcaacccgaggatggcaaccaacttctgcaatcccagcatgcttgtctgtagacagcagagccccaccttcctggaggctgggtgaggaaacaaatggtatcacgcgggtggaggaagcacagccccaccgtcctggaggctgggtgaggaagcgaatatggtatcacccgggtggaggaagcctctccctgggttccctgcaaggatggctcatcccctgtaaggacaccaggtgcctaggggcatcctgtggagtgggaagcagcagaaccaggcttcccccaattccacacatcccccacacaccccatcagcagcgcacagtcaccatgggcgaattgaagacagggccccccgggggtccatggcatctgtgggcaagtccatcctgggatctcagctgagacccaacccagcacctgttaacccctgggtgccctctatgccctcagcactccatgtcccatgggtgtgcacacacacacacacacacacacacacaacacacaccacatatacaccacacacatgcatacaccacacacacaccacacccataccacacacaagcacatgccacacatatacacacatacacacacaccacacatataccatacacatgcatgcaccacacacataccactcacatgagcacaccacacatgcaccacacacacatgtactgcacacgtacacacaccacacatataccatatacatgaacacaccacacacataaacatcacacagtgcacacatacatgcatacaccacacacaccacacatataccacacacatgaacataccacacataccacacatataccattcacaagaacacaccacacacagcacagagtattcacgtgaacacaccacacaaagcacacatacactactcacatgaacacatcacaggcacaccacacacacacacacacatataccacatagcacatatataccacacatgcacaccacacacatacacaccacacacacacaccatacacataccacacacatgcacacatctcataccacatgcataccacacgtcacacacacatatacacaccacacacaccacacataggcatacacacacacacactacacacatacacccacacatacacacaccacccaccacacccaaccatggtaacgcaaactctcgctcggcccccagggctcctactgggctttcaaggaggtccccatgtgtgaagctccggtcccctctccagccctcagagcactagcgtctcaggtacttcactcatatgtgacctccttgccagggtccatgctatccctcagtctctcacggacactggtcaccatacgccagccggggccaagcactggcgttaaacagcagtggtaggccgaggcgggcggatcacgaggtcaggagatcgagaccatcccggctaaaatggtgaaaccccatctctactaaaaatacaaaaaattagctgggcgtagtggcgggcgcctgtagtcccagctacttgggaggctgaggcaggagaatggcgtgaacccgggaggcggagcttgcagtgagccgagatcccgccactgcactccagcctgggtgacagagcgagactccgtctcaaaaaaaaaaaaaaaaaacagcagtggttccccgggggtccttgaacatgttcagaagcccagatgttcaggagaccagccccaacccaccctcatcatcactgatgccagcaaaggcagcctgttgtcctgaggcagctcctgaagggtcaccacctgcctccgccaggctgcccccgcccgccatcagcccctccactgggtgaccaggtgagcaagaccaggcctggctccgcaggacctcaccatccaggagaagctctggagcacatcccagcacagcagggctcagggctgaggcatgaccctctccgttcctaacaccagacagggcgtgcaagactcagggaatgatggggccacagcagggcagggactgagactcagggacctgcgttccaggaagcagagcctgagctttagcaggacagttttgatctagggagttgtgactagtcagctggaaccttagaaaagactcgcggccgggcgcggtggctcacgcctgtaatcccagcactttgggaggccgaggcgggtggatcatgaggtcaggagatcgagaccatcctggctaacaaggtgaaaccccatctctactaaaaaaaatacaaaaaattagccgggcgcggtggcgggcgcctgtagtcccagctactcgggaggctgaggcaggagaatggcgtgaacccgggaagcggagcttgcagtgagccgagattgcgccactgcagtccgcagtccggcctgggcgacagagcgagactccgtctcaaaaaaaaagaaaagaaaagaaaagaaaagaaaagaaaagactcactcatcatagatgtggaactgcaggagcccaggggcaaggggacccacagtgcagcagctgctgcaggcacctgggtccaggaagatggtgcccaaatgcaggcagtggcccacaacacgaagggagtatctgaggacctctgagggataggggctgatcatcggcaacggggaccgagtggcagcagattctatgtcacctgggtaggagatgttcactaggcctggagaacctgggaaggaagaagccgggctgatcaggctgcacagctgtggccaagcagcagggccctgtggagcacagaacacccctcaggactgtccccacttgtccgagatggccagccgtgcaccctcttgtcacagccccggtgggaccaggcgctgatggctgggtgccatctgttctgggagggcacctccgggcccagcactgacactcacctgtaggggagatggggccatgcagtgatatctctggctccatcactgggcacctgtggagctaggtggaatcacaaggcagaaggaggggcccaccacagccagtcggaaatgctgttatacattcctgtttcctgactgagcacttctagtgggcaggactaagctcacagcaatatgggtccctggagcctagcacagtgctagcacacagtagctgcttaataaatgtttgatgcaaaactgcacctgcaccaggaaagccgtgcaggcactatggagcagggttgcagggctggtctcagacaccccagcactgccatcaccaggccctgctgcccagctcctgcccactgctggcagcttgctgagagcaggagctaggcttactgcagccaagtcccaagcacagtgtacagtgcagagtaggtgcttagcatgctttctggaacagctaaatgatgaaagagaagtgccattgacaacacataaggtgcttctccagagcatgacctgggaaagttgttgaaccccttgggctctgtggcttttaatgtgtagaatgttctagaacatgtcagaggtcagataagaggcaccttgggaaatccactaattccaggtcctcttagtctgctgctacctgaacaaggtaaggccgtgtatattcatttaacagacagcatttgctgtgggccttccgtgggcctcacacacagtgtggtggcagaagatagcatggccaggacaggcttgtcacaccagggtgacaatgctcccaatcccagtggctttactgcacaaagtctaatctccctcagggcttcaggtggaggaggcaccactggctggagctgaatcaaccagaacgcacagttccctggagggtgggcactggctcctggaggcttttgctcagaggtgatacacagcacttattctcacagctcattagccagaacaagtcacctgtcccagcctgacccccaaaaagactaggaagtgtggggagcagacagaatatctgatgagcatcccctcctctgccagagagggattaaaaaaaaaaaatgccaagaggctcagagaagtcaagcctgtggcccagggtctcacagcaaggaggtgtcaaaaccaggctgtctggcccaaagcctctccatgtaacaagtgcactttaccggccctcttactgccctgactgatgtgaacagtttaggccgtaagttgccgtcctcctgacgcccacctaacaccatcccacagggagcagaggcgtgggggaaagagaaggggaaatgttacctgggaccaggaagagctcagcagcatgacacactagtgcctgcctgtgtgaacccagcgagcatccccatggaaggacagcagcagctgacagtgctcctctgaaggtcaccaagcccccaagcccttgcaggttacgtggctcagtgctcagcccactagggagcagccaggctgggtgggcccgcattgggctgtggcaggatggactgtgcccagcagagccctgaccacaggtttgcatgaaccacgtggcctgggcaatggggagagtgtcccatgagatgaagcatttgtggaatttgtctgccacagaacagtagaatcatgacttagatgagcaacgcacactccatgccaccctctggatgccaaatggcgccctgagagcctggaacctcagggcttctccaacgcaccctccaggcatggaaagtgcccctgtgtgcttgacctcagcacctccgtgcccaccacagggcctggcatgaccagcactgggcaccatctgggtggaaggagatggagtgaggggtgggtgggcacatggggctgcccagagagcaccctcagacctcctctaagtgtgtgcttccacaggtggagtgggttcggccaaggtgtcagggctccctggacggggctctgtagagatgacagccttttccttgacgacatgttttgcatttctgtcccctccccctggagtccccaaacaccctgcttatttcagaaagaaggacatctagcaggtgttgccaggaaaataaaatggtctagagcaagaattctgaaggaagcaagctctactttgcatatttgtagtaaagggagctgctgcctatgaaattatatggcctcctccctttatagtccaatgccacagtgagctgtgaaatactggaaatttcaagatttaattaaaacccagttcactgcactgaagttcgcttacaaaatatagcaaagattaatgggagatatcaaaccaaactgtttgtgcaagacctgttgagtcataatttatgggaacaagaggaaaaagcaagatcattaccttaaaataaatttactgcttctccgactaagtaaaatggaaataataaaaatccccgggtcagcgcaactgcaccagaatgaaatggcaggccggccaggcaggtgactgtcaatccatagacattaccagggccacaggaggctttgctgtcatgctgggagggcacagggcaagagggaactctgcctctattcatttaatcctcgcaaggactaccatggcaacagtccctgcttttcagatgagcaaactgaggccgagagggatcaggtgacttgcccaaggccataccaccagtgggtggcagagctgggaccaagaccaggccgtctggctcagccagtgctcctgcaccacaacatggagctagccgccttcacgtccatccttggaaggacctgaccatctaggtgagggggggacattggctggacgagcacagcaccggcccgcaaaggttctggggctaggggatagttgagcagtgccccgataaatgtccccgtcctgatccctgcaactcatgtcatcctatatgatggctaagctattgtgcccagttgcctggtcacacacaaatctagatctttcttcagaggtgcttcttagataagactaatgtttaaatcagtagactttgagcgaagcagaccaccctccatagtgtaggtgggcctcatccaaccagttgaaggctttcagagcaaagactaagagtcaactcccgcctcctgaggaaagcagaactctgccagcagatggccttcccactccagctgggatgcttctctgggtctccagccgcccaccctccttgcatggtttcagacttgccagcctccataatggacaccatggctgacccactccaccctgtggaagcacacacttcgaggaggtctgagggtgctctctgggcagccccatgtgcccacccactcaccattccatctctttccacccagatggtgcccagtgctggtcatgccaggccctgtggtgggcaccaaggtgctgaggtcaagcacacgggggcactttcagtgcccgaagtgtgcatcagagaagccctgaggttccagttccttaagaggaacccctctctcctgatccccccctccctgcctctccctctctctgtgtgtccatctgtatgaacatatgtattctattctatttccctggaccaatacaccctgacccatacaccctacagggcagtaaggctctttggggacaggggcatcaccctgggctttcctggtgggtgtagtgcaatcccaagccccttagggagggaggcgaagactcaagggacacagggccacagccaagggactacagcagttaccagaagccagaactagcaagaaggacttctccccagagctccggagggcagcggtcctgccgacaccttgatttgggtctagtgatgactgatttcagacctcaacgtccagagctttgagagaataaatctctgttgtttgaagccactggtgtgtggcggtttgttgcagcagccccaggaaacgatgtcagtggccgtgttcccaggagggcaggcgtgctctgggcttttctcctcgggggtgggctgtgtgcttgctatcgagaaaaagtgagggcagcctgcttggggtgccccccttcacccaccccagagttctacaagtctctcccctgatgccccactgcctcctttccttctgggacagagctggccatcacctcctcctcccgacactgccatgcagcttcccagcctgacacagtgccgccaatcccaaaacaagcacgggttaacctatgtggctgggagtgtttgcaggaagatctggagagccacggagcccggcagcggggcatgatttcttcctgagtcagactggaggggaggatggcgcctcttcaatcactcactctaacaacccagagaaaccctgcagctccaaagcaggacccagtgacaccccacccagtccgcactgagccaccctgggtcctgggcccagccctggtgtgtggacagctgcccaggatgcctcaccagccccactcagcccacctgcctgtgcagcctccaggagcaggacgtgcaggcagcagcttaaactgagagtcccggggagtagggggaagtgaggacattaaggggcctgacctcagaggcatcatctgaatggccacactgcctgccccccatgcactctgaactcacatgggcttcagggaaccccgtgacttggggtgacagcaagtcattcaccacagctggatggtgtgtgagagcgaggcagtgtgagtccgtgaggggctccatgtgctgctctcatcctgagagcgacaagaagccactgaaaagcattcagcggaggagcgtgtgtcccagtgagatggcagcctcccgggagagagctcaccccatgctgtggccacagtgaagtaacgctcgtcaccaagagcagctgcgtgctgtgtgcactatgacacactcccaggcatcaccactcctcgcactggggactgtcgccccatccacactgtcctcagcggcatgcatgagaatgtctgccacacaattgctcccagatgcccaccagtggggaaatggatagaaatgatgtgggtgacaggatgagatgaagcaacgaggatgaggtcacctttgagggaaggacggagtggtgatcaggaaaataggagacacgaaaacactcttggagaagaaaatatgatgaaactttgtttaaaagtgccagaaagatttaaaaataaagctaaggggatctacaggaaaggagagctgatgcaaggaagcacaagaaaaccaccctcccctctggagcacacagcattcaaggagccaccttggagcagagagtagccctcaccagacattgaacctaccagtgctgtgatgctggacttcccagcctccagaactgtggggaatatatttctgttgtttataaattcaaaacaagaaaagaaaatggaaggatggatccaggatgtctaacacaggatttggaaggcaagaggagagggctgcagggcaggagctcccagcctctccccaggcagcccagcttcccccttacaatgagaagcgagcagggacgccacctaaaccctgtgtcgtagcacttccatctcccagagagatgggccacacgcaagaggtccctgcccagaaacgtaaggaaagtagttccgtggcctggattggtaaagccaccatgtgtgagcaccggtccaccttggccaggggtagagggcctgtgagagcatcgacacttgctctttcatccaccagccacacactgagagctcggtgccgggccgcctctgtgctgcagactgggatgcactggcatccaacctgcaaacactgacagtctagtgggtgtcctgtggccacagctgcccgcatgtgagcatcccgtgccataggaaaggtttattcttcagcctcgttggaactagaaaataccacaggacgtcactgggaattgaacaatgacgtgaaatcttgagctcttgaatttctcgctttgcaatcacttttgcacaaccaattccctgtggttgttgtcttctggggaaaaggagacctaactacttcgtaagcttctgtttggtttttacatttaattaactacatgcttcagagcacctgcaccatgaatgaacgtctcactggggaggcagcagaaatggaaggagaaacgtgcacaaaatggaaggcagagaaaacgcttgagggaaacgtgttattttcatgaggctgaaacacctcagcgtgtgtgtggtggggaactgtgctcctcacccctggagttgcttccctgtggagggaccctgctggtgttgacccctggccggccccttcagtcacttgtcccatggggagaggagaggccatcctactgtgtggctaggagaggaaaagtgctctggcctgccctctgggcactccgccagactgcagtcacccacgggtagccagcatctgaggaagccggtgcacgtccagcacaggctactcactgagtcccctgaagctgagatttagcattagaaaactcaatttttaccagaaatagagtccaaatgttgacattcacaatccctctacttgcctttccctgagctgattcagaacttgggatgtggagaagggagatgagtactgggcttcctcatacccccaaaatttggctaacagggaaaaccctcaatttctccagagtgtgtcttgggggtcttagctccatcccggtattagctctaccccttccacagccacaggctccccacgccctctgctccaccatcctggagcaagtctcccgcaggcaccactgcttcacgccccacccaaatgctctcctctgcagaagcaaacagtgccctccatgaggaggctcccaccacagcctggagctcaataactgtgtccaaccacaaaggggccagcccctggctgcatccgcctcccaagtcctgatcaggacttctcacggcatctggagaaggacccatttcattcactccgctacgttgcagacggatactttagctaaatataataaaaataaaacactagaaaaataaaatgaaaaacaaagatacataaaatacaagccaaaaatcttcattaggtctaacagatgtaaaattactccaaagaattactacaacattttctagatggtgtgtgacctctgttctgtctttatctccttgtaaacagcccatgctgaggactaatcccatcagaagcccatactgtgagtggaggtggcctgagatggcactgtctgccagggaggaaggagcacacagccccgtcagcctctgcaggtgagcttggcctgcatccgagctcaaaacacaccaggcaatctgaccaaacaccctgcattcattccaaaaacaaattgcttttctggagccatgaaattagcttctggagtaaaatattaaattccactggcaaaacagaatgatttatgctctttacaaaagaaaaacaacagtacagctttcgacttctcaaaatgatttaaatctcaacttagtttcaacccagagggaaaatacaaaataaatagtaaccacaagaagaactgctgaagtctttcccctccttcctcagggggccgggtggggagaagattgcagcatgttgcgacccttgtgtgttcttcaaagtccaaagccagactccctgggggacacttcaggaacctcagaagccctatctgctgctgtctgtccatcgccctccccacacctgtgcatcacgtctgcctctgatgggattggtctccagggcaggagctgagtgagggccatgagcagttgtgccttgtggccttggtcccttttctacctggaaggcactgcctgggagcagccgcagggcagatgtggaagcgccaccaccccggtcagggcctgagattttcagtcttggcgacaccaacagtggaccgggcacaccctctccaggtccctctggcttcaaagacaagcggcatcattccactcccaagtcaagcagccatttagaaagcagctactgagaggctgagagctgagcaaagcctctggctacctctcaggattgagggggaaaaggcagagttcagggcctggggaacactacaggttccccaaaggggcacagtggatgagaaaaaggctcacctcacaaacagtggcacagcttcaagtccattcagacttagtggtcttcctcctactctaaaagcctgccaaaaacaaacatacaccctccctggaggaatgtaacctccaagacttcaaatcatgcctgtgatcttatgatacacatgctggccttcaataggaaaaaaaaaaaaaaaaccctgtgctaaaagacaagaagtgactgaaattaaaaggaaaaagacattagaaacagaccactggagacctaaatattagcattatcagaaatggatataaaaatagctgtgattaatatgttcagtaaatataatgatatggaattttagcaagaataaatcaaacaaaatttctaatttaaattttcttccatgaaaaatgaaaacatttgtccacagaacagcttatacaggaatgtttacagcataattacccataatagtccaaaagtagaaagaaccccagtgcgaatcaatgggtgagtggataaatgaaatgcagtatatccaagcactggaatattatgtagcaatgaaaaggaacaaagtactgatacatgctatgacatggatgaaccttgacaacattatgcttagtggaaaaacattgggccgggcacagtggctcatgcctgtaatcccagcactctgggaggctgagacgggctgatcacgaggtcaggagattgagaccatcctggctaacacagtgaaaccccgtctctactaaaaatacaaaaaattagccaggcatggtgatgggtgcctgtagtcccagctactcaggaggctgaggcaggagaatggcaggaacctgggaggcagagcttgcagtgagccgagatctcgccaccgcactccaggctgggcaactgagcgagactccatctccaaaaaaagaaaaaaacattgacattgtgcttagtgaaaaacattatgacaaccttatccttagtgacaacattatgcttagtggaaaaaatccagaaagctatatgtagacacaaccagaaatctatatgtacagatttcacagattaaaagagtaaagtcatatgagcatcaacagatgcagaaaatgcatttgataaaacccaacatccattcaggaaaaacaatgttagaaaactaagaataagaggtaactttcttaattgaataaagagtatctacatttcctatagcaaatattatacctacacagtggaatactgaaaacctaaccctgaaatcaggaccaagaaaagatgcccgctaattaccctaattaccacttctacttaacattttattacaggtactacccaatgcccaaagcaagcaaaaaatagcaaaaggtttaaaaactggaaaggaagaaataaaactgttaattcatatttctatataccagcaacaaaaaaattagaaaatggtatttttaaaaggctgtccacttacactagcagccaagaaatatcaaatgcctaagactaaatctagcaaagagtgagcaagtcctctacacacaaaccacaaaacattatagatggaaaccttaaaaagatgcaaataaatagtcaataattcccacagatggaagtctccataatgtaaacacgtcagttcttcccaaattaatcaacatattcagtgccctccagtcaagacctcagtctgcttctccccaaccctgtcagtcttggctgtgagctgagcacagggccactagggccgccagctccatgcctggggagcccagggactggtttacaagttctcaggtgttacttccaatcaccagacattcctggcatcatcttcaatgcggtatcttgtgcatttcctggtcagtcccttatatacttaccttctccatcatgccctgaggacactgcctgcagccacctgccccattccagtgggcacacgcagtgtccaggccccactctcccctaaagcagcagagtctggaatcaaaatggcccaagttcttgtcccggctctgtgagctgctcaagccatgcccctcctgatcttgaccttgcaaggttgtgatgagaattcagtaagatattatgcaaggagcacctggccagttacctgacacatagtagatgtttcagagaggagagatgagagatggtaggaaaacccgctttgctgtgggagctctcacaacttccttctgggctgtgagatctgaggttctgggtttaagtcacactaaccaagattttcctctccctcctgaaatattctcagcccccctgtgcttgtctgtccaggcttccccataacacaagtattctaaacatactactctactccagcccaatgtagagtaaaatgaagtcttcagagtacaaatcggtggcaggtcccacccaattaagactgatttcatgtgaggatcttgagagcctaataatagccacatgatgttgcaatagctttggaatccttccttattccggacctcaacatctgctttggaaacatgcttcttaggtacagtttaggtttgctagtttatttatctcttactgagcatctgctactcattttacatgccttgtctccagacctcaaaaaaactttacaaaattaggcattaatattcccattttacatatgagaaaaatgacattcaaagagggctggtgtcttccccaggaccacacagggaacaactgctgcagctgaatttacacacagtttaatcccacgtcatactgcctcccaccaccaatagcttcaggggtgtggtacagtaaaccttagactgagaacttttccagttctacccaacaaatcttaaaattccaaagggtcaaacttttccaagtcatttaaccacatcccacaacaaagttcaaaaaggaggagttcaaaccatctagcacccaacaaggtaaaattcacaatgtctgatatccaatcaaaaattacaaggcaggctgagcgcagtggatcatgtctgtaatcccagcactttgggaggccaagatgggtcaatcagctgaggtcaggtgttagagaccagcctggccaacatgccaaaaccctgtctctactaaaaatacaaaaattagctgggtatggtagcatgtgcctgtaatcacagctactcaggaggctaaggcacaagaatcacttgaacctgggaggtggaggttacagtgagccaagatcacaccactgcactttagcttgggtgacagagcaagactctgtctcaaaaaaaaaaaaaattacaaggcagataaagcagaaaaatgcacaataaatcaatcaatcaaaacccattcagaactgacagatatatagtcatggttagcccctcacttctttcaactctttgctcaaatataaatttcttcatgagaccaaccccacctatgccatttaaaattgcaacatacccactctgtatttttaattgacaaataataaattctatatatgtatggggtacaatgttatgttttaatatatgtatacattgtgggatgattaaatcaagctaactaaaatatccatcacctcatctacatatgattttttgtggtaagaacacttaaagtctactttcttggccattttcaagtatacaataccttattattaactatagtaaccatggtattcaatagattgctaaaacttcttcctcctgactaactaaactttgcactctttgaccaacattatcccaatcctcctccaccccagcccctggtaatcaccattctactctctacttcaatgagtccaactattttagattccatatatgagtatttgtctttctgtgtctggcttattttgcttagcctagtgatatccaggttcatccatgctgttgcaaatgatagatttttcttgttttctaaggctataaagtattctattgtgcatatacatttctttatatattttctttatccattcatctgttgagggacacttaggttgattctgtatcttggctattgtgaatagtgctgcaataaacataggaatgcaggtatctcttcaacatactgatttcaattcctttgaatatatacccagaaatgagtttgctggatcacatagtaattctatttttagttttttgaggaactttcaaactattttccataatgactatactaatctacaatccctccaacaatgtgcaacattgtgcaatgagaaacatcccttttctctacattcttgccaacacttataacctttcatctttttgttagcagccattccaacagccatgaggtgatatctcactgtggctttaatttgcattaatttaacttaacacattttcacattagtgatgctggagattttttcacatatctgttaaccattcatatgttttcttttcagaaatacctattccaatcctttgctcatttcttaactggatttgtgtgtgtgtgattgagttgcaatatattttgagtattaatcccttatcagatgtatggtttgcaaatattttctcccattctgtaggttgtcttttcattctgttatttccttgctatgcagaaactttttagtttcatgatatcccatttgtctatgtttggttttgttgcctgtgcttttaagatactactcaaggccaggcgcggtagctcatgcctgtaatctcaccactttgggaggccaaggtgggtggatcatgaggtcaggagttcaagatcagcctggccaagatggtgaaaccccatctctactaaaaatacaaaaaattagtcaggcgtggtggtgggcgcctgtaatcccagctactcaggaggctgaggtagagaattgcttgaacctgggaggcagtgattgcagtgagccgagattgcaccactgcactccagcctgggtgacagagcaaaactctgtctcaaaaaaaacgatactactcaaaaaaaccattgtccagatcaatgttttggagacttttccctatgttttcttctagtagtcttagagttttggatcttacctttaagcctttattccattttgagtcgatttctgtatatggtgtgagataagagtccaattccattcttctacatgtggatatccagttttttcaacacccttaattgaagaaactatttccccactgtgtgtttttagtgcctttgtcaaaaactaattggccataaactcaggtttatttctgagttctccattatgttccattgttctatgtgtctgttttcacgccagtaccacactgtcttgattactaccgctttgtagtatattttgaagtcagtttgattcccccatctttgttctttttgttcaagatacctttggctatctggggtctttcatggtttcatattaattttaggatttttttttctgtttctgtgaaatatgttattgagatcttgatagggattgcattagatctgtagactgctttgggtactatggacattttaacaacattatttcttccaatccatgaacatgccaccccagatttctgatttcctttacctgatccttaatagttactcatcaaatttttttttattattttttaagacagagtttttgttctattgcccaggctggagtgcaatggcacaatctcagctcactacaacctctgcctcctgggttcaagcaattctcctgcctcagcctcccaggtagctgggattacaggcacccaccaccacacctggctaatttttgtatttttagtagagatgaggtttcaccatattggccaggctggtctcaaactcttgacttcaggtgatccacctgcctaggcctcccaaagtgctaggatacaggcgtgagccaccatgcctggtctcaaatttttttttttagtgaaaaaatgactctaccataggaaatattttccagcattggtgagactaggaaaatgttactgtttatgcattcgtgagctccttttttctgactataggctggaaaaaaacaaaaggaaattgacaggacaggaagaggtgcttctgtttaaccttgggttatttgtctttcccaaaaacttcattaaaaaaccactaaaaatgttaatcttcttagaggataatagaaaagagatcatctggagtttataaagcatcttggttaataggttcattttaataatagctgatcttttcatccacagagaggctgttctgccagctcagcaaatctcctcaaagactttccagggtgtactttatggctaagatatcataaaacacagaaggtggttgccattctcagagaacaataacaccctggcctaaaacctgacaagttatttgattcattttataaattcgtttttataaacttttaagcactgctgggccagaactcatcaacacaacttccagttcacagagggaaggatttgcccaaggcatggctgtcacagtgaaggaactgcagacacaggaccagacccaggcctttcctagatgggagtgcacatagagcccaccccaacagaccctcaccggctcccagaggcaaggggtcatctcagcagcatatccatctggcctccagtctcctgccaggcctaccatattcagctccctaattcttaaagcgctccaggtttgagccccttagccttctttcttgcagagtccccatcctcacccccaaaccttacactttacactgcagacccctggcatgcttgtatcctcactctgcttagctgttcctatctctacaccattgttcacatgacaccttctcttaggaatgctgtctcccaccctacaagtgttgcaacctgagccctagaaatatagagatgaacggaaaggtgccccctgccctctgaacagcaccaaggtcagacaaccagaggctctgcccatcattccccagggctggagaaggcctctgagcaaacaaatgtcagccaccctctgggaaagtaccctcaaaaacaggttttttgtccacagagggtcaaagcgcaaagacataaagtgtttagaaaatataaaacactaacacgtggattccttattggccacagctttgcctttcacgagaccatcccagacacgctgtgcctctgaccaaagcatgaagtagcctacactctacgccacaccctgcattaaagctccttatggactgatcctgccagcgaacatgtatgaaatacgcactaaaatagccctgactatgtgtccaatacagaatgagaagactcaccctaggcttcagggagtccacagcacagagaccagtcagatctggacaagtggtgctaattcacagcccaggaatggagtgtggcttgttgatctgcacacatctcacccaattgttctaatggggtcagctcccttttctgggtctgtatcagggctcagctgcctgtagctcactgtggccactgggcagctgccccagcccaggtcaggcctccgactggccacaaagaaacctgagccccaggttgtcctcagctctgctctgtctaaccatctatgcttattgtagtttatttttcgttttaattttattccaaaaagggcaaaattattactttagttggcctgcaaataagagttaaatacttattaagttgtaaaaaggagtatgttataaaatgaattctaataggcttcttccctcaaaagaagcaatttaatgaatacagtttgacttctgttaaattaataatgtgcccaatcactcctgctttgcaagaagtgactatatgtagatgatattattgtaggacccaatttttcctgcaattaactgcatatatttcctgacagactaatttatgtatgaatgctttttaaaagcaaaggcattttgcatgtaattgtattcctttttaatccatctgttgataaatttgcgtgtgtctctgtttattggctaatgcctccctctgctctaggacgacaggcacaggagtcaaaatattttggggatgaaataaataataaagggtaattgaaggccagatgtaggctgctgggaatgtctccatgggtgtggtgaatcccacagtagaactttttactgctgctgagtggagagtgaataaaaacatgattaacattgttgctctggatttgcttgtttgcaaatcatgctctgtagcaggtaaaggtcattacaagtttgctgcactttgatttccagtgtcatatttggccctcttcactgcaggtccaccaaaagcacagcagggcagggtgcattgcttgctgcagcaagggaggctgcaggcacggcaagccccgggggacggtgatacaagggagtgagtccagaggagctggctgtaggatttgagcggaacttggtgactttgggagagttcaaggaaccggggtctgctgttaggaagtagaggcagtccaaggagcaggcatcttagtaattttcatctaagaggtgagaagaacaggccaaggctcagtggtcagggaagaacaagaatcagtggagaagccaggccatgccatggcagtctgggagccttgtctgcccatctgtgtgggtgtggctccagagtcttgttcccatctcgatccatcacactcgcccacagcccttcatcagcctggctattctgtgcaagtgtgtgctctgcagggggccccacagcctggctggcggcaatgcgccagcccccactgtggggctgcatttctgagcaaatgcacagttaagacgggcttcatcagcacgtgtgggtggggacattcagcctcggaatggagctggagggagaagaaacctcactgacccagggcttgagaggcagagctagagacccattgagtgcaggagcgtattgccaacacctgctgtaacactctcgaccgttctgtcagcaccagacccactttacagatgaggaaactgaggctccctgagatgaagtgaaaggcccaaaattaacacatattttgcacataattacataattaggcagataattacattataggtacataattacataattagatgcataattaagcaataattacatgattagatgcacaatcaggcatataattagcaagcgggctggcatttggcccatgggggtctgactctgatcctcccatctttctactgcaccagtgtgcctgggtcaggacccaggacgcgtgcaggggtgctgctgggcacagggaccctgtgagtatctgttgccactcactcctcagtgatggagcaggaaattgaacctcagatcacaaagccagtgggatccagcttcaggggtgagggtgggggtctggctcactgcagagcctggactcattctacttaccaccgccatccctgagaaagggaagaggcccttcctgaacacaccagtggcctaggcactaaggcctggccctccatcctcatctgcagaggcagatactcacagaggaaaaccagggctgggaccacagaaggctggggccctgtggctgtggaaggagcccccagccaagcctaaaggaagatgtttcagggcagcttcctggaggaggcctcctgagctgaaggacagagagcagctacctctgaagacctaggaacagcatgatgcatttaagaaacagcagccacagggcagcctttcctgtccccatcattgtgtgacaaatcgaattctcagggaaggcatagagtgagcaagtggtgcagctagcactcaaggttgggtccacctgtgtccaatatgcacatttgttctgttgttgggctgcacacaacagatggaattgagctccacttcgagatggtggaggaaggatgaggggagactaggccttggctctgccactagcccactctgtgtccttggtctctccagatctgaagtggacgatggcctgagtccatgctttcacaccatgttcacagagcactgtggcctcacaggagtgtcaaccctgggaaggctcagccacgcatcccagagcctgctccagtctggccccgtgctggagttgactttgggatgcatctggctctgctgccatctctctgggaccttcctgttcagaggagcctccgcgactggccaccctcattcaggctccccagtctcctgggtcccagccaacaaggctgatacagccatgtgaggttcacctgagtgcctgcccagcacacgggcattcatgagactggtctggcacacactgccctctgctcttggcctttcctgcccacctcactgctgcctccacaccttctgtccggtctcacccccatgaggccaagtagcttagggtgccctcctgtcagggaatttgcattttattaggataattgaatactttgtgacccaaataaatgggaagctccccggccacacagcctctgccaaaaggaaggaccccaggttctccttcagccatgaatgagactttgggatggtctttagcccagaaacacacaccctgcagggcttctggggactcaggaaccagccccctggactctcagacggggaagtgcctctcccaacccctctcagaggcccccgtttggctttccatgctggaggggaggcccccatcctgaccacagcccagactcccatagcccgcacccccaggggttcgcctaaaccccagatggcctccaagattcaggcgccaggcgaggggacagggcagggatgtgaggaatggtccttctcaggaatgtcaaattctcaaggacccctcttgctcagccaaggctcacccctgtgccgccggcaggggagacacccctgtcacaggctgtgctcctgccctgctggccccagtgtctgaatcactacctctcagcactgttagacacacagctgggttacttttcctctggctccttttgggactgaatttaatcttgcaatttacattttctgataaactattcctgactttgggtaaaagaccaaggtcagattagaatcctttccctctcacggtaagttagtgctttgtggtttggtttttgtttgcttgcttgctttgcttggtttcatttaattttgtctttatcttgaaactcagagttgcaaacctggaccagcagctggctcctgtatagcagaggggaagtggggcctcccttttctttccaaattactgaaagcataaatcctgttgggacggcacccagcagagagcaggacagcagaagaaagggaacggagtcttctctgattccacagcaaagtgctagtggccgaaggcttgaacttgccaaagcactccggtgaactcacccttgagtgcaggcccctgtgccttcctgaacaccccctgaatggtcctggctctgaggaggaggggagcactgtgcctgggggatgaaggagccggcgtatgcaaagaagctatcagcagttggtgagaaaaactttagctgaagggctcgtgttgaattaggtgtcatggtcaggttagacagaggcacagagagagagagagaaatagagacagagacagaaacagacagagacagacagagaaacagaggcagagagagagagatagagacatagagagagacagaaacagagagacagagacagacagagacatagagagacagagacagagagcaaggggataggagagggcagcaaggctgagccgccgagcgaagaggaggttggggtggcagccctgtgcatgcggctgtccttcccagtcctgagggtcccctcccgcagcctgtcccgtccccacagctgtcttacgcacagtagctgagaaaattgagacactgagattttaagtaacttatttaaggttgagcaaagaatatctgaccccaaagacatcatcacttgttgatttttcaaaacgtcagtggctaaagctcgaagtggaatcaatagggcggcagccctagggggccatttttcctttcacctgtgcctttgtccactcatcagtggctgaaagtgccccagcaccgtctgtgccctcggagctcccgggcacaatacaccctcctccatggggatgtgtgtcctgatggccaggtatcacctgagagcctcacagacctcagccagccccctccttgagtgcttgccctccagtgatctggccccttttttcaataactgagaggaagcccggcacacaggctgccttctctctgtcctcgtgctcgtgcatgcctgccaggagagatcctgcatacagacaacacacaggcagcgctgggaagggctgtcctgcttacagctctgcgctctctaggaaacactgacagaggttgaggatggggtggcttccaccggcctgatcccatctggatcctgggtcctgctcagtgaggcccttgatgaagccggcagaacaaagactggagggagagcgtccccaccccagtaatgaggggtaccacagtttgcctgtgtggttacggatttggttactggcacaggttaggtggctcccacctgctgcctgtgaaatctggggcaagtgccaccatcctcctcacctgcaaaaccagggtgacaggaatgacacctcctgagactaatcagacagcgaggctcagcacctagcacgccccggcatggaggagcccacacagcctgttattattattaggcacaaacaaggccaggtgggttgattccatctgtacttcctccttctcaggaacagtggctgagaggctgttctgttggggtccccacactatctccagctcttgacccttgtgtccaggcctggcgcacatccacagcctgatcctaacatcctgtgtgcacacagcgtgcgagggacctgccttcttgctccagctctctgtggctcggtggtggccgggctcaaccaccctctctcccagggtgggggtggcttctctgatgtctcatgggtctctcctcctcccagggttctgttgctcccttcatgagggtagaagcctccttccacttcccttttcagggtactcaggtgtcaccagcagcagcctggctttgacagcctgggcaccactgtggggtccagaaattgcagccatcctaaacctgcatctgtgggatgggagtgtgcacgccaggtcgtggagggctcctcgtcctgtggctcatgaagttgagaaaggtgtttgcaaccttgggaccccactgcgagcattgggctccattccaattagaaaagccagggagcttgggccgaccctgcctttcctccatcagtgagcagaagctacatgtggcttgatatactgatgcttcttacattgtgtcactcaaagcacaataaaaccagtggcttgaagctgcattgtttccagaccatacacacacacacacacacacacacacacacacacacacaaaatcacaccaaagtccaggtagaatacagccaacttacctggagagttattcacattaaattgaggggtttatggaactaaaatcagtatactcacacaattctctctcataataacatactggggaatgggtgggtgcagaattgtggaattaaatacatttcttgacaataataatacagtctatctgacactatcaaaaatgaaatgatatctagacataaatctaacaaaacatattcaggatcagtgcactggaaattagaaaatgctgatgaaagaaatcaaagaaggcttaaaaatttgagccacagcgtgctcatggattagaaggctcagcataggaaagatgccagtactaccaaaactattctacatgctgaacacaattcctaacaaaagcttagcaagagtttttgttcaaatagacaatctcgttctaaaatgcatatacggaaagggggaaaaataaagataagaaagtgggaggaatcactcttcttggtgttaaggcttcctgtgtaaccacagaaatcaagacagtatagttagtattggcagagacatagacacattgatcaacaggaaaaaaacagagaacccagaaatagacccaaacaaatagacccacatggatgtattataaaagtggaaaagcaaattaagggaggaaggaccaccttttcaataaatggtgctggaagaagttgaatctccataacccaaaacatgaacctcaacctaagtcccacaccttctataaaaattaactcaaaacagacaagtgtacaatgaaaaattctaaaactttaagtgaaaaaatacaggggaaaatctctaggacccagggctaggggaggtgttcttagaattgacaccaaaagcccaatccacaaaagaagacaataaatcaaactcatcgaaattaaaaatgtctactcctcaaaaggtcacatgaaagattttttttgtaaaatcatttgcagaccacatatccaacaaaggacttgcctttagaatacatagaaagcaaactcaacaataaagaaaacaaatcaattagaaaataacaaaaggcaagaacagagagttcactgctgagcatatacagatgtcaaaaaaaaacacatgaaaagatgttgaatatcattagtaatcagaaaatgcacacttaagccacactaagatatggctatatgcatatcagaatgattaaaatgttttaaatgataaaaccaaaattctggtgagtatgctgagaatcatacactgatgctgggaatgtaaaatggtacagccactctagaaaacagtttggaagtttctgtgaaacatgtgatggtagttacctacacatgtgataaaattgcctagaactatatgtacatgtgcacgcacacacgcaaacacatacaaatgagtgcttgtaaaactggcgaaatccaagtaaggtctgtgggttgtaccaacgttaatctcaggtttcatattgcactatatttatgcaagatgcattcttccttcaaaagccatccattaacattggagggggctgcgcaaaagaaataccgtacccgccccccgacattttttatagttccctgtgaatctacagttatttcaaagtaaaaagttctttttaaggagcaatctttttcagagacaaataaagaaaaaaactattttctgaagactccagcaatcgagttcctagatcaactatagatttctctcgaattctttgcagacacttggagagagataatagcaaaccgtagcctgagcacaatgagatggggtggtctgggggagggagaccagtcatgtctgagcaaatggaatgcctgttctgtggtcatgacccactcgagctttttgaataaatgtatgactcccctcgatgggcaagctggggcctgagcctcaggccaagctttgaccttctccagccacacagctgggtgctgctgctgtgtctcctttcccttcctagagcatctctgggaacttagggagcatcttacattatttaaaaacatggcttcaggctttaatcaatgaacctgcagaggacaaacctggtttccacagaaatccggatggagtgtggtctgctcatgcaatgacatcttctgcagcagcgttcttgaggcattagcacagtatcggagtgagaaaggaagctggcctaggcttcacagagtttgctttaagcataggcttggctaattccattctaattaaatttagatagaaccctccaccactccaaaaatagaacaaaagtaaactctaccagctcaaaaattctgccatgagacatgtactctagtttgaagcaaatgttctcaacagagaccttcacactgggatggggaggcgtccctctgtccaggggacctcagagccattttcctctaagctgacttcatttttttttttttttttgagatggagtttcactctgcctcacaggctggagtgcagtggcatgatctcggctcacggcagcctccacctgctggattcaggcgattctcctgcctcagcctcctgagtagctgggactataggcacccaccaccacgcccggctaatttttttgtatttgtaatagaaacagcgtttcaccatgttggccaggctggtcgcaaactcctgacctctggtgatccgctcaccttggcctcccagagtgctggaattacaggcgtgcgccacccccgacttcatatctttttaaagcaagaatgtgagtcccttgcttctactgctaaaaaataacaacagccaaattctatcaagcatctactgtgccgggcactctcacattatcatgcccactttgccaataaagacccctggattctgagtgataaggtgatctgctcaaggtcacactgccagtaagtgctagagctggactctcacccccagctaaccctagtccaaagtgcatgctctttccagccctccatttcctaggcgcccagcactgtggtcaatgttatgaaaatgagaacaaaactaagggccgtgcccttaaggagtgagagccacatatgcatgacaatgcaagaggagtcactggattcagcgcatgtacactagagcatgagaacaagacaggttagaaaagggtggtggccagagggaagggtggctggagaggagcagcaccttggagaataataatagcacttgcgaagtagcaggtagggtgggtatggcatggttattgtactgtggtgccgaagcttgaacattttcactttatttcattttcttttctatctaactttgacttcccaaagcaggtgtccctgaggatgggaacaagtcagtatatcagggaagctataatgttcattatactgtttaatatattttatattttatttttgagaaaaagtgaaacatattttccaaccccactctggatgtagaacagctgacctgccaggcgagtgggtcaagcagcctcatgataaaagcagtcatcatttattgaagaaaatgtgtggatctttcgttcactcacttatttatgcccttttttccaaaaggatttcagggagtgaacaaacaccaccacgtgctgaggtttttacactggtttcttaccaccatgcccccaacatctctgggaggtgcattcagttgtccacatgagggcaagggccatgcacaacatgctgtctccaaactctgacatgagggaaacaaggccacctactagagtccaactacatatcacatcacaaaatatggacaaaaagaaatctaactccatcttacagggaaagaatgacccactcaccaggatgagattatctgactaaagacaattagttacacaaaggttatagtttatggtcctgaaggacattaactagttttgtatctaacccagcaaacctgtcctaacatttctttatgaaattacatataaatacctagctcctcaaatgctccttggactggttttcacattttactgcctccatcattaactgatgagctaaataagctctttgacatatgtttgttttatatttgcatcagtcatgttttttttaacttttattttactctcaggggtacacgtgcaggtttgttctataaacaagctgtatgtcacagaggtttggtgtacagattatttcttcacccaggcattaagcctggtagccattagtcatttttcctgattctctccctcctcccaccctccatcttccgaaaggcccccgtgtgtgttgttcccctctccatgccttcatgtgttctcatcatttagctcccacttataagtgagaacatacggtgtttggttttctgtccctgtgtaagtttgctaaggataatggcctccagctccatctgatatgtccctgcaaaggacatgatctcattctgttttatggctgcatagtattccatggtgtacatgtaccatattttctttatccattctatcattgatgggcatttgggttgattccatgtctttgctattgtgaatagtgcttcatgaatgtatgcatgtgtgtatctttacaacataataatttatattcctttgggtatatacccagtaatgggattgctgggccgaatggtatttctgtctttaggtctttgaggaatcactacactgtcttccacaatggttgaactgacctacactcccactgacaagcatagaaacataccttctactccacaaccttgtcagcatctgttattttttgactttttaatgatagccattctgactggtgggagatggtatcttattgtagttttgatttgcatttctctgataatcagtgatgctgagcttcttttcatatcattgttggccacatgcatgtcttcttttgaaaagtacttgttcatgccctttgcccactttttaatgaggttgcttgttttttcttataaatctgtttcagttccctgtagatgctggatattagacctttgacatatgcatagtttgcaaaaaattttctcctattctggaggttgtctgttcactctgttgatagtttctcttgctgtgcagaagctctttagtttaattagatctcgtttgtcaatttttgcttttgttgcaattgcttttggcatctttgtcatgaaatctttgcctgtacctatgtcctaaatggtatggcctaggttgtcttccagggtttttatagttttgagttttacattgaagtctttaagccaccttgagttagtttttgtttgcagtagaaagaaaggattcagtttcaatcttatgcatatggctagccagttatcccaacacgatctattgaataaggaatcatttccccattgtttgtttttgtcaactttgtagaaaatcagatagttgtcggtgtgtggtcttatttctaggttctttattctgttccgctgatctatgtgtctctttttgtaccagcatcatgctgttttggttactgtagccatggagtacagtttgaagtcaggtagcatgatgcctccagctttgttctttttgcttaggattgctttggctatttgagctctttattggttccatatgaattttaaaaatggtttttttctagttgtgaagaagatcagtggtagtttaatagaaatagcattgaatctataaattaccttgggcagtatggccattttcatgatattgattcttcctatccgtgagcatggaatgtttttccatttgtctgtgtcatctctgatttctttgagcagtggtttatagttctccttgtagagatctttcacctccctggttagctgtattcctaggtattttattctttttgtggcagttgtgaatgggactacgttcctgatttggctttactatttttgatgtataggaatgctagtgatttttgcacattgattttttatcctgagactttgctgaagctgtttatcagcttaagaaggttttgggctgagactatgaggttttctagatatagtatcatgtggtctgcaaacagggatagattgacttcccctcttcctatgtggatgccctttatttctttctcttgcttgattcccctgctttgccctttttttgttttgttttttgttttttgttttttgttttttttttgagatggggtctcactctgtcactgggctggagtgcagtggcgctatctcagctcactgcaacctctgactccctggttcaagtgattctcctgcctcagcctcccgaatagctgggattacagtcacgtgccaccacgcccagctaatttttgtatttttagtagagacagcgtttcaccatgttggccaggatggcctcgatctcctgacctcatgatctgcctgcttcggcctcccaaagtgctgggattacaggcgtgagccaccatgcccagcctttgcccactttttaatgaagttgtcttttgcttgttaatttgttcagagtcatgatttttaaccttagaaaaattaggccttcacaagctagacatgaaaacacaaggtattgtctctggagcaaacaagggctttgtgggcaggcagatgtgggctcaagttaaagtcttgctacctaccaatcaggacaatgtgcaaattacttcacctcagacatctccagcttccacatctgcaaaataaggataatatgcgccttgttaatttgttgtgaaaattaaatcagataatacacaaaagcatttaattcattgcatgaacccagtaaatggcacctattactatcataaatatggataatattactgataaccattggattatctgccttgggaccacattgtcccttcctatacttgattagaccaggcatggagacacgggaccgaaatttgaactatagagaagtgaagttggagctgaggctactagtgctgttcctgggcctctttcctcctctgttaagtgagaataaagtgaaactaaattcaccttcttgctgtgagggtgaatgagaaattgtgtacattgtttcagagaaggtgtttataaaactctgcaagatagaacctcacctccgagttctggctttccagggctccagtggacacaccatggccccagttcccccttgaaaactggcaacttttggctatgtgtgcaaagtggaggaagctgttttataaagaaattaaacttgacgtgcagagaaatggaagcaaaggatcctgaggcaaaagagaaagaaccaagcatgagagaaaaaagaaatcttagaaatcctagaggattaaagtacccgtatgaggcccaggtccctgcctgggatccaccaagtacccctgaatgcttgccataaatacttctttatagtttatgctgcaatggaatgctttcacttactattgggtgacctagactaacattattattgctattattattaatataccattatcctaaagactcacagagaatgagacaaggctcccatttgcagctgtgaggtccagcaagttgcaggaagggcaggacacagagcaaggctggttgccctgggttctccaacttcagctcagagtagtcctggaggatcaagagaccaagcctcaggcagcccctgcatcaaacctcggcatcctcacctgtttctacatgatgaaaacgaagttctcttccagcccactccaccaacatgtgcccttttcaaaattcaccgagagaaatcatctggaggagattatgcaaattctccatcctttgcaggtgaaccccactttaataaatatgcatctgattaacaagggaaggtgtttgctttgtagatctcacctcagtgttccttctggaagccagctttccgagttcatttaaacatgaaatttccagcctgatgtttttcatgttacacagggcaagggcatagatcttaaatgcatatttcctgttgataaacgcacacatccatgtatccgtgatccaaatcaaggcacctgggagaccttcatggcccttcccagtccacctctggtcccacaggatgatcactgctctggtttctaccatcagagatctgttttgcctgttctcgagcctcatataaatggagtgttggggtatatcgtcatttgagtatggtttgttgcactcagcataaagatatgggatttatcacccccgagtgataaatccagggctccggtggacacaccatggccccagctccccccttgaaaactggcaacttttgactatgtgtgcaaagtggagggagctggtttataaagaaattaaacttgacgtgcagagaaatggaagcaaaggatcctgaggcaaaagaaaaagaaccaagcatgagagaaaaaagaaatcttagaaatcctagaggattaaagtaccctcatgaggtgcattcccagcacctcgtgcatagagaccagctgtccagaaactcccacaaagactggcggtgggggacataggccggaggagccagacccggtgaggacccgtgagccggggagaaaggaagctgctaccgcaggctatggaggcccatgtcagagggccccgctccctgtgagcaagcatgtgtgagtgtgagtgggcatctgtgggaaggcgtttacgtgtgcctgagtttctatttagagagcagatgtatgtgagtcttaagtgtatgcagtgtttctgtgtctgggtctggatgtgtttctgaatgtgcactcatgcaagtgtgtgtgcatccgtgtgcaaggcctcactcctgcccctcgctggtacctccaatccctgctcacattctaaggtggaagtgggaccatggtgtggccgtgggagtcctggagagccagaattcaggggtgaggttctgtcctgcagagttttctcagcaccttctctcaaacaatttacacattctcattcaccttcaccatcacagcaacttacagggtttttattctcactttacaaaggaaaaaacaggcccagggacagtgctagtaacgaggaaaggaagtagctctaagcctaccctgtccaatctctggccaccaacttctgggcccagcaggccacacatccagggtgctcctcggatggggaccccaaccatcccccaataccttgcttggagaagaggcccacctaggtgctggcagtcagtggtggggcggagcagagtgcaaggcaaggccagctgctgaggcttcgcagcatccctccgcctggttagctcatccccgcataaacagtgggtcgggagcctgccttccaagtcagccaatgcaatggacactgaaggtaaggagtgctatgaccctgagatagtgcagtttaactccatcacaagcaaaataaagatgccatggcctcgttttttttggagttacgtcctatgtaccttgcccaaaaaccagtgtcctctgccctatggtgtgaatgttccctccaaaactcatgctgaaatttagttaccacaatgacagtattaagaagaggggcctttacgaggtgattaggtctgcccctgatgaatggattaatgcctttatcatgggtggtttagttatctcaggagtgggttcctgataggaaggatgaattcagcccaatttttctctccgtgttaacatccttccatcctgttatgatgcagcctgaaggttttcaccagatgttggcaccatgttcttggacttcccaacctccagaaccatgagcccaataaacttcttttatttatgaattacccggtctatggtattccattatagcagtcaaaaacaaagactccaccaccagtggagtgaggaagccatttgccctcggcctgtctagagttgcattccatacacatcagccaagaacagatgccctctgctttgtggggagctgggacactatggatttctgacccagcagcccaccacaggacgacgaacgcagctgcccctgtgagaggaagccttgtgctacccagacacagggagaaggcacaatagggtgctgtccttaacattcattctgtagtcactgtttcctagtgcctcgctttatactttttctgtttctacttcagaggacattttttggttttctgtcctggtctaatgcattattgaaaggcttcctgatcaccagtcatgcatatggaggaggctctggcctcatgcttatgtagatttttctctggcctctgaagtctgctgtcaggctctggagagcaactgcagccgccggcactgccgtgccaaaaaccctgcatagatgacaacagacagcatcagtctggccagggagcccaccaaggacacaagacaccacaagtcacagcaatactcggtcctttcccaacactggctgttgaggtaaaactgctcaaaactggaaaaataagcaaagagatgcaacgagtcacactcctgaaaatgaacagcaattattaacctgccccagggcagacctgtcagcctctccataaaaaaaacaaagctcagaagccagatctcagcctgttcatgggcaggctgcccagccagcccccagccttctttacactcagttcagctcatccatcactgaggccacagttgtctggggggccaggtctgcgctgggcacaggagcatgacaggcccacctgccctgccctcatcttacccagtccaaccaggagatgagacagaaggcttcattcatgccactctgtggattgatctattccacaggtatttactgagcatgcgctgaatacctaattctattctatcaatagacaaatggagcttatgttatagtgagacgagacagagaataaacaaagacaacatgtagctaaccaaaggtgacactgctaatgagcgattaaagcagggaaggaggcaaggggtactggggaagggtggtgtcacacatccaaatgttttcaatagaagagagaagcttgtcttcagtggagaaagcaaatctgcacagacccctgtgggagggatttgggtgggtgttggggagacagcatggtcagaaggaacagcagatgcaggaccttcgggtagggagtgcttagcaaatcagggacaaccaggagaccgtgggtggaggccgtgctgggcctcagatttgcttctctagggctcaggcatcttctggaatgtgctgctgccttctggggatagtcatgccccttgcgggagaggtgggaatttgcaggggcctgttttggttgtcacagagattgggagcatttctgccctttgctgctggaccaggggtggtgttgaaggctgtgtgcaggaaagccgcaccccacgaagagttgccataccccagaccctccaatgcccaccaggcacaggcaggacctgccctccggcgccaccacccacacctaactctgctttgcatgcagactgaggcgtgtgtgcctagtgccaacacacagtgaatgttccgggactgccatgccacgtaaaaaaagttctcatcaccatgggcctccgtctgtggccacagcacattcacccagcccctgactcatggtgtcgtcgggctcatggtgtcgtccggctcacggtgtcgtccagtggagccacgcttggcatttgcttattgaagtgcctgtcattttacttaaattgtttggtgttgtttctcttttatatcatgcacagcatggtacagtttttggagatggtgggtgtagatggaggatactacaggagaactatggagcagtggatgctgggaccgctgtcatagagggaatgcgtggagcaggcactgcccggctggaccacgggaggggcagatgggcaggagtccagtgaagaggctggcaccccagtctaggtgagagacagtggaggcatgggtctaagtagcgcctgaggaggtgagcagaagtggtcacattctggtcacattttaaaggtaaaacttttggatttgctgatagaccatacatgagtgtgacagaaaaacaggcctcaaggataactctaaaacttttggcccaaacaactggaaagatacagttgtcacgaaccgagaaggggaagattaaagattaaagaagtatgggactggggggtgccaggagtacagtcatggattatggagttggagttgccttttcatggagatgccagatagccaaatggatagttactggggacagtaagagcagacaaagggccatgaaacttagcctgggagaccaggtaacttccaggaggaacagacacctgggctgggactttgaatgatcagcaggagtttccctggataaagaggatgctccaagcagggaagtaagcagtgtgagcagaggacgtgctaaaatacatggcgtcccagcctccaggccactttgatggacaagcactgtgtacccaggatgtgagggccagagctgatgccggcaggccacgtggaggctgggggtctgtctcacagcaaggaggagcccttagaggtctcagaacaggctgaattcttccatctcttctggaaagatgaccgctttgatccagcccccacttctgaaccaacatctgctcacacaccttttcattttgttttgtttccctctctctccaaatggactacatgctccttggaaggaaggtgccaagaagctttagggagtttgggaaatcacagctacaccccttgagaggtctcagggatggaaccctgttctataggtagttgagcagagcccagctctctggatggaaaggtgtcccaggataacatgagacagtgcatgagtgcctggcacctggaggtgcccaagaaaccgccctgagtgaggccttttctggtcaccctccaacagattgggcagaggtgtgggtgagagcagggagtgtggcagggccaggatcaccctctgcctgccactgtccacgcaacatggggacacccaccaccctcccaatgctgttccagggaagtcagaccatgagcacagtcgcaccacagtaaaagcggcacctgcatctggatcagggtgccctgcccagttgcagggcctggccacagccaccgggccatttggcctccccatgtgagggagggccccagctgtgttgggaggaagaaagctggtgccaggacaggggagaggtccaagcctcggcccccagggccttcttgggggtgaccctggccagcttcccactgcagtgaaggtcgattggttgtcacaggggcagctggggtgcccacaaccttgcccctacgctggggagccagccgtccaggcaggagaagcaccatgacaggcaggccctgacagtacccctgtaggagacaggggtgaggccaagagtagcagctgtgcaggaccagcctggcttggcctcacctcctagcgatgtggcctctgagctgaaccctgaaggctaagcaagcacagctccctagccaaggtgcagctcaccttgtgtccatcacaccccaccccaggaaccccttcagacatggtcctcctggtcgccagcacattgcatttgaataggacagttgtattgtacatctacctgtgtgctgtacccatgtgcctatgctttatttatgaaaagattaagaggctttccagccccaacacccaccatcaccgtggggctgcctgctgtgcagccatgagaggcagcaggtgtgagttccagtcaccctggagccccaggccttgaaggaccaaagggctggattcctggcctcatggggccacaccaaggggtcgagattgtcctttgccccagggagttggattttgagaggcaaaggatggctagaaactgagggcacctgagcctgagcagctgggagagcattgtggacatcccggcctgtggctgagctctgggagagcaggagatcatggacagccagacctgtggctgagctctgggagagcaggagatcatggacagccagacctgtggctgagctctgggagagcaggacgtcgtggacaacccaacctgtcacgagcctgccacaccagctgccacccgccctgggtcaggatgagggcgccaggagccagatgctcagaattgagcatgaccctcatggatggcagggatgaggtttagtcccagagtccaaatcctgaaccctgtgaagcctcctgggtcacagaacaggctgcagcttcccagagcacacccttgggggcaggcagtaaacaaatacatcacatgacgctcaggacgtgggtctgaactgctgtggagagactgagagtgccggccagcaggaccagggtgccccacaggtttccaggaccagagagggctggagctgccaccaaggtgctggtggatgtccagggcccagccagaattcaggagggacacagcaggggcagaagtggatagggccacagaggcagaggatgatgggttctgagggaagaggcctgtggctcagacactgtggtgaggccgaaggggcagcccatgagtgtgatcaggcattgcccacaaggcattcacagcatgcagaacctcgtgggagccacaaggtgtgggaggaaagtccggggcctccagcagctcggggagacagcaggcctcagtagcaccatccttgcactgatgggctcagtgagtaagctcagcaggagcttccctcctcctcttgtcacctgcggccttcccttcaccacagcccagatctcagtgtgtctggaaagatctcgaatctcagggtggcctgatccacacgtgtgtgggggagggctttcactgaggttggcaatgactggctgatttcttgagagttagtgtgggtgagtgtgcgtgtgcatgtacatgagcatgtgaacgccagagccagtgtgcagagtgttttctcttgcccactgagggattgaggccgtccttcagtctgcaccaccctccaaaggcaggagcagctcccgaaactggagaaacatcgctcctgggtgagcccatgggggactcatggaggaggaggttgggcggcagagagaggcttccccaggtgctggggtgaggccttgcccctgacgccccctcagaagcccgtgtccttccctacaatccctctaaatggtgggagctgccgattcctgaacagcagagatgtgcagaagccacagcggcactcgccccatctcctccgtgacccctgtgggaggacccattacccacaggagggaactgagcccgggcagggatcaaattttctgtttagctgcggcttccttcttctgcattcggtgcaaggagacataaactaaatataggtgttggggaaaaaaaggcaacgggaaaatgagagcaaaagagtgtgagggaggccagagttcacaagagaacattcgatcttgctgagcagggaccgccagctgcaggccaggcagtggggcggcctgcacgccttcacccacagtgcccatcaggggaagcagtgctgtggaggtggtgcactcctgctgtgaggagacgcctgggctgcaggaaacacctcccttactccctgtgtcctccctgcacacagatcctaggagatgctccaggtaagcccagagtctggggaaaacctgggagcggccagcagttttgggggtgggacagaaggtgaagcccgtagcatgccgcacgtttggtctgatggctggccccacagtacagcagtgaggaggtctccttccactggggaacatcacatgagctcccaaatgaatcaaatccaagtggagctcccagctctggtacctctaaggcaaacggagactttaccgcagaaactcggcttagcaccactagtgcggaacagtagtttccaccctgatgtcttccagaggctcagtaaatggccatttccatccacacctcccattaaaaagaggcaggcttccacgggggggtgctacatgggagctgagggaagacctgcaccggtcagaaatcttgtctgcgctgtctacactagtcccataaaaggtcatggagcaggggagaggtgtccttggggcatcttcaggtcctctgggttcatctcgctcacctcctcctctttcctgaaactgcagattcagttcactcattctttcattcattcattcatccattcattcatccaacaaagatttaggggcagctactctacctggggctggggcatggcaatgagcaaggctgggttcccacacaccatgaggtcaggtctggtgggagagccgggcaagcaaccacccacagtgcatttacacagtcaccatggccacagtaaaacactgccccacagtcctgggaatgatatcccagccaaggaccgaggaatgtgaggagttggccaggtggaggcaagaggaagtgcccagtgatgggagtggagcctgcaagggcctcaagggaggatactgggtgactggggccacccggggtctcaacatgaagtggcaccttctgtaactggaaatcgcaagctcgcctttgccgcaaggctagcagcacgtggagctgcctgagcagtcctccctgggtgtgcagtttgcaggggcctctcgcccggctgacctgcaaagaattgttttgagacctccctcgcagtgttcacattttcacattttctatcttttttaaaaaatgtaaaaagagttgcagatcctcctgtagtagcaccctgtcaaattcttttcccatcttgtccctcacttcacctcccattccttccaccttgtgaactccggcccctctggttccagacgattccaggtctccatcaacaagtttgcatgaagacaagaaaaggaaaagcactcgtctctgtgcacagccctcagcggtacacagaacatgtttccccagaggagcccagtacgatgccaacgttaatttacagcctgcagatccctcatcacaattgtagttacatcattattggtgccatttggggggtaagttttcaaagattctgttttggtggtttgtgcacattgagtgcagagatgagtttatattccacaatatacagactatgccctgtctacttctatattaaaatttatagatctattgatgtcaacataggtataagtacaaatgacacagagatagagacatacagctcactccctcattgcttattcccatcctcatttcctagatgcacacgggagccaactccaccgtatttgatacattgaatatgcacgtccttaaatatgcacatctctttgtaaaagatgtagtggtgtttggtagatatacatatgccataaattatgtgagttacatcagatgttaaatctcattctgtttcttcttcgttttcacttgaccataagttttcaagatgtaccgtgttgctctagctacagctagattattgcttctcagtgctgcctcgtgttattccacagtttgtttccaccttattttatttccagctctctgtagtggacaccaagttcccacacctcattgtatcataaacagacaggcaatcccctgcgagtatctcctgatggatctggatcagggttcctccaagacgcttaggaggagttgggcagctggtaccaggccaacccacacactgcactgggccgagtcctctggggtggctgcagcagtccacaccccaaggctcccgttagcccacagccttctcaatatgtgaacccatccctggtctgattgttgctattctgttgcatgtaaagcactgtcttgttttaattttaacttgcattgtgaacatgttttcatggattttttagtcatttgggcttccatttctgtgaattgttattcattacctttattcattttcctattgcagcggtctctcttttccttgtattttgaaggaattcttactggctttgcctactcctattggttttccctactgtaaccctcactgaacagaaatccctaatttaaggtaatctaatgtccacctttacactttaagttatgatttgacaactttgttcaagtaattatttgcttaatctctgccatccccagtagactccaaggctaggaaccatggcagtcttgtaccactcagtatccagaagagcatttattcattcatgaataaatatttggggaaatgaatgagaccagcacctggcacattgtacacactcagtaaagggaagctcctattttgaatgaatgagattttctcaggggaaagctctaaataaatgtaatgaaacaatcttctgcagagagaaacacaaaatcaaaaccaagaaaactgaagctaaaacggtaagcaggaaggacctcctggatttcagaaaaggtttgaatgttttcatcgagcacagaaagcctttgtgatgcatggatccagatctctctctgactcaggaatgacattgccactgcagggtctttgtttgttttggctttaaaatagagatgtgacagttatgcatggatgatgcagaagtcaggatgatgcagaagtcaggatgatgtgccaggtttgagtgactcacatgcaatacagtgagactctcttcctggaatccctctacaatatgtgactagctcctctaattccagaaccatgttccatgagcacaccattgccttctctggattctttgggagtcatctgtgagatcttaatcattacaattggattgtcttactatctaaagttttatagaaggaaaaataaatcacatatttagcagagtttcaggaagggtcacccacccccattctttcccctactattgggaaactgcctgatgccagagagcagcacagacgtgggacacagatcaggccctcatgagccagtgaggatcaaaggacatctcgggaggatcaacttccagcgtgaggggctccactgagctggtccccaggaaaaatggtgaaaattggtttaaaatacacaatcagtaaagatttccaaaaacagtagcaaaaagcaaatgaagagacatctattcaagaaaatgtataaaacataggtgagaaaggcacatatctaggcatatactcaggagagtctatgatgttagaaccaggacagctcctttcctcctcgctctcagctaggtaaggcagagactccactccacactgcctcagccaacaacacagggctccctctcccctctgtttccagtcagagagctttcttcctgcgaggagttggatgtcagcatttctcatcctgcccccgccacctgctgctgaggctaagtgctgggtgaatgcaatcgaaaagtggagactccactcttccttccagcttccactcaggagttgaggctctaccttgggcacagtgcactgaaagtactgcagcctgatagcaactcttccaactcgggaggtgatggttccacaccaggagaggaccccaggataccgccccccaccctgccaagcattcagttactggaatgggggtatccctcagaaagaagcttgtcattgtccccacccccagctccagagccctggctcagagatttttgcctggaggcctgggggaggggagaagttagagaagaagcaggtctgaaacagataactcctatgtcttcccaaaggaattaatttcatttataacagagtgtgcagaagttcaagttcaagagcactcttaagaatggtggaggttgtggtgaaagcagttgggaagagattcatggatttaatgaagacacagcctagactgtaggctggctggcttgtaggagagaactggtgaataagacagctggacaggagccctcctagggtcagaacaaatatcaaacacaaatctcagactatttctgaaaaggagccatgatttcactggtttaagctgaagagcaatttatgcccttagaacattattgaaaggaagcattatgcaaataaccaataagtacatgaaaagatgcttgacatcattagtcatcaggaaattgcaaatacagatcacaatgaaatactactgcacacccaccaggatggccataataacatagtcagataataacaggtgttggcagggatgcgaagaaatttgaagcctcatacactgctaatgggaatttaaaatgatgcagacactttgaaatacagtgtggaagttccttaaacaattaaatgcagatttaccatatgacccagcaatcctactcctaggcatatacccaggagaaatgaaaacatatgtccacacaaaaacttgtatgtgaacgttcatagcaacattgttcataatagacaaaaggtgggaaaaacccaaatacccatcaattgacaaacgaagtgtggtatagccataccattccataaaaagcaatgtagtactgatacgtgctacatcatggatgaaacttgaaaacatgctaagtgaaaaaaacaggcacaaaagaccacatattatataattgcatttaaatgaaatgcccagaatagggaaatctatagagacagaaagtagactagagattgcttaggactgggggaggcatatggagagataggaagatgagctaaaagttctttctggggtgatgaaaatgttttaaaatcggctgcagtgatagttatgctaaaaaccgttaacttgcagactaaatagttaaactttatagtatgtgagttatatcttaataaagctgctttcagaagtcttaagctgtttccatgagtagacatatagaacagtctcatttttatgatgacttcatagcattccacagcacagatgtgccatgattttgtcttaaccactaccctaatgacggatactcatgctgtttctgattttgcactattactgacaatgaagtaaagaacgccttggcagtacttccttgtgttcatatgtagacatttagtgggctgttttcctagatcttttagcccacagaagactagagttattgctaaagattttaaaagttaaataaataattgtcttctgagagcaacatgacagggttttgtctgctacggcaatcctggctcaagccttctgtgatcggttatcaacatttattcatttggctattcctgtcatctttaatttgtcagatttattaacgatcaactttagccaggccctcgactgcatgctgacgatctaggcaggatctcaggctggggcagggtagcggggtgtgggtaggggtggtgaacaggtgactgcaacactctctggtgaacaccaagcactcaacccagcttcctgagggtgctctgtcctccagaatggctggctagccaggctcacaccaagcccttggccaccaccatgccccacagacagacagatctagtcttcccatatataagagttataagagtaatcgtggcaacatatgcttaataacatgaaaatacacactacatgcacacacacacacacacacgaaaaaagtctaggagcacacaaatgcccatcacaaatagaaggatgggcaactgtggcatgagcatctgaaggaacagcaagggagcagcacaaagctgcagcttggagtgtgagggttcgcttgtgttcatgtgaaatcgctccacatgaacacacagggcacggcagcacccctagaaaggggcccagatgacgaacaggatgggagagactcactgttcagcataccctctgcatcttttggattttgtagcatgtgcatatttaaaggagtaacaagattactccttcaggggctcccgttgcctccacagtgaaatcacactttcaatacatgatgagactgcgtcttcaccttctcccagcgcatccttatttcacttcttccttcttcctgggcacccctccagctgcaactcctgggtggagcatgcctttccctcatttgcatctgcctctttgccttggaggtaccctcaggccacttggagaaacctcctctggccccttgactactctggggtcccctcgactactctgggggaccctctgagctcagaattcccctagaggagtacccctcatccaaactggcagtggggccaccagaccccaacttcctggttcagggcttgcaacatggtaatgtcaaccaaaattaaggctgccgaggcagaaataaattcatgaaggcttactggacaccaaatgtgacgatcatccaaggaagacatgtcagcagagttaggcatgctccacagtcggccacacgtggaaggattttctgggaaagctgaggagaagggaggggaggactcatgccggagctgtccgcttcactgcaagctccaatgcaggggttcggtcattggccacggacagcaacacacagactaaaaggccctacatgcaagacaagcagcaaagcttcatgatttagaaacaaatcagtgttttttcagcgtcagtgggttgtttttttgtttgttttgttttgttttgttttgtttttctgagacgtcatcttgctcgttgcccaggctggaatgcaatggcatggtctccgctcactgcaacttctgcctcctgggttcaagcaattcccctgcctcagcctcccaagtagctgggattacaggcgcatgccaccacacccagctaatttttgtatttttagtagagacggggtttcactatgttggccaggctggtctcaaactcttcacctcgtgatccacccgccttggcctcccaaagtgctgggattacaagcatgagccaccgcgcccagccgggttacctactaatctgtacttcaacagtttgaggaaactcacgacaagatctgtgggactcaggataagatgcttcactcaggcacaggatgcaagccacgaagcttaaggcctccctgagggagcagtgtggcagctgccaatatgggctgcaggttatcagcgagcactcaggcaccatttgtcaatgtgtgcacaagacggagggggagagagaggcagagggagagtgagggagagagaaaagaatgagtgagagagcaaatgagacacggagtgagacggtgagagaatgagagagagtgggagatggagtgagtgggagtgagacggggagagagatggagagagtgagacagtgagggagacagcaagtcgccagtctcaggcccagttccgctgcttcctcctaacctgctgaaagccccaccggcaccacagagaggcgagctgacctgccccaagtctccagcttgtaagaggggcctgggactcagaccggattccaaaccccagcctccttcagcttccccaccctgcattccagaaggtttctcaaccccatgcaagaaggagattatcgcctactaagaagcttcctgggctccctggggcctcctcagcctccatccacctgtcaatcctccctcaggctatctctgcacgtttttcaccatttggactgacagaggtttagaacatttttgctttgattatgtccattatttaaagattctccctggagttttgtagctaaagacaccaaaaggtgaaaaagaaattcactaaccaagttctataatatggtgctttattccaaaaatgatagtgagatattttagtcgttaccacttaccatgactttcttgtggtgttttccaacttctggcatttcagctacaaataaaataaaataaaatattacgaatcctcagttctgttccttggaaacacgggcccccggatggagcctaagtcacaatccctacccttatgccttctatgatctgggagggaaaccagaataaatatgctaggatgcagtaaatgagatcagagaaatacctcatccatacgggaatgtaaaggcacagccaccttggcccagtgcgggacagcccaactgccactccggcatggagctgcctgtcctcagcctgccccggagctcagctctgccctgctcactcccacttccttctgattttcagcactctaatggcttatacgacgctgtgagtttaatttgcatttctctaatgaccaatgacgttcagcactttgcatgtgtgtaacagccatctgcatatcctctttggtgatgtgtctgctgaaatttttggactattttcttacatcttcataattgtttatagggactatctccactgtccttccttcatgccttcatcaaaatcagttgttcacacgtatgttcatctcttgattttctaccctattccgtttatctattcatctatgtttactgttttattactacagcttataatgtctttccattttcattcactttaaaattcttttttttattttattttttttttttagtatttattgatcattcttgggtgtttctcggagagggggatttggcggggtcataggacaatagtggagggaaggtcagcagataaacatgtgaacaagggtctctggttttcctaggcagaggaccctgcagccttccgcagtgtttgtgtccctgggtacttgagattagggagtggtgatgactcttaacgagcatgctgccttcaagcgtctgtttaacaaagcacatcttgcaccgtcgttaatccatctaaccctgagtggccacagcacatgtttcagagagcacggggttgggggtaaggttatagattaacagcatcccaaggcagaagaatttttcttagtacagaacaaaatggagtctcctatgtctacccccctttacactgacacagcaacaatctgatttctctttcttttccccacatttcccccttttctattcgacaaaaccgccatcgtcatcatggcccgttctcaatgagctgttgggtacacctcccagacggggtggtggctgggcagaggggctcctcacttcccagacggggcggccggtcagaggcaccccccacgtcccggacggggcggctggccgggcggaggcttcccccaacctccctcccggacggggcagtttaaaattctttctgatcttccttttgatttgttttgacccatgaattatttagatgtgcattatttaatttccaaacacttggggattttccagatatctttctaatgctgattcctaatttaattccattttggccagagaacaggctcactatgacagaaatcctttcgcatttactaaagcttattctgtggcccagagaatactttatcttggtaaatgtttcatgtgcacttgaaaaaatgtgcattcttctaaacataggagggttctataaatgtgagttagatcacatttggtttccagttttgtttctgtattcttactgattttccatctacttattttctctgtgtgtcacccaggttggagtgcagtggtgcaatcaaagctccataagctcaaactcctgggcgcaagtgattatccctcctcagccttccgaatagctgaaacaacaggaatgtgccaccaggaaattttttttttttttttagagacaatgtctcaccatattgcccaggccggtcttgaactcctgggcttaagcaaaatagccgccttggcctcccaacacactgggattacagatgtgagccactgcacccggccctgtgtacttattttcaacaattatttagagaagagtgttgaattgtctaactatattttttgatgaccttctctgtccatggtaacatttttgctctgaaatccactttacttggtatcaaaatggtgactcctgaatagcactggtgtgaagtgtgttccattctttcacctctgatccaatgttgcgtgttgcatatgtgcacacttgtgtggttggcacttgctttttaatccaattgaagcaatctctaacctttaattgggctatagtttaggtttgtttcatttaatacaattattgatttggttaggtttaaagctagtgtcttgtcatttgttttatcttaatccaatctgtcacttgttttctgtttcttttttggcatttttgattaactaaggatttcttacattttcacattatttcttttattggattatcagctacaactgttgtcttatttcagtggttgtgttagggcttacactatacttcttttcacagtctatacactaaagagatattatgtcacctcaactgcaacacaggtcgggtatcccttatccaaaatcttgagaccagaggtgtttcagatttcagcttttttcagatttttgaatattttgaaatattatacttactggttgagcatccctagcctgaaaatttgaaatcaaaaattcttcaatgagcatttcctttgagcatcatggcagcattccaaaagttctggatttttttagagcattttggatttcagactcttgggtgaggaatgcttgccctgtctatgacccttataacaatatactgtgttttctctcctgcatttgtgctagtgtctcacagtttacctgtccatattttacaaatccccaatgcactgttattttgttttaaaaagttgattctctcttttaaataacatttctattgcttttcattcctttgtgtagacacatttccatctggtgtcactttccatctgcctaaaggaccttccttcacatttcttgtaatgcaggtctgaggctcatcagttctttccgtttttgtgtgttagggggaggaaggtctttatttcattaagtgaaagatattttctctaggtaaatgttttctttcagcactttaaagatgttgttctgttgtcttctcattgcattgtttttaatgagaaatttgctgtcatccttatatctgttcctttgtacctaatgtttcttgtgtatctgactacttttaagattttcccttatcactggatttgagcaacttgattatgatgtgtcttggtgctattttctttatatttcttatgcttcgggtttgttgagcttctcgagtctatgggatataatttttaacaaatttggaaaattcgaagaaaaccgtattccttaaaatatgttttctgtctccctctccttctacaactataattactcatgtatttggatattcaactgcttaaagttaacccacagctcactactatttttttagtcttcttgtttctctatttttcatttctctgttttgtatttcttgatagtttctttccttgtctttaacttctctaatcattttctctgaattgtctaaaccatcctaagtatttttgtctcacgcattgtggctttcatcttgagaagtttgttttggatcttttctaaatcttccttgtatctagttaacatgatcaacctcttcctctattatactaaatatatgaaacattcctataatacttgctttgatgtccttgtctaccagttctattatatcatttgtcatttccggatcactgttggttgattgatattcatacccattgtgggtcattttttcttcttcacatgctagtaacttttgattgagtgccgtgcattgtgaattttactttgtcagatgctgtatattttatattcctgtaaatagctttgaactttgttttgagtttgatctttttgatcttgcttttatgctttgctaagtgggatcagagcagcatttagcctacggctaatttaatccttcactgaaggaaaacccttctaagtactctaaccagagcccactgaatttgttttctactctggctggggagaacaggcactattcccagccctgtttgatctatggagaatgctccttctaacgttatgtgtagctctttctctttcccatcctctgaccagtatagctgagtggtcggggaggatcctctgcagacctccacagctctcactgtgtacccttctctcctgtgaattccagctgccttggacttcctaacttcatctctggtttttcatcttagtgagtataccgagctttgcctggcctcttccttttaccacctgtgtcgtgcactgggcccagcgcaaggctccactcacctgcttccctgttctcatggatcattcccccttcattgcctggtacccaatagctggacaactgttatttcaataatgtgtcccatatttttacatttatcaaacaggaggtaaatctggtccttattactctatcttttccagaagtagaagctatagaaatgtttgtgtcatccgagagtcacacagatgaatgctggccatgccattcataccctttctccaggaggtgatgctctgtcagctggcaagagtctggcttgacaggcaacctcagccctgatgtgcaggtgaggacctcagctctccgacttcatgtcattaaacaccaagtcagtcacaccctttggaagtcatctgtaactcaattgcaaggagggaatccacaactcagatagcggtgagtgtctggtaattgcgttccccatggggcaccagttaaattggcaagtctgtgatgccaggctctcctgtgagctttgtgagcccaactcaaccttgggaatgtaaggatgtaggctttctgagtccccaggctctgggtagattatcaaggtgagagcagctgtcagaaactggcccaactgctgttcctcatgtgacacccaaaacacactgcatgtcatcatgcctaacattctgcaagctgctgcatataatagggttacccaaacagttggaccttgtatctctaaagatccaaaaacttcatgttaaccgttttgatggagtttatgctaatgtgtctattttaaatattttaacaataacaggcagaaataaatgagcaactaaagtcacacactattgtcagcacagtaaagagaacataacataacccctgcatggtcatgcatcaggatcgcaagcaccccttctgtgagagggtgttagctctgaggacctgggagggtgacagcaattggaagatgtcagttccttcccatttctatgaacactaatgagctgtgtggcatacagccaagtctgtggccctctctgtctccacttcctcatctgaaacgatggcagtagaactttcccttcctgggttgtcaaagtccacggagaagcataaaccatgattcacatgtgaggaagtacgcaggtttcaaaggccctggtctttgtataacagcatgctgttcaggccacactcaacagaaccagtcatcagtttccaccacatcagataaaacacttcccacctgaggcctttgcctctgacagggtgttttcttaggagagacattctgttaaatgataaagcagattgcttagaggggcagtctgcaaaggctcttgtttttctagagaagttatccttaaagggacaatctgggatttcagaaaatgggactaagccagtaagtgttacgtattataaagagaattgagcaaacagggccttcagcaacactgccctgcaagtggtaaccaagccacctttgatggagacattttatggggaattctttgcatcagcatgagaggtcaggtcagtgttggtccctcagaaaactaaaacccatcagcttcccacggaaatacaatctccctccccattgtcccagtgggaaggcgggttcatcctgggtgcagcctcacaggaagtgagtctggaagcttgcaggtgtgcccaaccctcccctttgctcaggcctcttcctcccctcccacacctgcccacacacaggccagtgccctctcacctcccctctgctcaggcctcttccccgcccccccacctgccagtgccctctcaccaccactctgccaactgccaattgttagccagtccatctccctcaccatcccagactccttatccccattcaccccctgatatccccacggcacctagagtgcactggccatccaggacatgctgctcaatgaaactgacctgactctcctctcatccctcagatcccagttcctgtggcttccagaatgaaaattcgactgcatcatccatgtttagcccttggatttagcccatggattccctcaggtctttgggggtgcctacagcctcccatgcctgggccctgtctcccactccagctgcatctcttactatgtcctccttgaggtttcctcattcctgaccatctgcagttctgcaaagatgtcctggacacagcagacacagagcatggggagagacagcccaacctacatagaggaggggtgggtagtaggggaaggaaacgccttaagataggcagaggggaccacatttccttctaatcacagtcagatccgctgtagcaattttttctgaatgggttatttcacaagcacttactgagcacctaaaatgtgctagtacctagcctaggaggtgagtagtaaactatgtcgccctctaaaggacagcattcagcatagggcagacactgagtgcaacaacacaacaatgggattctcagaacatagggtgctcagggagaggggaagttaagtatgccttggtctgggcaagggacagtgatatggtttggatctgtgtccccgcccaaatctcatgttgaattgtaatccccagtgttggaggtggggcctagtgggaggtgattggagcatggggacagatgtcaaccttggtactgtcctgagttctcatgaaatctggttatttgaaaatgtgtggcacctcccctctctttctgtcttcctcctgctttagccatgtgaagtagcagctccccatttaccttccaccacgattgtaagtttcctgaggcctccccagaagctgatgctgccacgcttcctgcacagcctgcaggaccatgagccaattcaacctcttttctttataaattatccagtgccaggtatttctttacagcagtgcaagagtggactaatacagaaaattggtaccaaggagagggatactgccataaagattccttaaaatgcaaaagtggccttggaactgggtagcaggcagaggttggaagagtttggagggctctgaagaagacaggaagataagggaaagtttgaaactgttgacgaaaagagtcaaactctgtaaaatatttgaagagatttctgagccaaatatgagtgaccatggcccatcacagccctcagggggtcctgagaacatgtgcccagggtggtgggggtacagcttggttttatgtattttaggaaggcatgacacatcaatccaatacatttaagaaatacattggtttggtttagaaaggcaggacaactcaaagagggggcttccaggctataggtaaattaaaacattttctggttgacaattggttgaggttgtctgaaaacctgggatggatagaaaggaatgttcaggttaaagataaaggattgtggagaccaagttttattgtgcagaggaagctgttagatagcagactttagagagagcaggttgtaagttgttttttattggactaaaaggtttcctggctcttagttgattatctcctagatctgggaaggaaggaaggaaaacaaagtgggaaggggattctctatagaatgtggatttttcccagaagagactttggagggcaattttaaggtatggcaaggaaatatattttggggttaaatattttttccttgtctcataatgttatgccagagtcagattgaagagcaagacacaatatacatggtcaaataaaacccatctgaagagaatatatggtttgtagggcatgactccctagaccccttaggtaggaatttgggtaagataaaaaatcagagcttagtcctcaaaacttccttgagactgcttaaattgttgtgaccaaaatgctggtagtgatgtggacaatgaagtccaggctgaggaggtctcagatgaaaatgaggaacttattgggaactggtgtaaaggtcacttttgttatgctttggtgaaaagcctgcttgcattgtgcccctaatctagggatctatggattgaacttgagagagatgattgagggtatctggtggaagacatttctaagcagcaaagcattcaagagttacctggctgcttctaacaatctaagctcatatgcatgagcaaagaaatgaccaaaaattggaacttatttttaaaaagaagagcataaaagtttggaaaaattgtagcctggtcaagtgaaaagcccattttcaggggaggaatttaagcaggttgcaaaaatttgcatgactaaaaggaaggcaaatgctgatagccaagacaatggggaaaaggcctcgaaggcatttcagagacctttgcagcagcccctcccatcacaggctcagaggcataggagggaaggatggtttggtgggccagactcagggccccactgccccccacagcctcaggacatgggatccacatcctgatggtggatccgtgaatgactctgtggagcaggccaccttcaagccttccctgccactggtcagacctttggtgaggcagaaaaaaaaatgtggactgtgataagccacagagacagcagggttttctgcctatcagctacaattatcttaacaaagatatgtgcaagaagttcaaaagcacatagaagaaaagtataaactatgcagagaacgtatggggtgggtattaggataacttccagtgagtgtgtgttataggaccaccaggttaatgtgcctgctccacagtaacagagcaatacactgagacagcagggatgcagcagagaaagagtgtaatgattgcagggcaccaagcaaggagatgggaagagtcccttaaatccatctccccaagaagttctgggctagggtttttaaggggaatatggagggcgaggggctggaaaactggaattgttgattgatcagggtaagagggatgaagtcatcaagatgtggaaactacactctttggtgagtcagctttttatagggtctttcagtcagcttttcacagggtctttcagaccagctggcaccagtggggtcctacagaccagctggcatcagtagtttcactgatatataggacctgcaaggatatctcagagggaaaacctaacatttcataatgttcaggtggttatctctagagtggttaaggggacctctaatcttgtaacaggatccatgcaattctgaggcaacagacaccaaacagctatgaggaagcaggtcagagaggaggctgacccagtgatcaatgctgagcatggagcaagctgtgtttaatttttttctgcccacccccctttttccttgattaattttataaatgttacagggactgtttcacatatacaaaattgctgctttgcatatatacatttttctgaggagatggttgaccacatttatcagatttttcaaaggggtcagtgatataaaactgctaggattcactgccttatgttgtcttatttaaccatgtgagttaggcattattgaagctcagtgatctaggttcaccaagccggtgcattcatccattggtgcaccacgcatttattggacatgctgtctgctcccagcagcctccaggccctggagtgcactagagagcaaggcagcccagccctcgctgtggcaggctggcgtgggaaatacggcaggcatctgaggagcatgccaatagtgtggcagcatcaggaggacctgttatctggccttgtgcccagtggaaaggcccttttagagaggagggcacaacaggactggaagggtgctgcccacagaaagggtcccatgtgaacccccagcagcagggggcaggcccagggctgccaggaggaggctctggagctccaggaaagggcagaggagctggggaggcagacagctgagccacgaagtctctgtggagagacccttagagagaccataaacacgagcacctccaacccaagcccagcgccaccatcactccaatagttttctcagcaaaccacctgtgagccctcaggccctgggagcggccagaggaagccatctccaggtgaccctctgtcacctggcactgggcaccttccaccctgggaaccaccagagcctgagccagcctgccaggggccgccccaaagtgccccgtcagcacagtcccccaggcctgacacaggcagacgcaggcacggcgctcaccgcataatgggcacctttgatctccactctcctgatcacgcagagccaacagcagcagcctcgcggtacagaggccggctcaatgtcagggcggcacttggctactttgatgtctcagtgcctgcctgtttgaaatggaaggttgtcacattaagaagattatgcagaatccatttgtcaccacccttttcccactgtggtgaagtctacccaccacctgccactaaagtcatagctggaacagacgaagataatggaaacaagttaaggtgccagaggcacttgtggttaccagaaattttatgaggggagcaaggtccagattcttaaaatgttaatacagttgtctcttggtatccacaagggattgatcccaggacccagggatagcaaaatctgcagatgctcaagtctctggaatacaatggcatagtgtttgtatataacctacacacctcctcccgtatgcctcaaatcatctctagattacttgtaatacctgaaacaatgtaaatgctatggaaataattgttttactgtattgtttagagaataatgataaaaaactctgcacatgttcatcacagatgcaaattattttccaaatattttcaatcccacagttaattgaattttatggatgcagaactcacagatttggaggcccaactgtacagcagccttcaaaaccctgccacaatccaggaattctggcattaatgtgccaaggcttccaggtgaaactgtctagtgacattgatgaaaggcaaatttacgaaacatccccagccaagcatggtgcctcatgcctataatcctagcactttgggaggccgaggtgggtggatcaactgaggtcaggagtttgagaccagcctggtcaacatggcgaaacctcatctctactaaaaatacaaaattagccgggcatggtggcttgcacctataatttcagctacttgggagcctgaggcaggagaatcacttgaacctgggggacggaggtcacagtgagccaagatcgcgccacttcactccagcctgggcaaaagagcaaaactctgtctcaaaaaaaaaaaaaaaaaaaaagccatcctcaaacagccaggaagccatgcggactgcaatgtgtgaggcatgggctcggacactgcctctgcattcagtctgtgtgtgttttgttggcttggtcagagtatgagaagaatattccgccttgtgcagatacagagttcgaaaagaaaggagtcttccagtagactttcggctaactggatattctgtttaggttttacaccaaaatttgacaagtggtacttccttaaaggttggttgcaattgtggaacctgaaaccataccagtagaattgtcatactcggatatgttaaaattcattggtttgtctcactttgaatggctcttttgaccatgcgcgattttgtaacattatgcatgggccatttggaaaatattgggtccctgagttgagcagaccttccaaacacacatctgtgagaaaatgacagtgaaaaaggtcaataatgtgtcagtattatcatgaaaatagttttgacctgacagcccccgtgaatgtgtctgggaacccaggtgttcccagaccagctttgagaactactgccctccagaattcctggcacatgcacacgagtgggtactggaacattcacagcagctgtgtcataattgcaaacacgtggcaacggcccacatgctccccaggaccagaacagaaaaatcaatcatggcaaatgcccaccatcaaacacaacacaaggtaaaacgaagcagactcctacagccatatccatcatcacagatgaatctgcagcacataacaggagcgaaagcagtgagccacaggatgagggagggtggtaccagtcccacactgtccaaacaagggggaaagtgagcagcagatgacaggaatgcacatgctgggaaaaataaggctatttttttttctttgtagagatggggtcacactatattgcccagtcttgtcttgaactccagggctcaagcaatcctacctcagcctccgaaaacgctggaattacaggtgtgagccagcacacccaaccaggctattattaacacaaatttctagaccataggcaccgctgccaaagacggaggaatggcaagtgttagcagtcttgtctcttaacctggggtaggtactctagggcctgtgttattattcttgaaatggcacaaatttcacactcttttatataatggggacatttcacaataacaactgctgaggatgagaataaaaaagaataaaaatgagaatggctagtctggtgaggcctgctgtttctgagccgtgtcactttgcaaactgtcatcatgaaagctgtctccttcactcactgaaacacacagaatcatgctgtttgagagttacttgaatctttcacaaaactgaaggtttttttcactgacaagtgagcactcttcaaagctaagggaggagctgcctctctggggaatcctgccctggccacactctggtcacctcagtcacagcctctcacaccaagacatgtgggcacctgagtccactgcctcatctgtgagctcccaagggcaagaaccatgggtcaccatggagaacgtggggccaggcagcccgagggggcagagctgcagtccctctctccccgtgtgtgctccatgcaggttgaggtgatgaacacacctgggctgcccgtccagggcactcccctccttgtcaaggggtgaccacccaccaccaccgtgagtgtcaacctgggtgtgccacactaattccacccacttctgcccactggggaggcctatggcaagtcaaggagtttcgtaataaccaccagctactgtattcacgagaagcaaaccataagaacatgcggtgctgcggaatcaggaggaccagagaaagagaccttcgggtgtatacaggagaatatctttattcagtgcactcagacccagcgcacttaacatccaaagactgggccagaacaaagacagcacttgacttttatacacccttcaaaaacgaggtgggttagcttgaagcaggcttacagtgacagtggcatgaaagcaaggatacagaggcagaacaattcatcaaattgtgacaggttcataactcaggattacacatgaccattgccaagcaacccagatgtctgttttctaggttttgctctaaacagccttacactggtttatctcataacctttactatggtgcccagacagctgtagttcaggcctgctcaggcttctcatgaccttcgttgtacttcttagatacaacagaatacttgaagttactagttgcagagaacaagaatctataaactcataacataaaacaaaggaaaatttgtttttcttctccctgtgttgagggagtcctgggagagtctccaggtcacattcctttgtgtcccggcttcttagatagtattatcaagactttccctaggtctgggctgtgcccgttgctgcctctgggataagtcagcctaatacaggaaagcttatttctttctctttttaattttatttttctttatttctttaatttcccacctgacagacaccttttcacccatcaaggtgtctccgatggcttgcagagtgcccaggcacaacccactgctcaggatatttattgaacactgacatgccaggccctgtgctggtgagaactgtgcccagtgggcagcgtgccacagtgcctgatgccagtgctgagctgtgccacatcccctttctaagagccgagcaccctgcaggggcatgtctgaacattgggatccactcaaggtctccctgagaaaaggcctgttgggtggcctccgtccacctcatccccaactcctgtgctgtgagctgctgggcgctccccagcctcgtcttcacctgcactgggcctctcaccttctcacctgggcccaccccttcccctcatgctcagcccggcctggctgctttcagtgcttagttagctgtcacctcctccaggtagccctcctctgtgcaccgccctccccatgcttccatctacctcggcacattacacaaatcttttctgttccctctgtgcagggagctccctagaggcaggaacaaggccctctgtgtccccagggctaagcacaggtctggctgggtaggtgtgacatcatttttgaatgaaataaggaatgcagcaactcttatctcctctggggcttcccaggccgaatcatggcatgaggacagtggattgctcaattcccagagtgctgggggcgcccaacggcaggtccaggagaggaccctgaggagtccaagctatccccattccctgccaccttgtggaagttatgcaggctctggatagtagaggccacaaacctaaaacttgagctcagaccctcccacagatgctggagaggcctgagggaactgcccaaacccagctcgttccctctcagcacagccaagcctgtgctgggagaaaaacggcctcaccccaggtgctcactgcacacctgtgctgtgtcaggggacactggcgcagggaccagccccagggtggcaggcgaaagacacaccaagggacctcccgagtccttccagggtcatggccagagcgcacagattgcactgcaccatgttaatttaatgattctgtgaactttttctattttccttcttcataatgtttccccacaaggctcagaacattagcagggagtttcagatggagagactcagatggctagttttatgtgtgacttggctgagccatggtgctcacatatgtgaccaaacattattctaggtgttgctaggagtgtttggaaggagattaacatttaaatcagcagaatctgaggaaagcaaattggcctccctagcatgggtgggcctcgtcccatgctctaaggcctgaacggaacagaatgacctccctccagcaagagggggctctgcagcagccgccaccggcctccagccgcaccgtcagctcttcctggctctccagcctgctggtccaccctgcagctttggacctgccagcctgcataattgtatgagccaacttcttatccacttatgccatagtgttccattattggaacgctaagcatgtgagagttatttctatcctactgctcaaggtcgttgccaaggcctgattgcaaaaattcaaaatatcgcaacctcaggcataaatgggtgaaaacaaatctctccctgtatatctgcacaatctactggagctgtttctctggagaccctgaccagtacagagccctcatgctaggatctctgggcaaggggcagtctctctgcacctgaattggctcacttggtacatggggtaagaattgcatggcctcatggggtttcctgagaattaaatgaggttgagggtgtaaagtggcatggctcttcgggagcctgcagtaaatgttagggattgtggagaagcaggagagatgtgtgagaaggaaaaaataggtagagggaagaggaaaggggagcaggagggaggaaagcaagggaacccctctcagacctgaggaaccatgctgagggggccccacctcgtgctcgcagtagctgctctcacctcccagcattggacaatcatcctccttccccaagaagaccaaagcggcctggcttccccttgggaggtgtgaagggaattcctcacttctgtggctgatgtcaatgaaagacccaggccccgcacgatgtcttcatggctagctgttttgcctccccaggtgagcagccaaggacagctgactcagtccctccgcggcacctccagaggacgctgggaaatggtttcaacatgagccaaatcctgcggcagcaggagtggtgagaggagcaggaggccaggctgacaacgtcagccacaggcaggcacagcagtgtcgccagtaggcatcatcaagtgagcatatgcccatcggagcctgcatctagccccctgccctgtacccttgccctgtgtatgtctacatcttttaaattccattttagcatggtcactttgggtgtcattaactattcatgaaaaacttgatcacgatggctgcataattaatcctcatagagaggtggcataactaacacaaccatttctctatagttgagtgattccatctttcacatttttttgctattatagataatgctgcagtgaaactccatgcccataatctttatgtctttaggatagagacccaaacccaaagtttatactcttgagtccgctagtataaagtttttgaaacatacgtcaagcttaaaagaaaaggttattatcaatttaagctctcacagttgtgtttgagaatatatatatatacacaacagtttcctgttgaaaaagaactctgagaatccagaattgcactttttttttttaacactaccctcggctcatacctgcagaattgcactcttgagacattgtggacacagagtatggccaagggcattctttaaaagaagggtcttgaggatgctaaaattagacattgatttttaaaatccacttataagcaagtttatgccaggaaaacatctattttcttaaattaataccactctttggctgggcatggtggctcatgcctgtgatcccagcactttgggaggctgaggtgggcagatcatgaggtcaggaggtcaagaccatcctggctaacatggtgaaaccctgtatctactaaaaatacaaaaaattagccgggcatggtggcaggtgcctgtagtcccagctatttgggaggctgaggcaggacaacagcttgaacctgggaggtggaggttgcagtgagccgagatcgcaccaccgcactccagtaagactccgtctcaagaaaataaaaaataaaaataatagcactcttctgaaaaacagaattttctatgatttctacaactgaaactaaggggccctgtgtatgaacactatgcagaactctcactctctctctctctctctctcctgtttttctttcttcttcatttcctccctttatcaaatatttgttgtcaaacattttcagggacacaggacatggcttttgttctcacaatagtcataatccagtgtgaacaatatgcaaaaagtagtcaactagaacatcaagtagctggcttctgtctcaaaaggtagtcattctaacagcctgatttgccttctgcttattggaacttcaattcccacaaaagccaagtcataatatcggtcaacaacccgatggataccaggtaaactctccactagccagagcacagaggtggccctgcaaattgttataataatttatagatactatgattgcctactgagcaagccaagataatcaattgaacaagttattagaaatagccacatttaataacatgtttgttataaggcaaggcaggttaggttttctgagggtagcagaaaactcccaaacagtggcttaaacaagatagagaattatacaggatttatatgaagaaagccacaaacttgaccaggggacatcaaaagagatttgagtaaactgatgttcctcaacagtcatgtttctcagtgagcagaacagatattggggagatactgaatttaataactaaatctatcacaatttcaaactaaatattgctgggatgttttttgtattgaaaacatgagttcatctggagaaactgacaaaagaaaataagacaatgttgggaaaatattttatgagggagatatatcttcttagatactgaaatgctttataaagctacaatcaataaaatggtgttactgcaacagtaatagactgatagactgaaaaactgttaagatgactaaaagtccataaacacgtgtgcattatataaaatataaacttatttgttatgtacgtgtacagacacatacttagtttatgataaagctggcacttcagaccagtgggtgaagcatagattgtcctgtaaatgatggtattgggaaaactggctaaccgctggaatgaataaagacaaagccatacatcacagcatgtacccaaatgaattctagaaggaattaaggtttatgtataaaaaatgaaaacatgagcatgggaagagattacataggtgaatatttgacttactctgtggcagggtgagtttttctagcacagtgtcaaagtcataaaaacatggtatgatttaagtacgtaaaaattaaaagaaaattttgtttcaaaaaagtggctggaggggggaggaaacaagaggggtgctggaggctgcagtcagggtcatgagcaacgtgtccactagcatccttcattcctgggcctgccatgctggtggaaagggctccagattgccgtttgggaagccccactctggtccatgaaaaggcccatgtaaaagacccaggacagcctggcatctgaaaggccccgactgtaggggtggtgttaaagatactgcctcacaggtatcggaggaacccaggccacagggctgccatccatcagtgttacttcaagtaattctttggacacatgaggaggaaatgacctccaacaccagcatgaggcaggcacacgcgtctgtccgtccccgtgggcagctcgcaggctgtgttaggagcaccttcagggccgacctcagctggccaccgccactcgcccccgcagtcggtcatcccaagcttttctcccaacactgtgacaaaagttgggctcaatgttagaaggatgaggcctgcagtaagggagggccacaggctgtttaacgaatacagcaggactgccagctaggaggaggaagttctcatgtcctatagtgccataggggattataattaacaacaatttgtcatgtattttcaagtagctggaagagtggacttctaatgttcccaaaagaaagaagtgatacatgtttttagtgatggatatgctaactaccctgatttgatcattacacattgtacagatgtattgaaatatcacactgtaccctataaatatgtacaattatcatgtgccaattaaaaatacaaaaagaatgaaattggtcgggtgcagtggctcacacctgtaatcccagcacttcgggaagctgaggcgggcagatcccctgaggaaagggttcgagaccagtctggccaacatggcaaaaccctgtctctactaaaaataccacaattagccaggtgtggtggtgggtgcctataatcccagctactagggaggcaaaggcaggagaatagcttgaacccaggaggccgaggtcgcattgagccgagatcacaccattgcactccagcctgatcaataagagactccatctcaaaaaaaaaaaaaaaaaaaaatgaaatcatgtcctttgcagcaacatggatgcaactggaagccattatcctacatggattaatgcaggagcagaaaaccaaatactgtatgttatcacttataagtgagtgctaaacatgagcacacatgagcacaggagaggaacaactgacaccgggacctacatgagggtcggggctgggagaagcaagaggatcaaaaaactacctatgaggtactatgttcaccacctgcatgaggaaatcatctgtacaccaaaccccagagacatgcaatttacccatgtaaggaacctgcacaggtacccctgaacctaaaataaaagtggaagaaaaaaaatagagttgacattatttaaaaatatataataatatttagagcagaaaaagaaaaagattaggcctgtagaaatgatttaattcgaaaatgtctctgtattctaatccggtgggcttggatttgtttctgtccacttttctgctgtgcctgtcacaaaagccctgcaccttaagcacgagctggggcctcggagcgtggggcttgctctggcctcctgaaccccactggtgtagccagaagccctgggctcagcccccactgctgcgtgctgggcgcagtgtgtcttgggccggaccctggcctgtgctgtcatggtaagtgcgggaggtgcgggaggggcaggaggtgcgggagcgtgggcgggcggggccggctgaagggggcccccactctgagagccaccagcacagcagtgaagtagggggatgaggaacagggctgagctccatggcggtcagggacactccccaggacggggcctgagaatcaaaggaggattccccgcccacagccagcagaggagcactcccaggagcaaaccaccggcaaacgtgctggggcgcccccgggttgggctcaggccgggagaggcagagggtgcgcggtgcaggcagggccctgctgggtcagaggccaggccagatcccgcacagaagcaggcgtggctcagcaccttgaagccgagaggctttgtgatccgatttacattttccaaaggtgactttgtcaggtgcctggaagtggattagggcaggccatggattagggcaggccctgaggacagagcgctgagggtctgctgcctccaggcagggagaaatgaggaggcctcaaaccacaggcagagagaacaaagctcccacccccatctgtgtggcagatgaaagaatctgcctccgactgcaatcaaaaagcagcaccagatagtatgtaataaaacatatttgtaggcaacgtgaacttaaatgaaaagtaagggaatcctcagaaacaaaagcagtcactgaaaattgaatggacagcctgtgacatgaagccctgcgcctagggccaggagcagcagaagtgggggacggtggccctctggtagcccagaagattgggtttctacaaacaggaatggatggggcagattgagaggatgggatagagaggagctgagaactgctgcgtgaagttaggactctccaggggccattgcctcagaaaacaaaagaccaataactggaaaaatatttacctgcacgtatcaaatgacaacatgaaattttgttatcttggcctaaacatttccctgacaatttctaatcgtttccctgcttttatgcaggtttgaacttgaaatttatactatttaagccaagaagttaaccttaaactgtccccaaaatattatattcctggaaaccaacacagaaacaagggctaatttctctggacaaatacaccatcaaccgaggcttttcagaatccctgtggcaggcggaactctcagatgcccccgggattctggtccctgtgtgtgttcacaccttctcctagttaggcactcatctgcatgctgcgctgaagagacttttcagatgtaaccaatgtccctattcagctgagttcagaaaaaggctatcctaggtagaacccctaatccggtgatcccttattaaggaatagggttcttcccggaagaagggatttgaaaagaaagagactccatggctgagaaattatccattgttggtgttgaaggaggagagagccatcagccagccagctgggcagcctgcagatgctggggggcctccagctggcaggcagtgaagaggcagggacctcagccctgcaaccaggactgccgggcaacctgaatgagcttcagagcatattcttccccagagcctgcagacacaaactcagccagcaccctgatttcagcctggcgagactgagcagagagcgcagacgcattacatcatcatccctctcgcctacagagcagcacactgatggacacactgttccagcctctacgtttgtggtcatttgttatgcaccaatacacattttgttacctaaaagtggggtgtactgtaacaaatacctaaaaatgtggctgtgccagtggaagctgacagcaggcagaggcattcttctaagaatgttgaggagcgtggcagaaaaagcctgaagtgcagtggacagactattagtagaaatctgtacttggaggatcctagtggtgagacctcagaagaagaggagggacatgtcattggaaactgaaagaaggggaatctttactgtttattggcagaaacttagcaaattgtgccctgcagttaggcagaaagcagaaggtatacatgactgacttgaataaattgctaaggagatttcccagcaaagtgttgaagatgtggctgagttcattgttgctgcttatagtaaaatgtgagaggagggagataacttgagaaaagcactattaaacaaaaagcaaccaggactggatgatttggggaattgtcagcccatccatatagctacggacaataaaattaggagattgctttcaaaggcatggcagagaaaagaaggtgagggcgtgactgtacaaccttttgctaaaacctcagaaggatcaatgagtcagagaattcagtcgtacaaagggctctttcaagagatagcatatgtgcctcacaggtcttctcaaccaaaccagaggaccacagccctgtagcatctggtcctcagctgcatcagcaagagccaaatatagcaaagagattatctcaaaaagatctgtgctgcagtaaacttacaagtgctgatatttctttgacacactgatttcatttcctttggtttatattgccaagagtggaattgctggatcatatggtaattctatttttattttttgaggaatctccatactgctttccacagtggctgtaccaatttacattcccaccaagagtgtacaagggttcccatttctctacaccccttgacttgttttcttatgtctttctgataacagccattctaaatggaatgaggtggtatctcattatggttttgatttgcatttccctgatgaatgttgagcattttttcctagacctgttggccataacatgtcttttcattaaaggtagcagcatttgcaacttcctagacatgtcttccaagatatggaatcaacccaagtgtcagcagacaaatggataaagaaaatgtcgtatatatacacaatggagtactaatcagccatgcaaaggatggaatcctgtcatttgcaacaacctggatgaacccagaggacaccatcttaagtgaaataagccaaacacagaaacacaaataaataccacatgatttcactcatgtggaatcttaaaaaaaaaaaaaagttgacatcacagaagcagaggtagaacactggttaccagagacgggataagcagggtagaagggaggatgaggagagtttattcaatgggcacaaagttacaattatgtaggaggagtaagttctattgcactgtggagtgatgaggattgacagtacagtactgtgtattataaaatagctagaagagagaattttgaatgttctcaccacagagcaatgataaatgcatgaggtgatggatatgttaactaccctaatttgatcagtatacaatatatgtttatcaaaacatcagactgtaccccataaatatgtacaattgcaataaaatagtgaccactaaaaggagatctgtgggcatggcttttgcttaatggtctgaatcccagtgtaattcatgcaaaccccacaaggttcttgactaaaattgggaagaaatactgccagcttggactaaaaggaacagagagactctgaaattaaaaagacagtcagacccttaggattccagcagcaggaagcgggttgatgaaacttcagctgcaaatgctcctacctttaatgaaaaggaagaatgactcagagctcagagaacagaaccaacaagagcccagagggtgagcaagataactgaggagcaaggaaggataattcccaggcatggaaacctaatcaagggtctctggctggaagtcatccagctagatttcaaaactgctttggagcagtgactcctttctgtttcaccttccattttcctcctttttaaactggaacatctataactgtcactctatgtctgtcccaccgtcatatactgggagtgttggggagatcacctctctcttggatagagaggaaatgtgtctcaaaaaattaacccagaagcctcatccaaatctgggcctgatttacctgatgagattttaaacttggaatgatgtctgaatgggattagattctagggaatgtttggaagggctataaatcattggggtccaggccaggcacagtggctcatgcctgtaatcctagcacttagggaggccaaggcaggtggctcacttgaggtcaggagttcaagactagcctggccaacatggcaaaaccccatctctactaaaaatacaaaaattagccagacatggcagtgcacatctgtaattccagctactcgggaggctaaggcaagataattgcttgaaccagagaggcagaggttgcagtgagccaagactgtgctactgcactccaacctgggtgacagagtgagactctgtctcaaaaaaaaaattattgaaatgtggtaggcagaattcaaagatggccctcaagattcacatcccctgatgtacacaccttgcatgattccctccctatgagtgtgaacagaacctgtgagtattacggaataccaccccatgattatgtgtcattatatggcaaattgggttttgccaatgtagctaagaagtctaatcagttgactttgagtcagtcaaaagaaagattttcctgtgggcctaatctaataacaagagcacaatacagctggttcagagacagagaaaatcagagattctaaatagcagagacatttctgctgtccttgaaagagaaactcccatgttgtggagggggcaatagggaaggaaaaggcaggcaacttctaggggctgagagtagtcccagtaaacatggagaaaccctgcctctactaaaaatacaaaattagcctggcgtgatagcacatacctgtaatcccagctgctcaggaggctgaggcagaagaattgcttgaacctgggaggtggaggttgcagtgagcagagattgtgccattccactccagcctgggcaacaaaagcaaagctccgtctcaaaaaaaaaaaaaaagaaagaaaattgggaaaatagagttttatctcactccttatacaagaatcaactcaaaataaagacttaattttaagacctgaaacaataaaactaaatgccaatacacctaataacaaaatttcaaaatacgtggtgccaaaactgatagaattccaaggagagatagacaatccaccattgtagtcagagattttaatgccccactcttaataattgatagaacacagagacagaaaatcagtaaggtatttgggagattttcacacactatcaaccaacctgacctaaaagatgtttatagagcacttcacacaatgagagctgaatgcagttttttagtgtacacaggacacttactaagataaaaaacatattctggactattaaacaagtatacaaaaagcaggactgatgagcaaattcagtggagttgcaggatacaataccaacttgcaaaaatcaatagcacttctctacactaacaacaaatgcctgtaatcccagcactttgggaggccaaggcgggtggatcatgaggtcaggagattaagaccatcctggctaacacggtgaaacccagtctctactaaaaatacaaaaaaaaaggctctccctcctcccccccccccccacagtctccctctgatgtcgagccgagtctggactgtactgccgcgatctcggctcactgcaacctccctgcctgattctcctgcctcagcctgccgagtgcctgggattgcaggcgcgtgccgccaggcttgactggtttgtgtattttttggtggagatggggtttcgccgtgttggccgggctggtctccagctcctgaccacgagtgatctgcccgcctgggcctcccgaggtgccgggattgcagacggagtctcgctcactcagtgctcaatcttgcccaggctggagtgcagtggcgtgatctcggctggccacaacctccacctcccagctgcctgccttggcctcccaaagtgccgagattgcagcctgtgcctggccgccaccccgtctgggatgtgaggagcccctctgccctgccgcccagtctaggaagtgaggagcgcctcttcccagccgccatcccatctaggaagtgaggagcatctctgcctggccgcccatcatctgagatgtggggagcgcctctgccccattgccccatctgggatgtgaggagcgactccgcccagcagccgcccagtccaggaggtggggggcagcccccacccggccagccgccccgtctgggagggaggtgggggacgcctccgccctgccgccaccccgtccaggaggtggggggtgcctctgccctgccgccccgtctgggaagtgaggagcccctctgcccggccaccaccccgtctgggaggtgtacccaacagctcattgagaacaggccatgatgacaatgggggttttgtcgaatagaaaagggggaaatgtggggaaaagaaagagagatcagattgttactgtgtctgtgtagaaagaagtagacataggagactccattttgttctgtactaagaaaaattcttctgccttgggatgctgttaatctataaccttacccccaacccggtgctctctgaaacatgtgctgtgtccactcagggttaaatggattaagggcggtgcaagatgtgctttgttaaacagatgcttgaaggcatcatgctcgttaagagtcatcaccactccctaatctcaagtacccagggacacaaacactgcggaaggccgcagggtcctctgcctaggaaaaccacagacccttgttcacatgtttatctgctgaccttccctccactattgtcctatgaccctgccaaatccccctctccgagaaacacccaagaatgatcaataaatactaaaaaaaaaaaaaagaaaaaaagaaaacttgtaaaaaccaaacctttcacatttgtgcatttctgaaactggcattgggcagatgttttgcatttttaatacacatgaaagaccctttaataaaaccacggaagagattgaaaaaaaaaaaaaaaaaaagccaggtgtggtggcaggcgcctgtagtcccagctactcgggaggctgaggcaggagaacccaggaggcagagcttgcagtgagccaagatcacaccactgcactccagcctgggcgacacagtgagactgcatctcaaaaaaaaaaaaaaaaaaaaaaaattcacaatcatcaaaaaataaaatgaaatacttaggagtaaatttcaacaaagaagtgaaaaaatctgtatgctgaaaactataaaacatgaatgagaaaattaagatgacacaaataaatggaaagatatctcatgttcatggattggaagaattcatattgttaaaatgttcatgctacccaaaataatccacagatttaatgcaacctctatcaaaattccaatgtctcccttcacagaatagaaaaattagtcctaaaatgtgcatggagccacaagaaactctgaagagccaaagcaatctggaccaaaaagaacaaagctagaggcaaaacactaccagatttcaaaatctattacaaagcaaaagtaatcgaaactgcatggtactaacataaaaacaggcacatcaaccaatgaaatagaatgaagagcccagaaataaactcatacatcaatagctaattgattttcaaccaaattgccaaaagcacacaatggggaaagaacagtctcttcaataaatggtgtaattgtatattcaaaacagaagaatgaaaatggactctcgtctcactccttatacaagaatcatctcaaaataaattaaggacttaaatgtgagacctaaagctacaaaactactagaagaaagcatagggggaaagctccatgacattggtttggacagaaatttctgcataattccaaaagcatagtaaacaaaagcaaaaatagacaaataggattacagtaaactaaaaaacttttgcacagcaaggaaaacaattcatagagtgaagacacagccgacagactgggagaagatatttgcaaatcatacagcagataaagggttaatatccaaaatatacaaggaactcaaagtagtcaacaagcaaatgaataattctattaaaaaatgggcaaaggcaaaaagaacaaaactggaggaatcacattacctgacttcaaattatactataagctatagtaaccaaaacagcatggtactggtaaaaaaaacagacacatagaccaatggaacagaatagagaacccagaaataaattcataaacaagcagtaaactcatttttgacaaaggtgccaagaatatacactgcagaaaagacagtctcttcagtaaatggtgctgggaaacctggatatccatatgcagaagaatgaaactagacccctgtctctcgccatatacaaaaatcaaatcaaaatggattaaaagaatttaaattggctgggtggggtctcatgccggtaatcccagccagcactttgggaggcccaggtgggcagatcacttgacgtcaagagttggagaccagcctggccaacaggttgaaagcctgtctctactaaaaatacaaaaattagctgggcatggtggtgtgcacctgtaagtccagctactcgggagtttgaggcacaagaatggcttgaatctgggaggcagatattgcaatgagccaagatggtgccactactctccagcctgggtaacacagtgagaccctgtctcaaaaaaaaaaaaagaactaaatcgaagacattaaactataaaactgccacaagaaaatattgaggaaactctccaggacattggtctgggcaaaattttcttgagcaacacttcataagtacaagcaggcaaccaaagcaaaaatggacaaatggggttacctcaagttaaaaagcctctgcacagcaaaggaaacaatcaacaaagtgaagagacaaactgcagaatggaagaaaatacttgcaaactacccatctaacaaggtattaataaccagaatacataaggagctcaaacaagtctacagaaaaaaaatctagtaatccaatcaaaaaatgggcaaaagatttgaatagacatttctaaaaagaagacatacaatggcagacaggcatatgaaaggggctcaacatcattgattatcagagaaatacaaatcaaaactacaatgagatatcatgtcaccccagttaaaatggcttttatccaagagacaggaaatagcaaatgctggtgaggatagggagaaaagggaagcctcgtatactgctggtgggaatgtaaattagtacaaccaccaagaagaagagtttggaagttcctcaaaaaaataaaaatagagctatcatataatctagcaatcccactgctggatacataccccaagaaaaaggaaatcagggtatcaaagggatatctgcactcccaggtttgttgcagctctgttcacagtagctaagatttggaagcaacctaagtgtccattgacagatgaatggataaagaaaatgtgatatatacacactgtggagtactattcagccataagggtagtggaggtgtgggtgggaggtgaggatgactaatgggtacaaaaaacaatagttagaagaacaaataagacctaacacttgatagcacaacagggggactatagtcaataatagtttaattgtaatttttaaaataactaaaagagtataattggattgttggtaacacaaagaataaatgcttgaggggatggataccccactctccatgatgtgattatttcacattgtaggcctgtattaaaacatctcatgcaactcataaatatatacacctactatgtagctacagaaaattaagaattaattttttttaatttaaagacaaaaaaagtagcaaaggaattgaatagacatttctcaaaagaagacatacaaatggtcatcagatatatcaaaaatgttgcccgggcatggtggctcacacctgtaatcccagcactttgggacgccaaggcaggcagatcacctgaggtcaggagttcaagaccagcctggccaacatggtgaaaccccatctctactaaaaatacaaaaattagctgggcgtggtgggatgcacctatagtcccagctactggggaggctgaggcaggagaatcacttgaacctgggaggtggaggttgcagtgatctgagatcacaccattgtactccagcctgggcaacagagtgagattccatctcaaaaaacaaacaaacaaaaaaaatgcttgtctctagccatcagagaaatacaaaggaaaaccacaatgagatatcacctcacactgttagaatggctattaccaaaaaaatgaaagataacatgtgttggcaaggatatggagaaaatgtacagattgtacattgttggtggcattataaattagtatagacgttttgaaaaacagtatggaggtccctcaaaagcctaaaaataaaattgctatgtgatccagcaatcccactactgggtacacacccaaagaaactgaactcagtatgccgaagagatgtctgcactccatgttcattgcagcactagtaagaatagcctagctatggaaacaacctcagtgtccgtcaacgaatgaatggatttttttaatgtggtaaatattcacaatggaatgctattcagcctaaaaaaaaaaaacaaaaccagaattctgtcatttgggacaacatgcatgaacctggagattatgttaagtgaaataagccaggcacagaaagccaaatgccatataatctcacttttatgtggaatataaaaatgtcaaacacacagaaatagagagtagaatggtggttaccagcggctggtggtctgggggtcagtggacagggaaagagaagatattagtcaacaggtacaaagttacagtcagataggagaaatgcattctggtgttctattgcacagtatagtgactatagttaataataatgtatttccaaatagctaaaagagagacttttaaatatcctcaccacagagaaatgataaatatttgaggtgaagtacatgctaattggcctgatttgatggtcccacatcatacacataatgggaaacatcacattgtacccccaaaatatatacaactattgtttgtttaaaattatacttttaattgaaataaaataaaagttttcaagtgatttatgttctctctccataataaatcagtatataaaaatcaaattcatttgtatctacaagcgacaaacaactgtaaattcatattttaaaatatcatttataatagcatcaaaaatcatgaaacacttagggataaacctacaagggtcagcaaattacttgcttatctgccagatctagcctgcagcaactatgaaataagtgagtttgcatatttaaaggattggggaaaaggtgtttaataaaataaatttttaaaaaaatgctgagactatatatgtcccacaaagcctatttattttctggctgtttgtagaaaagttttatcaacctctgtattaaacaaatatgttccagatattaaaccaaaagaatgactcataaatttaaaaattgataatttggacctcatcgaaataaagtctgctcattgaaagactgttaaaagtatgaaaggacataccacagattagaagaaaatatttgtaaatcatatatctgatataagatttgtctctggcatatatagggaactctcaaaactcagtaataagaagtcacaacccaattagcaaaatattaattaaacgaataaatatttactcaattttttaaagaaacaaaactcaacgaggactagaatcaatgtcatggagagcatctgtgcaaacactaaggtaagcatcatgcaatgaccacagccacagagctttctcatttcacgtggggagcaggagctatcagcattctaatgggagtcttaacaaacaggtcagataacaatgggaaatcaggtgtgtacaagctgtctaaataaagataaactgtccttgtatgaagactccacaaaccatcagaattaataagagaatgtagcaagacttttgatacagtctacaaaaatcaatagcattcctatacactaccaataatccattaaaaatgtaaaaataaaaagatcctgtttacaaaaagaaattttaaataagaaactaggaataaatctaacaaagtataagctcttcatggagaaaattacaaaatctatttgatgggtgatagaacaactaaatggagatgtatgcctggttcatgaactgtatacctcaatattgtaaagatgtctgggccaggggcggtggctcaagcctgtaataccagcactttaggatgctgaggtaggcagagcacctgaggtcaggagttcaagaccagcctggccaatatggtgaaaccccatctctactaaaaatacaaaaattagctgggcgtggtggcagatgcctgtgatcccagctactcgggaggctgaggcaggagaatcgcttgaatctgggaggtggaggttgcagtgagccaatatctcaccattgcactccagcctgggcaacagagtgagactccatctcgaaaaaaaaaaaaaaaaaaaaaaagatgtctcttctgccccaaactcagtacaattcccattgaaatcctactcaggtgattctgaatttaagataatatattcgtcataagataagcaaatgaaaagggggaggggacaaattagaaagcccagaaacatcttttgaaacttgttaaagacagagaaaacatttcaaataaatgaggaaaaatattttcaataggtgatactgtgacaattgtttaactttattcctccaataaatagaataatctacctaatttacactcaacaaagattgaaagtggagttaatgtgaataacaaacccttaaaattgtattttaaaatacacagaatacctttacaaccttagagtaagaaaagatatcttaaacaagagctaaatcatatactatttaaaggagaaaattgttaattttgaccatattaatattaaaatctctgcacaaaataaaaccataaaccaaacagtagcagtagtcacagaaagatttgcaggcacatcacaaaggattcatttctataatatgaaaattcttccaaatcaatttttaaaagacacaaaacaataaaaatggatgaagaataggaacagacatttccagaagggaaaaaacccaaatggccagtaaatatttgataagatgctcagcctcatgaaacattcagaaatccaatttcaaaaaccataatatttgcagggtttttttactactaaaatgcattatttggatgcaatatttgattatgcgaaaatatattctgggcgggatgcagtagctcacacctgtaatcccagcactttgggaggccgaggcaggtgaatcacttgagcccaggagctcaagaccagcctgggcaacatggcaaaaccccatctctaccaaaaatacaaaaaattagctaggaatggtggtgcacgcctgtgctcctaggtactcgggaggctgaggtgggaggatgacttgaagtgggaggatgacttgagcccgagaggcagaggttagagtgagcccagattgcgcccctgcactccagcctgggcaacaggagtgagaccccatcaaaaaaagagagagagagagagattctgtatactgctatttttgccacttgtatatatgtatgtgtcactgtctgtttttatgaaaaatgttattgaaggataacatacatattcaacagagtgcacaaatcatcagtgtacaagatgacttttcacaaagtgaacacctcatagagcagaacaagatattagcatccccccagaaaccctccctagcacacaaggagaacaattaaccctgacttctaacaccacagatttgtttggccggctcttaactttatatcaatgggattgtacaatgcataatctcttttgcctgctttttttcaacgttttgtgagattagtgttgcataaatcacatgctcaagattcagtctcacttccaaatagaattttgtcacatatgcaaactacaatgtatttattcattttactattgatggatatgggttgtgttcaatttttgaatgttgctttgacattctttttttatatatacttaagttgtagggtacacgtgcacaacgtgcaggtttgttacacaggtatacatgtgccttgttggtaagttccagggtacatgtgcacaacgtgcagatttgttacataggtatacatgtgccatgttggttggctgcacccatcaactcatcatttacattaggtatttctcttaatgctatccctcccccagcccccaccccccaacaagccctagtgtgtgatgttccccaccttgtgtccaagtgttctcattgttcaattcccacctataagtgagaacatgcagtgtttggttttctgtccttgtgatagtttgctaagaatgatggtttccagcttcatccatgtccctgcaaagcacattaactcatccttttttatggctgcataatattccttggtgcatatgtgccacattttcttaatccagtctatgattgatggacatttgggttggttccaagtctttgctattgtgaatagtgccacaataaacatgcatgtgcatgtgtcttcatagtagcatgatttataatcctttgggtatatacccagtaacgggatcactgggtcaaaaggtatttctagttctagatccttgaggaatcgccacactgtcttccacaatggttgaactaatttacactcccaccaacagtgtaaaggcgttcctatttctccacatcctctccagcatccatagtttcctgactttttaatgatcgccattctaactggcatgaaatggtatctcattgtggttttgatttgcctttctctgatgactagtgacaatgagcattttttcatctatctgttggctgcatgaatatcttcttttgagaagtgtctgttcatatcctttgcccactttttgttggggctgtttgtttttttcttgtaaatgtgtttaagttctttgtagattctggatattagccctttgtcagatgggtagattgcaaagattttctcccattctgtaggttgcctgttcactctgatggtagcttcttttgctgtgcagaagctctttagtttaattagatcccatttgtctattctggcttttgttgccattacttttggtgttttagtcatgaagtccttgcccatgcctatgtcctgaatggtattgcctaggttttcttctagggcttttatcgttttaggtctaacatttaagtctttaatccattttgaattaatttttgtataaggtgtaaggaagggatccagtttcagctttctacatatggctagccagttttcccagcaccatttattaaataggtcatcctttcccccgtttcttgtttttgtcaggtttgtcaaagtcagatggttgtagatgtgtggtattatttctgaggcctctattctgttccattggtctatatctctgttttggtaccagtaccatgctgttttggttactgtagccctgtagtatagtttgaagtcaggtagcatgatgcctccagctttgttctttttacttaggattgtcttggcaatgtgggctcttttttggttccatatgaaactttaaagtagttttttttccaattctgtgaagaaagtcattggtagcttgatgggaatggcattgaatctataaattaccttgggcagtatggccattttcatgatattgattcttcctatccatgagcatagaatgttcttccatttgtttgtgtcctcttttatttcgttgagcagtggtttgtagttctccttgaagaggtccttcacatcccttgtaagttggattcctaggtattttattctctttgaagcaactgtgaatgggagttcactcatgatttggctctctgtttgtctgttattggtgtataagaatgcttgtgatttttgcacattgattttgtagcctgagactttgctgaagttgcttatcagcttaaggaggttttggggtgagacaatgtggttttctaaatatacaatcatgtcatctgcaaacagggacaatttgacttcctcttttcctaattgaataccctttatttctttctctttcctgatttccctggccagaacttccaacactatgttgaataggagtggtgagagagggcatctttgtcttgtgccggtttacaaagggaatgcttccagtttctgcccatttagtatgatattggctgtgagtttgtcataaatagcttttattattttgaaatacgttccatcaatacctagtttattgagagtttttagcatgaagggctgctgaatttttttaaaggccttttctgcatctatagtattctctttttttctgcatctatagcattgtttttttgttttgtttcgttttgttttgtttagatggagtctcactctgtcacccaggctggagtgcattggcgctatctcagctcactgcaacctctgcttcctgggttcaagcaattctcctgcctcagcctcccgagtagctgggattacaggtgcctgccaccacactcagctaattactgtatttttagtagagacagggtttcgccatgttggccaggctggtcttgaactcctgacctcaggtgatccacccgccttggacccccaaagtgctgggattataggcatgagcgaccatgcccagcctgcttcaacattcactgaggcacagtgggatgaagtgatgttgagtagattgcctagatgtggaactactgggcagttgtaggctcagctttagcaaataaagctgaactgttttctaagagattataccatttgcacctccaccagctgtgcagaagtgtctctgttgttcgacatcttcaccagcagtgtagcttttaaaggtaatgtagaggtagacatcacaccatagtttaatttgaatctaataacttaagaggttgagcatcatttcaaatgtttattggccatttggacgtctcttttgtgaagtacctagtcaatttttgatttttggtttgtttttcccctcattttgttattgggttgttgttcttttcttactgatttgtaggagttctttatatagtctagatcctagttctttgttatattatgtctattaaaatacattctcccattttcggggctgacttttcactctcttaaaggtatcttttgatttctttaaaaggtcttaattttaacatagtccatttgatcaatcttttcctttgtgtctaccatctttgtttctcatttagagaagcctctgcttattcaagttcatgtagacaattgtgctattcttctacaacttttgtttagatctgtgatcctactgagatgtatttagatctgcaatctatttgaaattcaggtttttttttgcttgtgggattatttttgtatgttgtgcagagggcaagatggttttcccatatggacactagcatctttgatagaagcctccatcctttcccaatgcactgcagtgttatctgtggggaaatcaagtgactgttacatacggggctgtttctggactctattctgttccactggtctcattgtccattcttgaatgctaccacattgtttcaagaaatcagatacctgatagtcacaagagtttgtatgtgcacgtgtgtgtgtgtgtgtgtacgtctgtgtgtgtgtgtgtgtttggggttttattttgtgtgttgggctttctgtttgttttttcaagactgtcttaggtctctggacccttcatttccatacaaattttaaatctcccactctatgaatatgacatagctctcaatttatttagatcttatttaatttctctcaataatgttttaaaattttctatgtagagttttgcaaatttttaaaaatttctttgtaggatttttattattttgtcactattataaatggcatctttttaaatttcaatttttaattgttaattgctggcatatagaaataaaattaattttcatacaagccttgtattgcctacattgttaatttcacttattcattctaattcttttaactagagattcttttggatttactatatatacaatcatgtcatctgcaaataatgatagtcttatttattatattcatatcttaattacttttattgctatttttttcttgccttattgcactgtctagaatgtccagaacaccacccagtagaggcagtgacagaggcatttctttcttgtcatcaatcccaggaggaaagctttcaatatgccacaatgaagaatgattttgccagagttatctttaaaggtattttttactatattaaggaacttgccacttatttccagtttactgaacgcttttgtcatgaatgagttattgaaactctatcgagtgatttttctccatctcttcttcattctgataatgtggtgaattgcactaatttcctaaagttataccaattttacaatcctgggtaaaaaattaaaatgatatcgcttccttttctgaaaatattttgtttaggactttttacaactaccttcataagtgaaatttacttgttgtattagtttgttttcacattgctaataaagacatatccaagactggataatttataaagaaaaagaggtttaatgggctcacagttccacatgcctggggaggcctcacaatcatggtggaaggcaaaggaggagcaaaggcacaccttatatggtggcaggcaagagagcgtgtgcaggggaactgccctttataaaaccatcagatctcgtgagacttattcaccatcagggaaatagcaagggaaaaacccatccctataattcaattacctcctaccgggtccctcccacaacaggtggggattatgggagctacaattcaagatgacgtttgggtgggggcacagccaaaccatatgacttgtgatttttctttctgttactatccagtatttgtatgatgtttattctaatctcatggtactaattaagcatattctcacttcttctattttctagaagactttgtgtaatatctgtcttatttcttctgaataacaaatgttctgaagaattcaccagaaaagcctctttgtgagaaagattttaagaaaaatttcactgttcatatttttgtgtcattttcaatgtctttcagaaatttatttcatctaaattataaaatttactggcataaaattattcataatatttatgaaaatttttttttgagacaaggttttgctctgtcacccaggatagaatgcagtgatgcaatctcagctcactgcaaactcaacctcccaagcttaagtgatcttcctacctcagcctaccaagtacctgggactataggcacatgcccccacacctggctaatttttgtatttttgatagagatgacggggttgcaccatgttgcccaggctggtctcaaactcctgagcccaagcaatctgcccacctcagcctcccaaagtgctgggatcagagcatgagccaccatgcccagctgtttatgatctttttgatggcattaaaacctgtagttatgttccattcccaatactagctatgattcatatatgactccattcctgatattggccaaacaagtcacatggccatgcttagcttcaaggaggctaagaagtacaattgccccatatgcccagaagtagggagagtcagccttcagggaacataaataatgtttctcatactttatttccaagagcacaaaggttattagaagaagacaggactcaaactcgtggccatgcatgaagcagggcactgcctcccaggggagtaagcagctcctccagttggacctgacaactgcctttccatcctgctgaggaacgcacaccctgagcggggcacctgcagtcccatgggccctgccccagccctgggcaggcacagactgctggacctaagcacacaatgacttttagaatagacagctcttggaataggttacagccttctttattgtgtttgaaaagtaacaattttccctggcaaagttttgcattgagcaagtaggtgttaaacttattataagaaaattacccttggtaatgatctgaacttttaaaaatccatttcccatttctgaaatgagagctcaatttctccccacattttatttgtttcatggcacagattggaaatagtatcaattttctgccagcatattaaaacatgtttttattaactagtaattgcagtgagacttggaaatcaggaacaaaatgcttctggagaattgaaaatatatatttctgatttccttaataaaaattataactctacagttactgtagtttcttatgtttgccaatcctgatatagcagctcacaatgggaattttctctatttttctaccacatatgaatattgagaagctcaaggtcgtacgtaggtaactctgaagaccacacattagccttactatattgtgcagtcactttggcagagtttcataaataaagcagatagcataagatggtgctggcttatggaaacctaatcagaacatctcagtctgggaaacacagtggagacgtggaaagtcagatgcaccatatccgaacaccagcctcacccatatgtgctgtggaatctcaatcttggtgggcactagttgccatatctggatagtgagaagactgaagaccagcttgcaaattgccatcaggattaattgtgaaaaatataagttgaatgcttagcagcattcctggaatgtgggtggcactcccatggagaaactgaacaacaccttgaccaggtgatgaaaattaacatcaccactgagaaacagacaggcaccatatgcctcgagatgggctgccctgagggggacacagcatcgcctctctagcattctggcctaggatacataacccaaatctagccatgaggaaacattaggcaccattctatttaaaaagttggggggagagggaaagtgactacattcttcaaaaataccaaagttataagagacaaggaaaggctatggcaatgttccagattaaaggagagtagaatgacagagcagcaaatgcaatacctgatcctagacgggttctctataggagcaggagaaatgctgtaaaggacattactgggacaattgacaacactggaatatggttaacagattagaaaaaaagttactgaagttgttatttgcttgttcatttgtttgtctgtttgagagggagtctcgctctgtcacccaggctggagtataatggctcgacctcagctcactgcaacctccacctcccgggttcaagcgattctcctgcttcagcctcccaagtagctgggattacaggcacacaccatcccgcctggctaatttttgtagttttagtagagacgagggtttaaccatgctgaccaggctggtctcgaactcctgacctcaggcgatccacccgcctcggcctcccaaagtgctgggattacaggtgtgagccactgtgcccggcctgaagttgttatttgaaccaaagagtgtgtgagaatgctttttcttaggaaatacttaccaacgtatttagtgataactaaatggatatatagatatagatagatatagatatagatatagatatatagcacagagacagggaaagagaaaacaagataaagcaaatgaacaaaatgttaataaaaggtgaatgtgggaaaagagtatatgaatattccatgttctattcttattcttgcaactttcctgtaagtttgaaagtattttcaaataaaaggtttttaagtgtctctagtgacaataaagacacttatgaaagataagcatgtaaggaactttcataaagttgttccatgaaatatgaatgaaaataaagtgatatttacaaattaatgattctatatattatttcaaatatgtatatgtaactaaatgagttaattaaacattatgagtagatattgactatctctttctcaccttcaaagtttttatatataagttggccaaaactacgtttttctttctctttttgattcactgagaaaatggaaggttcgccattattccgttaccatatattcagcatgtataaaccacatgttacagtgacatcttctggtggagtataatattgcagtctagttctattacatcttcaaataaactgtactaaggtggttccacagaagcatgcaggaaaggagcaagaagcaagcatgggggctccaagcttcacccttacttcaagcaaaacagttcagtttttaacgtggcttatgcaggcctggaagctgcgacagtaagacttgagtaacttatggtcaagtacaggtggatgagtaaacctaccaagagtgggcaaaggtgttgaaaagtgcattttttataaaaagagtcatatcattacctgctctttctgaaaaaaaagtgttgatccttcaaaagcatttgacaaattaatgctatgaatgaatgcttaaacggtgcatgagtgaagatcagcttcagggacttcaggagcaccatttatttagcactaaccaagatgcaaactacaaataagtgaggaggacttcacaaactctttttacacatcctcaaaagactattgggcatcttgattgtgccacacaagatctagcaacaatattaatttgaatacatgtctggcaagaaaggaataatgttttcatcaagaggcaaccagggatgatgtcacagaaaatgatggtatacattgcttaaagaattgatccctccgttgaaacaatcataagctgtcaaagactgaaataatcaacgtttttaaacactgagctctaatctcaaatgtacagccacaaaggggtggcttaataaagaaaagggaagctagctttggtaagaaagcctagtggcatttttgctcatccaccttccttccattccctagcacagcagcatcagccatgatgacagaaggctgcattccctgtgtggctttctggtgccaggggttaatacagagtttattcttaaagttttatggtactgtgtattcatctgtctgatggttccctggaagactaaattgacctttttcttgaccttttctttccacctggtgtagggaactgtgctcaggcaactggcagaccaaaagccaaaaagaaggagcccaaaaaggaaggttgttggaagaataagagctcagaagggctactgtgtatgctggcaaagatagaagataacacacaggcccagaacaggacacatatgagaaaacatctaaaaggaccccaggcttgtacctctgacagatctgtgggctccaggcaagcaagaggcaaaagctaaggcatagttgcaggaagcctggcttagcactgaaggaactcctgtcccagctcagagccaagctgcaaaagtcaaaacacgagtatcttctctctttcttgttttctcgtttcattcatgtatttatttatttctccctttctttttttctttcactccagatacttaaggaaatctctggaatgtcactgttgaccactgagataatgaaacagagacttcagtgaccacaaatgacaaagaatccagtctttgcaaaattagtttggagaaatcactaaagaaatagaggacaacattcatcaagaagaaaaaataataacaaactctagggaatggagataatctgatttccagggtaaccacattgtaatattcaaaatgcccaattttcagcaacaacaacaaaaatcacaagatatacaaaggaataggaaagtgtggcccaatcctagaaaaaaattatataaaccatccatgaggaaaccttagtattggacttactggacaaaatttttatatcaatcatcctaaaatgtttaaagaactaaagaaaaccatgaacaacaaactaaataaaaccaggaaaacagtgcacatacaaaatgagaaaatcaataaacagatataaattataaaataaaccaaacagaaattctggaactgaaaagttaaatcaccgaaatgaaaaatttggcgaggcatggtggctcatgcctataatcctagcattttgggaagccgaggcaagtggatcacctgaggtcaggaattcaagaccaacttggccaatatggtgaaacccatctctaccaataacacaaaaattagcttggtgtggtggtgcacacctgtaatcccagctactcgggaagccaaggcaggagaatcacttaaacccaggaggcagaggttgcagtgagccaaaatcatgccaccacactcctgcctgggtgacagagcaagattccatctcaaaaaaataaaaaaataaaaagaaaaagaaaagagaaagaaaaattcaccagaggggttaaacagcagatttgaacacaccgaaaaatgaatcagagaaatcaatgataggataattggaattgtctgatataaagagtagaagaaaaaaagagaacaagacactatcaagcaggacaacatatgcagtatggaagtcccagaaggaaaacagaaagaaaggggcagaaagaactgttgatgaaataatgaatgaaaactgtctaagtttaatgaaatatattaaactccaagtaggataaattcaaagagatccacacttagacacattacaatcaaacagttcaaagacaaagataaagagaaactcttgtagtggcaagacagaagcaactcattatgtacaatagattctcaataagattaactgtaattttcccatcacaaaccatggagaacagaaagcagtgagacaatatttttaaaccaccaaagaaaagaaaaaaaaactgtaaaccaagattaaataaccagaaaaactaatcttgaaaaatgaagaagttaaaacattcccaaccatcaaaagctgagtgaatttgttactagcatatctaccctacaggaaattctaaagggagtcctttacactgaaatggaaggacactaaacagtaacacgaagcgacataaagaaatagagaggtttctaaacatcaaagccagtattacatttttttaatttgtaactccttctttattccctaaatagtgtaaaagataaatgcataccaaattgaaatccatgtaaatgggcccacaatgtataaagatgtaatttgcaacaccaacaatttaaggtggggatggagctgtataggagcagagttttcatatgttagtaagactgagttggtatcagttgaaactagatggttataaatttaggatgttcattgtaatcctcattgtaatcattaagaaaatatgtttttaaaatacacaaaaggaaatgagacagcaaaatggttcactaccaaaaaaaaatttaaaaagaagttagtaatagaggaaatgaggaacaaaaagtataagacatagagaaaacagacagaaaaatggcagaaataaatcccattttatcagttactactttaaatgtaagcagtttaaactctccaatcaaatggtgaatagtaacagaaaggattcttttaaacatagtctaactgtatattgtctaagatattttagattcaaatatttaaaaagtgaaagtatagaaaagatactccatgcaaatagtaaccaaaagagagctggggtagctatgtaaagatcagacaatacacacttcaagtcaaaagctattacaaggccgggtgtggtggctcacacctgtaatcccagcactttgggaggccaaggcaggcggatcacgaggtcaggagatcaagaccatctggctaacatggtgaaaccccatctctactaaaaaaatacaaaaaattagccgggcgtggtggcgggtgcctgtagtcccagctattcaggaggctgaggcagaagaatggcgtgaacccgggaggtggagctcgcagtgagccgagatggcgccactgcacttcagcctgggcaacagagtaagacttcgtctcaaaaaaaaaaaaaaaaaaaaaaagctgttacaagaggctggacatggtggttcacatatgtaatcctagcactttgggagactgaggcaggaggatcgcttgaagccaggagttcaagagcagactgaacaacaaagcaagaccccacctctaccaaaaaaagttttttaattagccaagcatggtggcacacacctatagtcctacctacttgggaggcgtagttggaggactgcttgagcccaggagttggaggtcacggtgagctatgattgcaccactgcactcctgcttgagcaacagagtgagactctgtcttaaaaaaaaaaaagaaaagctgttgcaagagacaaaaagaacactatgtagtaattaaaagaccatcagaagatacaattacaaacatatacacactaagcaacacagtcccaaatatgtgaagcatacattgacaaaattaaagggaaaagtagttctatagctggagacttcaatacctcattctcaacaacgaatcgaacatatagtcaaaagatcaataagaaaatagagggtttgcacaacatcacacaccaactagacctaagagacatatatagaaaactccaccccaaaaagagcagaatacacatttttctcaagtgtgcatgggacattctttggggtagaccatatattagaccacaaaacaagtctcaataaattttaaaaattaaaattatgtaaagtatcttctctaaccacaatggaataaagctagaaatcaacatcagaaggaaactgaaaaatttgcaaatatgtaaacattacatttaaataaccaatgggtcaaagaagaaatcacaaaaaaattagaaaatatcttcctacaaaggaaaataaaaacccaacatatctaaatttatgagatatagcaaaagcagtaatcagggcaaaatttatagctgtcaatgcctacatttaaaacaagagaaaaaatctcacattaataacctaactttacaacttaaaaaaactagaaaaacaagagcaaactaaatttaaacctagcaggaagaaggaaataatgaagattagagtggagatttatgaaatacaaaatagaaaaataacaggaagaatcacaaaaccaaaacattgttctttgaaaagatcaacaaaatgacaaagttttagctagactgacaaagaaaaaaagagaaagatgcaaaaacctgaatcagaaatgaaagtggaaacattactacaaacctgacagaaatttaaaggattataagaaaatactgtaaacaattatacaccaacaaattagataacctaggtgaaatgaaaaaaattcccagaaacacacaaattaccaaaactatcttagcctgccagggctgacataacaaagtaccacagactaggtggcataaacaacagaaacttattttctcacagttctgtaggccagaagcccaaggtcaacgtgtcagcaggtttagcttcttcggaggcccctctccttggcttccagacagctgacatttcactgtgtgcccacatggccttttccttgtgtgcacacatccctggtgtctgttcctcttcttattaaggacaccagtcatattggattagggcaccacatttttggcattatttagtcttaattagctctttaaaggccccatttccaaatacagttacattggggttcagggtcaatatattaattgggaaaaggacacagttttgtccatagcactgatttaaggagaaatagaaaatctaaacagatatataacaagagattaaattagtatcaaaagtctcccaacagagaaaggcccaggaccagatggattccctggtaaattataccaaatgtttaaataaaaattaatgcaattcttgtcaaaatcttccaaaaaatacaagaagaggggagacttcctaatgtattctatgaggtcagaattaacttataccaaagccaaagacacaaaaagaaaagaaattacagatcaatatttctaatgaatagagatgcagaatcctcaacaaaatactatatatccaaatgcaacaacatatgaaaaggattgtacatgatggccaagtgggatttatcccgggaatgcaaaggtggttcaatatatgaaaattaatcagcgtaatatgcatttctagaacaaaaggaaacacaattatctcaatgcagaaatgagcatttgatgaaatctaataccttttatgattaagaaatagtcagaaaacaagaatagaagtaaactttctcaatctggtgaagaatttttatgaaaaactcacagctaacagcatatccaagagacatattctgcaggcatattcaaaaagctaaaagatttcccccttagatcaggaccttcagatcaaggatgcctactttcactatttatttaacattgtacttgagatgccagccagagcaattaggcaaggaaatttaaaatatccaaattggagaggaaaaggtaaaactatctctattcaaagaatacatgatcctacatagtaaatcccaaacagtctacacagaaagtactagagctaatcaacaaagttgcagggtaaaagatcaacatgcaaaaatcagttatgtatctatatgtcagcaataaataatctgtaagggaaattaagaagtcaattctatttacaatgacatcaaaaataataaaatacccaggaataaatttaacaaaggatatgaaagacttgtgtactaaaaactataaaacactgctgaaagaaatttaaaagacctaaataaatggaaaactatctcatctttctggattggaggacttaacaatgtttagatgacaatactactcaaagtgatctacaaattctatgcaatccctgtcaaagttaatggtctgtttttcagaaatggagaagccaattctcaaatttgcatggaattttaagaggccatgaaaagctaaaacaatcttgaaaaagaagaagaaacttggagtactccgcttgccattttcaaaacttactgcaacgctacagtaatcaaaacagtgtagtgctagtataagaataaacatacagaccaatagaatagaactgagagtccagaaataaacccactgtctatggacaattgcttttctacaagggcatcaagaacattcaaaagagaaaggacagtctttcaacaaatggtgctgagaaaactggatatccacatgccacatgcaaaagaatgaaattggaccccctacctcataccatatacaaatattcactcagaatagatccatgaacctaaatacagtaaaagagctaaaaccactttttcaaatcttaggataaaacatagggataaatattcatgaccttgaaacatgttggaactagatagaggtagtgttgcataacattttaaatgtacaaaatgccattgaattgctcagtgtaaaatggttaaatttatgttatatggacctcccctcaataaaaaagaaattaaagaaatgaacaggactgagagtcagattaaaagttccaatttcttttttgcaatgtttgatcttgtggcggaatgcccttaacctctgtctcactgaaaaattagagatgagagttcctgctctgtatatgttacaggattcttaaaaaggtcaaaagaagtgttgtactgaaacagtcctttgatactgctaggtgctctgccaacacaagctgccatggcgattcctgcccagtcctgtcagtgccgtgccaggcgcctgggctggtgtgtgcatttgtagtttcattctcacagtgtgggtgtggttacagagggggaaactgggaattggagaggtggaaggacctgcctcgtggcacaggactggagctcagatttctaattccagacacacaaagctctttccaccacaacctactggcccctgcagcagactctcccagctctttgccttcagagttgcctgttttagtgggaatcctgtgcaaatggcagtaattattgaaacttttctaaataactcttctgtcagcctcactcaatcacttggtttctatccctaattcagatgccactcccggtcaagaccacactctcaacagccaccaaagggcttggaaagaacaagaaatacccgcagcagctgctccattatgagagatggtagtttgtgctgaagaaaagcctccacatgagctggaaagctggcatgcacagaccacgatgcccccagtctcccacccccccaccacccctccacagcgggctgcatacactggaagagcgggtgcataggaagaggaaattaataggcagtgtggaaaggcaggggggtcccgggtggccactgtgcctctctatgaactaagagagtaatagtagcagcaggtatttgctgtgagccttcctgttgcaggcatggtccttaggagagattcactattctcataacaaccataccaggtgggactgtttccccatattcagaaacaatgactgagactctggtgatgtcccccattcttgcaactgacagggtctggggtaggtgctggcagggagctgggcagtgagggcaacaggcacattcctgcctcaagcagctgacagtcttgtggggttaggggctggggagaccctgacctcctgcaaagcgcttggtgttggtatgttgccatgataggcctcagtaagaggcagcctggacaagaacaactgcacagagaacaggaggagaggtcaggggagccgggcgtggggtcccaggtggagggaaggaaaggcaggagagagcctgccagggccctgcagggtggcaggaagacccaatctcacccctcactcagctgtgccctctggagatgaggttccgggctgccagcccagcagccgtccacctttcccaagctcagaggcccagctgggcgctgggagcaggagtgttgtcatgcgtgaggaaacctccagaggagagcatcaggcacccagcctggaggcttgtgggacctctctcctcccagcaccaggacacctttccatacctggggttccaggccacacttagtgacctccttagggaggtctgtctcccagcaagtctgtctctccaaactgaaacgtccctgtctgaacaacagagagcacctcccgtagggcaccaggggtgagtaaggcaggctttggggcaggcgtgggggtgacccttcctgtacactgagcacagtcataacccctctaatccttgtgacaccctgggaggtagcaactattagacatttgacagcctagggaactgaagcacagcaaggttatgaagcctgtgaggtcacagagccaatgggtgtggggttggagttccacctgcagacgctggctctgagtgcccaccgaccccaaatgagggcccacacctgcctatccctccacctgcctaggatctggacggcagatgccccacatctcctggtagaggtcaaagaaacagacaccctgatggagctgggcagaggacactgaaggcaggggcgccactgaagattccaagcagtggcagttgcagacatgtcacaggcgcatggcagaaagcaccaggctaaccagggaggggctgtcagcgtctcctgaaaagcagtagagataaggaaaggcacagcctgaggcccggagctgtgagctccgtcttcacctaacggagggctttcagggctcatcaggtccagagaaccattaggtggagctgctgatgtccgagacgagaggatggaacgtggttttgccatattagactccatgcctctgtgattcatgtgatttcaattactctctctgatcttactgaacactctttatacatacaattcatgtcgtcaaaaatcaatgtgtctgaaggtattgaagtcttttaaaataaagtcaatatttctcacagactccagtcccccagtggataagtggtcaggcttcctcaaagatcactttatgcttactaatatcacatcaaccagatgcagggtgaccatatagggtgatccaaaaggggacacttttgagagtgaatgggggccctattatgatgctataacaacaggcaaaactggatgtggtctgccacctggggcatgtggtcaacctggacagagaggacatgagcagtgccaccatcaaccagatgtgccccagtggaaagacatctggcttcttgcagagtggcatatattttcttgaagaacaatagtttccaaacacaggactatggtttttgtgtcttcaaatacctgccgtattatgactagtttatgccattaagctgatgtaagatgaacagaaaagggtagtaaaaagacaggttgcaaagtttaaactttcagtgtccttcatccaaggaagtcctttaaatgtggattaagttatcacttcggcagaatttaagtatgtttttcagatttagttacaatttagggcagagttataagtacatttttagaaataatgacaaatcattctcaaaatagatggtttaggccatgcagaacagtcattttaataaaatttaacccaagcatcaaaaatgggctaatctatattgttccatttctttccatcattcttttatctggctccctacagggagctaatttaatttgaaaagatgggagatattggctccaatgtgtgttcccagggacatcagagcagaatgagatcactcagaaggaaacttctctctcatatctgtaaatggtgaggtctacaaagtcttcttcttgaggaagctcttataaaccacagcagtcttcaaaatctgattttcatcaaaaacccttggtcaggatctagttgtattgtgggggaaaaaatcctgagcctggtgttttgtcagtgtcctgagccagacacagtggccacaggtccctgccaagggagaaatcacgaggtgcgacgaacaccttgcaaatgtctgtagacatcccactatttattactgggaagaaaatctcatttgatacaagttgggaatttggactctgacctgagaaaggtaggttctctgattcagtagatagaaaaaaaaatagacgctctgtctggacaggagtacaagctggaggaaaacccagcttgtagcagtcatgacacctgacctgtgtgaaaaccagtcccttcatgcatttgatttcaattgtcacagcagcgctgtggtggaactggcaaactcccaccaaaccccttcccttgctctgggcacacagtatggaacacacttcccggcagcctttgcagccctgtgactgctccagggctacgctccagccatgtgactacgctccagtcgtggactgggaatgaagttgacgcatgctgagtgagctcaggcaggtcttctactctctctctcttccactgtctgcagccacatgtcaatgccaagggtatccaggaccggaccttggggatggcagggactctgtcagcctgggtctgtgagaagtgcagagagcaccctccacttctcacctctatggactgggcttccctgagtaaggaattaaattctaaggtgttaagtcatgccaccgagaagctgaggttgatctactatagcagctagctttatcttagctgataaaaacagcacgtggttaggtggcactgggctggtggagggaggggatgcaaacatgcgtggcctgccttgaacctaggatgccccaggcctcctgcctgcacctaccatataggggcacggccatcctactggagagctatctgactccatttcaccaccaaggaaaacatggctgagaggccaagtaatttgcctatgattaagcagctggcaagggttacaagcaggatttgaatctgggtccacccagatcccaaactgaattatcttattaaaacagagccctggctgccctggccccacacgcagtgctacactcatgtggcggccacatcctggtgcttctcaccctcagttcaagaatgagcaagatggaagtcgtgaccccagcagtttgttggggtgctcctacctgctccctcccatcctgaatcaggatgtcctcccccaggatgactgcaccctccccagtgagtagcagctgctgcagaggaccactcacccctcagacccaccacacagcggctcagcccgccccctaccccaatgcagtctctgcatctccacaccgccatcctgccctccctgcagccactggcgggagccccagggcagcgcccctgacagttggtatgtctgcaccagcccagcgtttccagcttcccaccagggtagctggctcccctgctggcagccctgcctgctctccctgctcctctccttcacctcccaggtaagtgacttgtgctggccctgggcctgatgggcaccaagcctgacctatctccccccatccaggttcacctgttgacatcccagctgctcagatctgttcaacttagttcaagaaacattcctgagcccctgctggtggccagccctggaaacacagaagtggctcagaggggtctgtggctgcgaacagcccagggctaatgggagaggcaggcccagagagaaaagattctgacttaaggcagtgagtgtaggaatcgttgttttctcttaaactcaccgagctcctgatctgcgccacggtcacacagggtctccacacaccaggcaggaaaacgaagaaacacaccctgccctccagggctatgatttcactgggggacagccagccacacaacatgtcagatggggtcactgctgcaggacatgcgggaaattcaggaggagtccaggtgactaccaggattgaggcctgagcaagcggaaagatataggcagcaagatgccttcatatctgagtaagacgcaaagtgcacagtcgggaactcagaggagaagagccgggaaggaaagtctcgatgaatttaaatttttttaaagttataacaagatttaaaacacttattttattactcaattcaattgctcagaattctccatgagccagtctgtgaaacggaacttttacatttctctctatccccgctgctacagaaagtgcaggggcttccctcttggaggtgggtggaatgcgcagcctcttccctcagaggtttggaggcatcacttcccttcttccttgctttacctctgccatggcagttttagtaaccacctctctgggtggctgcaggaccatgctaagtcctgatggaaacatactagttacgcaagaaatgttagctcctccctcttctctctctctgcactgtgggagactccctaatgcgacttctaacaaaaatgtgagcctggctgagcgcagtagctcacacctgtaatcccaacactttgggaggccgaggcaggcggatcacctgaggtcaggagtttgagaccagcctggccaacatggcgaaaccccatctctactaaaaaaattgcaaaaattagctgggcgtggtggtgcatacctataatcccagctagtcgggaggctgaggtggaaggatcacttgaacccaggaggtgaggaggcggaggttgcagcgagtcaagatcgcgccactgcactccagcctgtgagacagagtgagactccgtctcaaaaaaaaaaaaagtgaacctgaaagacccactgtgtttgaggatgaggcatcctccctgcaatgccctgtcccgtcacctactagactcaggatccactgatgcacatggtctcagacacctagcatattaggctgtgtgtgctctcccatgggtgggtggggtgccccaatctggcccactggctgtgtgcgagctggctgtgaccgcctgagtaccagtctgaatgtgtgctcccaggtgtcccctcctcagggcccagcctcattctaggcttattgagaatgagggcaagacagttccagcccctgaggacatcaggattgaataggacaagtacacggaggacactcacagagacccccaggctgagtgagtggtgttccaggccactccctcttcctgacccaatcacctcctccctgcttgctgatgggacactgaagcagattgagagaggcccttcctgaggctgtgttggcacaggagcactctgccccacacaaacactcacagcccccagatgtgtcatcaaggactgcattcagctgcaagcaaaagaaaacccaactgacagtggtctccacatatccgggagagggtatcttaaatgcagcaaatgccaaaggaggcagtcccaggagggtgttcaccctggttttactcccccattctttggccacagatggctgataccctggcctcttgtttgtctaccgagagaaggaagcaaagaaggaacatgcctaggccacgaaagcaaaagctttgcccaaaaccatcagatggtaactcatcaccagactgtgtcacctggcaatgtgcagatggaccagaggctgaggaagggaggtttctgtctgggcacgttaacacccaaacaaaatcaggattccattcttgaggaagaagggagatggatgttagaaggacaactagccaagctaggagtttaaaggttttatgttataccagatgggtctgagagggactgggaaaatattggagtctacccaaaacacccagagagaccattaaaggggcagagggaaggttgtagatccgatgtggggcctgcttgcccaacacagtaagaccgggtatccacatgggttctgccgtggcagaaaggaaggcatttatttgcaaggcacaaagcaggacgaccagcagcgaatgtttaaattctgacttccccaatggcttgcccaaaaggtttctaaaggcaagggtaaatctcacgaaagcaaaggtgataggcaaaatctaagtcagtacatgggagttacacattggttttggcccaaaaagacgggatatcttaaaacaacgggcttacatgtcacaggtaaattcaaagattttctgatttataattagttaatgaaaaagaagctttgtttacaaatttgaggtcatcagacaagaatgttagctctggctggtgggtgtgactccctccaggcccttcaagaagaaatttagaacaaataattcaggtctagaattcagtcttcaggtcccccttcccagaggcctatgtgccacagatctgtttgatgggggtccagatttctgaaaaacaactctgggacatatgttaagatggtatctttagtttctatagggaaccaggcatctgactctaacttccctggcggttgttttagactactctactactatctttttactcatcaagttgctcatttacttctcagggctagctgggtacctggaatttcccttaaaggaactcaagattttcctttatttccatgcttggggggccctaaaatggggtccctgctctgtcccaggaaaatgaaaaaatgtgtggcttgcttttatcctaccaggtatagtcagtacaacaaaatggttaaataatattcacttagaaacatttttctggaatccagtgaagatcatcaggccgaaaaaatccccaaaccaaaagatatgcctgaatagaagcatgtggaaactgccccatttatagccctcgaattcattcttcaattttaagtgttttactttcacagccttcaaaagccacgttcccatttagagaagaaactctcttaaagggagtattttttttgcccaagatctctctcctgataaagtgccccagggagatcttatgccacttttcatctttcacaagaggtcaagaaactcccaggaagagctggctctcaaccatgggcccacgctttcggtatgtgcagcccccacacgtgtgaacttgcctgctcccctgcaccaggggtctcccctccagaaacagaagggaggtttccccatcaaccctgcttttaaaaaaaaaggtggggggcggggaatcacttagttggacctgactttcttttctttcttttttttttttttttgacatggagtttcactcgtcacccaggctggagtgtaatgacaggatctcagcgcactgcaacctctgcctcccaggttcaagtgattctcctgtcccagctgcccaagtagctgggattacaggcacctgtcaccatgcccagctaatttttatatatatttttttttagtagagatggggtttcaccatgttggccaggctggtctcgaactcttgacctcagatgatccgcccatctcggcctcccaaagtgctgggattacaggcatgagccaccgtgcccagcccccagacctgactttctaaataaatcattcctgttagcaggcctcagaaccacgccatgcacccagtcacccatctgttcaaagtgaagtgcaagagtcctgagcacggcgtcaatgctccgcacctcgaagcgtcattcctaacccacacagccaggaaaatgaaaatgaggcttctttccccattgtaccatgagacggctgaagctaaggtcggttacctcatccaaggtcatccagacaagcgaagggaggcaacggtccacattccttccactgccccacacacttccctacacatcacgtatgatttcctggggggaaacaaagaaaaataaaagaaaatattgcatctatcttatgctaataaatgcccagtataccactgcatctcctcctcttcatgaatacccagttcccaatagtagcccctattacagcagctcctaggttcttgtgtctggtgaagctagcaaaaatcttacacacttaaaagatgcagaagcacaatcccaaaattttcactgagagaaaaattgaatttttagagccaggttagttttttgttcatttgcgttttgagacatagtctctactccacccaggctagagtatggtgacacaatctcagctaactgcaacctccgcctcctgggctcaagcgatcctcccacctaagccttccaagctatcctcccacctaagccttccaagcaactacagctatgcactatcacacctggctaattttttctttcttcttttttgtttttttgtttttttgtagagatggggcctacaggtcataggtagattaaaagattttctgatttgcaattagttaatgaaaagaagctttgtttataaatttagggtccatcaggaaagaatgttagctctggctcacatgtgtgactccctccaggcccttcaagaagaaatttagaacaaaggatggtagtccagaattcagtcttcagttcccccttatcagaggtctatgtgccacagatcagttcggtgggggtctgggtttctgaaaaacaactcaggaacgtatgtcaagatgttaagttcagtttctataggggaaccaagtatctgactctaacttccacttccttggcctgttgttttagactactattaccttcttgcttatcaagctgctcatttacttctcagggctagctgggtgctagcttaggctagtcttgaactcctgagctcaggtgatccacctgcctcagcttcccgaagtgctgggattccaggtgtgagccactgcacccggcctagccaggttttttgtttttgggtttttgtttttgttttttttttttgagatggagtctcactctgttgcccaggctagagtgcagtggcatgatctctgctcactgcaacctccacctcccgggttcaagcaattctcctgccttagcctcccaagtagctgggactacaggcacccaccacaacgcccggctaatttttgtatttttagtagagacagggctttaccatgttggccaggctggtcttgaacccctgacctcaggggatctgctcaccttggcctcccaaagtgctgggattacaggcgtgagccaccacacctgcccaccaggttagtttttaattaatcagcccataatagaagaaggaaagaacatacctaagacagattggcatattagtcattcagttccaatgctgatacacacatggctacacaaccatacacatacatgtgcacacacatctgacacacactcacctacaaacacacacacacatacacatgagcacatatctctaaggcaattcatatattctaaaatactcagagtaattgatcataaagtgctatctatttatccatcaactgtaatcaccattgtcgtgtctaaaacccccactgtttcacctaaaatgttaaatactgccttttgttttcttgctgtctctttcaccaagtaagtttaattcccgctggcaaaggaaaaagttacacacacatgcatgcacgcacacacacacacatacacatagaatttctccaagaatattgttaggattatctcacctgagaagggagagtgagaatcatgagaaagctgaaaatgttaagattggatttattgttttgcggaaagggagtagctgaaactccctagtaatgagcagaagctttgttttcggttctgtgatattaacctttatttcactaagataaagctgacaaaattagaacccctcacttgcattacaactacacgggggtggtgggtccatgaggagcagaccccctacgtgaccacaggagcagcagcaggacagaggaccctccagggtcgccaacagggacatcttggcccagacatcatggacagggtcccccttggctcacccgaccaggcaggtaagactgtggggccagcaaagctcgtcacctcactcagggacaaagacatcctgcccaagcatgggagttggaggtgaggatgagtgccaggtgccttctttgccccctgtacccctaacaaataactttctaatgcaaagacccagccttagaggtgctcgtcgtgatcagcacgtgggggagtgtgggaaggactgggttaggacacacacagacacacacctaaggcaacactgaaagagctctcctccccacccctgaggccacaactggggttcttgctgacaggggcacccacagcatctaaaaggaaaccatcgctgccttctgctcagcaaagatgaccccatcctccctccagaaggagagcggtttctggagaggccctcccaggaccctgcccttgctgcactcaggtccctggtgtttggatttctgcttccaaattgtttaagcacagggcctctcatcttttcccccaaagtgaaagaaacctcagtggatgcttggaaaccacatcaggaggcacaggcgattacatgtcccagagccaacacttgtacattcccaagcagagaccagctgctagaatggcttctaaagagcctggtatccctggagcaacagaatccagtggcacataaaagtaaaccaaaggctagtgttggaggaagcacacccaccactaacaaaggatgcacagtggatcctttaagacgcttaaaggactcttggcctccaaacctcacttccacaaaagcttatttttcttctcacaaggtttgtgtgtccctcccccagcgtttctaagacctggctgatgtttacagttcactgtcatgtgtctctcactttcatctgtatgaatttccccagtgttaaagaatccattgcgccccccaaccaactcaagcacagaggtcgttccttctggaaagagtcccaatcccagccttgaggatgaggctggcatcctcccgctggccgggtcttctccgcgaattgggatctgcctcctgggaggatgatacccgtggctgctgctctgcgtggctcaccttggccaggagctagattcctgctggtgggaaatgcatagcctacttgctgcacccaagcgcctggagctttcattctgcagcagtttcttcaggaaaaaggtcatccctaaaggtcaaaggataccaagtttataacttgagtttataatgtattcaaatttttttttttttttttttgagatggagtctcactctgtcacacaggctggagtgcagtggcgcaatctccggtcactgcaagctctgcttcccacgttcctgccattctcctgcctcagcctcccgagtagctgggattacaggcacccgtcaccatgcccgcctaatttttgtatttttagtaaagacagggtttcaccttgttggccaggctagtctcaaactcctgacctcaagtgatcccccaacctcagactcccaaagtgctgggattacaggcgtgagccaccatgcctggccttaaactttttaattatgaaaatgacacacatggaaaagtgcataaaacatatatttataattcacccaataatagtaaaagtcatgcccaaccacaccgaggtgaagacctagagcctgccaaagccaaggttctctccctgacccctgcctcaacccccatggtgcccaccatcttgacttttaccatagtcaattccttgctgtgtttcatttgttcacctgcatatgcatccctacacaacgtacggtattcataacatctgtaaatttttttttctttttttttttctctgagatggagtctccctttgtcgcccaggctggagtacagtggcacgatctcggctcactactgcctctgcctcctgggttcaaatgattctcctgcctcagcttcccgagtagctgggactacaggcatgcaccaacatgcccggctaatttttgtatttttagtagagatggggtttcaccatattggccaggatgatctcgatctcttgacctcatgatccacccacctcggcctcccaaagtgctgggattacaggcgtgagctgccgaataaaatcctaagtcccctgccaactgaatgtacccccctcttgggcaaaaggaccccagaaaaaccttaaaaactgagttctcagccatgataggatgggaggtcagacatgcctcattatcccccctcccttttacttgtagtatacacacaacaactgaccagcattcgtgttaaaatagaggccgtatgactgacagaacaggctctgtggcaataagatgccacattataaacaggacccgaggccatgtcaggcgagggttaagtcccacacccctaagctttaaagaataaactattttctaactgtcataaggttcttctttttctctagcagcaaaacaagcactggccatgagataaacaatgttaaagcaatttgtagctcaccattagacaatgactaactaagcccgctgtttcatcagccataactacagctttgattggacaagaaatggatttcaataactttctccagataagaaaaccaaccaccacagactggttctggccagtttacagaggctgccttcaggtcctgaaaagatcttttcatgtatagggcttaattttaatggatttaaatgttaagtctcctccccagggtggatataggtcataggttacatacatgtgtgttcaatacgcatgcatcaggaccaccttcatgaatattcatagctcctcctgtaagctgttgaatatgtatgttcagccaaactgttcagcacaaagctcagcccctcctctttgaaaatgcctgtctgtgggctttgccagaggctacacttcccagcctgaggaatggccaccttgtagactctaacccttataagaaataaagtctcctctcaacatttataaatttgtgattttttttagttaacacatttaaactctattgaatatgaagtatacaatcatcttacatacagataatgaaaaatgatgcagttaaatgaaaaaacactttcttgattagaattttcattttatgcttattaaaaagaaaatttatgatgtgtgcgcacatcgattttattatatattatgctcgtgcatgcattaaaaaagaaaaattaagcaaaatattctggttcaagtagtctgaaaatctcttcctaattgggatccacattctccacatcacttttgacccagattgtctgtgtctgcatttcccttgctgtatcattctctatgcaaaaagagtgcttgccattgagaatttcttaccatagtgcagctccactctttctgggctttcttacagaccgctggcagtcttagcatcataattaccacgaaagtcaagaccatttgacttcattagccaataggtaacatcatcttcaaacttccagagcctcatcggagctcatatagaggagctgctggtgccactgctgagtgtctggctgagtccagctgcacagctggcctttttggcagtttgagccgcttaagaatttttaatttcttttcgtgtatgtgtgaggcatcagcctgagttagtaagttacaagtgaagtgataagtattctttttaataagcataaaatgaaaattttaatcaagaaagtgtcagtttcattgcatcatttttccttattggtacataagataatggcacacttcacaatcaataaggttttaaatgttaaggatacagtatgttttttagggacgcatatgcagtatttaggagtgcactgtgctacagatcgtgaaggtgaagatagcaggttggcagggcacggtggctcacacctgtaatcccagcactttgggaggccaaggccggcagatcacgaggtcaggagactgagaccatcctggctaacatggtgaaaccctgtctccactaaaaatacaaaaacttagctgggcatggtggtgggcacctgtagtcccagctactcgggaggctgaggaaggagaatggtgtgaacctaggaggcggagcatgcagtgagccgagatcgcgccactgcactccagcctaggcaacagagcaagactccgtctcacaaaaaaaagatagcaagtgcctttggaggtgaggcaggggtgggagaaacagacccctgggcttctgtctaggtctttacccaggtgtggctgggtattcactttcacttacaccatgagtgatgagtcagacattcaggcagggcacagctaggcagttctctggctcccagtggtatcatctgaggtgactgagcagtaatcagttgatggacgaactggaggttagatgggctcagggctcccagaaagaatatcctagcaacaagcaagtcaagagatttcacctgagtttttaaccttggtttcttctaaaagttctgttgttttttttcaatactactatataactttatacactttcctattccccacaaatattttcaagcttgtcttgataaaacatagtaagatttgttttatatgctatatctgattatttcaacatttaagtctttgagaatccattgttaatttttttgggaggtggggtggtgttgctgattttcattcatggtatcttacttctttgtacttgaccatctttgactatgtgcagttattgtacttgggaagttattaaaagagtaatctttgaaggcctagatgaaggtatcatccttcagagaaaactggaaatacctcttaggacaccatttcatgtccccacaacttccacctaacccataatataatcaccttctgctctcctctccctgaagtctggttctcttgtgaggccatgttaatgagagccttctccttcatcttgaacaccttggggtcaacaggtagagttggctatttcctcacttgtcagtgcatagctactgccattttttaaattcctcattaaaaaaatacttgttccatctttattcacagcattcagctaagtaacaccctacacctcagagatttcatctcttgagctatattggtacaagatttttgcacctggttcacgacgttcctttgcatccaatttctgtcatcactcagaatgacatcaatatgttttattacatccactttaaattcaacgtgaccatagatgagtcctgcaaatctgcaccctctcctcctgtatttccagtaatagtgaatgtgcgaatgtctcagctactcacctaatcacccaacccagaggcccagacactttcctagacaactctgccttccagtgagcaccaagtgcttccttaatattttttccaactacatctgttcctgtccccactgcccctgcctacattcagcctcactaatccccaggcttggatgctgataaatgacttgagtggcaactacaaaacagctaatgaagctccccacatcctcccaccagggcctccacagagctggtatgaactacagaaaggggcagttactttccccatgacgctgtcattcccattcgtattgcaaagcctctattttttaatttgtcccacagcatgacagaccccaaacgcacatttactactggtatagatacacatattaagaccagtggtgactgttacagctcacataaaagctgagttccattgcttgggctgactttatgtgtggggggaatgcaagcctctagaatcccatgagaactgacttctatattgggtgcttttctgtctcctcctgtgtctctcacataagacccatcaatgaatgctattaagttaacatgggaataagactatatgatgaatcagatggaggccatgcatcttcattgagggctgcgaggtggttgtgctgctgtccagtcaggatctggcaacagagtcactgggctcaaagttcacaccttcctagaatcccactagggtcagccagtaacgcttacagagcactgacaagtgctgtgtcataggaacttcaaaaagcagcagcaacaggccaggtgtggtggctcacacctgtaatcccagcactttgggaggccaaggtgggtggatcacttgaggtcaggagttcaagaccagcctgaccaacgtggtgaaaccctgtctctactacaaatacaaaaattagccgggcatgatggtgcacacctgtaatcctagcttgggaggctaaggcagaagaatcgcttgaacccgggaggtggaggttgcagtaagcgccattgtactccagcctgggcaacagttagactctgtctcaaaaaaaaaaacaaaaaaacacacacacaaaaaaacaaaaaaaaacacacaaaaaaaaacaaaaacaaaaaaaacaaagcagcagcaacagcacaaggcccaaacaattacatccccgagccaaggcctgcaccttcccaagcagagacccaatgttggaatgacttctaaacagcctggcatccctggagcaacagaatccagtggtacatgaaagccaaccaaaggctagtgtttgaggaagcatacccatcactaacagcacccttgctctccttacagaaaagggagaagagatgaccagctaggaactgactccaagtacaggcaggaaaacaatggctacttaaggatctgaaggcttttttagcttctcctagctattgcaaaaatgcacctagcgatgcttcatgtagcaccaccatgagtggcttgcctctcagaagagacagggacccgttgcctgcgatgcacaccaacctcaaaagggtggagctatttcttcgcagtgacagagctgttgctacatggagctattgcttcatttgtaaaagaggtggctttggggacagaactatttcccatccatcagccaataacaaatattccaaatacttgacctcggtctaacgatgttggaaattatctaaaggagctttatgccctttagaagctagaattttcgtaaagctaatatatcttgtttttgttttggggacagggtctcactctgtcacccatactagagtgcagtggtgcgagctcggctcactgtaacctccacctcccaggctcaagtgatcctcccacctcagcctctcaagtaactgggactacaggcacccaccaccaggcctggctcatttttataagtttttgtagagatagggtttcaccatgttgcccaagctggtctcgaactctaagctcaagcaatctgcccacctcagcctcccaaagtgctggttttgcaggcatgagtcaccatgtctggcctaatatatcttgttagcacatgaggtgttacctatcaataaatcatccatatatatccatatatggactcctgaggtgggggaagtttctttaagttcttttgtaaatgcctagagattatagttggcaaatctctgaatccctgggggatgcattgccaccaatatggaaagccttcataggtaaacacaaagagataccttggttcctctgctgaaggtatagaaaagaaagctcaacataagtctattactaaaattagttaggtcacacaataggaggctaagaggttgagtactacaactgtcagacataccaaaaatatatttctatcagattttgtaaaaatatgtaagcaagctaaacttctttgtcagtttcccttcctttttcataggtaatataggaagactattacaaggcaaatgtcctttctttatgattctctttctagttctctaattacaggttcaattccccgtatttgagctagggagaggatatagctttacacatgaccataatttttctttggtgtaagctacgacagtagggtcaatcaaatgatagacttaatgagtcaatgtgtttaagaaagacttcagcaaacaaggcctcttgtctgaccgaagatggctacacatcctccaatttgcccagtggaaaggctcactcaaggtgtcccatccttgtcaccaaacttgtgggggcagaaaggaaaccaacacccaaaggaacatgccaattcaaaaaatagagaatgattagataattctattatttagaaaaaacctgaatgcattcaggtagtcagcaagtgtctacacagctatggtagatttttagctctattgttatggaattaaagctacagttactatccctcattccgtttttagtaaacagccagaagctattcaatttgcatcagtagttacgttgagtttaccctgatggcctgatttttataattctttatcaggcttaccctgatgttctgctattatcattcgttaccactacctcctgtaaccgcccaaaagtgtccccacacacacgagggcatgttcagtttcccacactccacctcaacaactggcaccagaatcggcccagttgctcaagccaaaatctcaggagtcatcctggttttctctcttgccaccctgtggccccacatccaatccatcagcaaaaaacagctgggagctggaaaggcaagactctcttcctgtgagtccttcacaccgcctgcacctgtctaagccaccattccactccctttcccacctacagcctggtgatatctcccttctcctctgccttccctctttgcagctcaatctttctttccctaggttatcaattgtataataaagattataaaatcactctatcccaataaatatagcttctatcagtcttaatgactgaagcaccgcagaattctcggtttggaagggggttttgctgcttaaaaagtttcaaaatcactgccagagggaaccagcagcccttttgttgatagcagagccagctcctctcgcacgtgaataaacaaccataaatgagacacggcacatttgagcagtcttttaaaatcatttaagctttaaaaattatttaagacacgtttgttttaaaaaagcaattcaaatcaagcatttgcaacatacctacgatacctctatggagacttagcatctacaagacccagtttgacaactgccagcgccagggaataagtgaagtttctcagcccaagtcacacaaggccctagccaacccacctctgcctgctccctggggctctcctctaccccagccctctctccctaaagccagcgagaggctccgcgattgtcccccccaaatcctttcccccttttcgggaatagcaagcgagtccaagagatgaggtcacgtgatgccgtccgaccaatctggtgtgagcagaggcccccattcttccggggagaggggcgggggcggggcgggccgggagcggaaggagcaggggtggacagaacagcctggggagggggcggggacagggcgacagggaggggagggccccactgtccattttggtcgcgctctcttttgggggctccccctctcttttcgtttccttaccccgttttggctggtcttccgcctttatcggtcgtcggccccagtctcctgcacagcaggcgcagggtctttcccacatgctgggctgcagagtgaggaaaacccatcccggaggaagctggcggttaggctggctgaaggcattctgcatgatgaacacaacagttctcaaaaaagtaatgatgtcataccagagcagcaggagggggtggtctgtgaccatgtatgcttgataaattctggatttaagcaaagtaggccggcttctttgtcaatagacgtattgggttattcccgggggggctgcagccggagcacctcccactccttcgcaggggttatttctgaagaccccctcttggaggagctctgctagggccctgcgtgcacctgctgccctggcatcctggccagcagctccgccaggctctagtgtgtatggcctgggctacctcccggtactgtcgccgcaggccttgggacccgttcccgccgcgaggctcccgaggtagccccggcctccggttcttctcagatagccccgtcgtccagccccagaagcgggcactaatgccttccctgaacgctgaaagttgttgaatggatatggacaatgattagaatcatgtagaaaacattaagtgatggtcagtatgttctgtttgggaaatactgaaatgtgcaacacaagctagaaataacaacatgcagaacagcacaactttgtaagacccgcgctgaaggaggcagcatttgtgtgagagcgcccggcgctgcccagaagagctggaacgcccaaggaaggccgctgctcagcgcaggacccctgggctcccggaaacgggatagcgttgcttatctttaaggtaggcttgggaaataccttgtttctccgtagttttgtgggtgtatatacagatactccttgacttaccatgggggttacatcccagtaaacccatcgtaagttgaaaataccatagtcaaagatgcatttaatacacttgacctaccaaacatcatagcttagtgtagcctgcttttaacgtgctcagagttaggcaaaatcctactttatagttaagtgttgaatatctcatgtcatttattgaatactgtactgagagtgaaaaagagaatggttgtgtgggtactcaaagtagagtttatattgagtgtgtatcactatcacaccagtaagaagtcaaaacatcatacgtcgaaccatcctaaattggaaatttgtgtgtgtgtctgtgtgtgtgtgtgtgtgtgtgtgtgtgtggtttttaaccgataggcaagagacacttcctaatggcctgtttaatgactccaaattaccttgcgtctcttcattgagaaggtgatttagttttccctaggtggtgaggcactatttaaaaattaatttaagcaacaactccaataaacatgggttcatctttcagtctcttattaatcatattccagaaagaattgaagttctctacctgaggcgttttgaaatttttttcaatgtggttttatgatagttatttgaaattacttgacagagagaagaccatttgttatagtttgtgtaccaagagaagttccaagtgtgcccctgttaaattccttgaaaagttttcacctcttgggacagacacttaaaagaaactgaattgggccctggtcaataatcaatttaaaaagctctagtaactgagaaagtaaaattccatttgctcgtatgcctgtcttgcaaagatctatcaaaactccatgttctattgcctttctttggaatgagagctggagcagctgacagggaaatcaattggtccccaccctattaatgcttaattaacatcgagcttgctagcatgtgagcgctcccataggaaggaggccttgtatcaagaggagggagctgtgagcactggctgctggggggcttttgcaagcggcccccatggatggagcccaaaggtggaacacagttgccagtactttctggctgaccgtgacccctgcagtgtcaggatgagccatatcacaccaccagtgtcacaccagaagggcacgaggcagcaattcatgtgtggttgcacctgcccacctccccgaggtggtcaaggaaggggcaacatcagaggaccaccactgtgaagcctctgagaagccatttttacttcctgccactgcaaagctcagaattgtgagagagccagaaaaactgctgtcaccgcacaccccatcagaagtgaccataagggtgttgtctctgctccaggacaggaggcccccacgatgtggttgcaataagtgggtggtccctatggttgatggtccctaagtggtgaggtactatttaaaaattagttaaagcgataactccaattaaagtggattcattttcagcctcttattatattcttattgaatacaatttattatttcaatgtgattcaatatttcaacaatggtagtgtctcaccaaccacaacatggttgagccccttctggagggaccttaagggtgttaccataaccagtgtcccattccagctgattgggccccatcctcagtccctgctcaaggaggcaacacggctatttgttgcccaggagaagcagctttgtgcacctgagtgggcattatccccaaaagtggcccataaagtcagcgcccctgacccccggccccgtgatggtgagctcctaagggcgtgagactctcatgccactggagggcttgaacagaggcttagctgagtgggccttttctgtggcaacaaagggccagagaagggccatcaggcttggagagggcttgcttacattagacagctgagatgagaccaaaggaagtggggggtgcacacagccctgacactgtgggcctttgcctgcatgcagtctctgccctgcatgggacagcagcttcctccacctacaattcctgcaagtctcccattctcatggggtgcttcctttggctttttgcttttaggtttgttttgttttgttttgttttaattttaagaaaaacctgttcagagcatgggttaatttgctaaagcaatcaggatgattccttctgagattcagggtagagggggtcatagaaatcatgggccgttcagaggcaagaggacaggaagcgggcaccatgagagatggagggaggggctcatcctgaacatgttccagccccagcccacaacattcctgcaaaacccctcctggaataggggccaccctgagcctctgttccttgccccacataagctcaacctttaccagaaggaccaccagatccacgtttgccggagggggagacctactgttggcttggactccaagcaggatggaggtcttcctgccaacaatgcccacggcacagaaagcagagatggcggggccaggtcatgatgctgaggggacagagatcctacagtgttcactgtgcagagggcatggagctccaatgaggactgggcccctagaggccacgcaggggcaggtgccaaagtaaagaacgctaagacataggtggtcctgcagtgggaagctggcatccagcacctccaccaggtagggtgtggggcatgaaagaacccaaggagccaatgcaaggacaaagtcaattccaaacaggccacaactactcctcttgttccatgttctgatttcccaggaatggtccaagttaacatctgtcttcccagtgtgatttcatttgcagaattgtcctggttaagatgattaatcatatgatctctctatttaagggagattggcaggttcttcatagggaagatattagttacttattgctgcctaaataattatcccaaaataccacagcttaagttcaggcgtggcttagctgggcagcttaagttcaaggtgcctcatgagatcacagtgacactatcagtctcactgaaggctcagctgtggcagagggtagggaccacttccacggggtactgccatggactgctggactgagggcctcagctttataccatggcagtgggcctctacactttgagccactttggtgccctagcacagtgatcaggaagggagagggagaacaggagagcccaagacagccacagtctacttattacccaatcttgggagggacatcccatcattttgccatattccattcactggatgtgagtctctaagtccaacccacactcaaagggaggagattacatgagggccgagaaggtggggtcattggggggtgtgttagaaaccaccaaccaccgtgagtaaatgggctctgggctcagaacttacccatggcagtgctttgtgccatactgcactgatcccccttgatgcttctcactcatttctgctccagctcgttgctgttcctcctagagttgcagattcaaggggcctcaccagtgactgtgatgactgtaaaacccaggcttgtgggtgctatctggacaccaaggagacagaggcacatggcaccacccaggacaagcactgaagttggactaccaggttcaaatcccagctccccacctttaactgtgtgaccgggccttggggaagttatttcaattttctctgccccctgtctatcaagcatggtggttgataacacctatttttcagaaccacagtgagaattgtggagatgctctatttgagatgtacagggttctcagcttacaggcagcactcagcgaatgttaattatcattatccaaaactgggatccccagcaggagcagccccagcgctcccatgaggcttggttcgacctgaatgattgacactgccaagagcaacatcaccttccctctccaagcctgatggccccttctctgggtctccgtcatgacagaagtggcccagccagctaaccctctgtccaggccctccagtggcatgagaggtccactttcctgagatgagcctccagccatctggaactagcctgttcctccctccctctgttcctgccctcccgaagcccacagtccctcagacccgcagtttggtcccagctccctcactgcaccccacctgatgccatctctcccagccatgcagagcagagccctgatgcctgacccagagctgatgttcctttccgggatgatatgaagcatcagagaggatgttccagccctggggaagcccagcatgattggttcttcctctaacaacatttacacacttgacatcatccacttaacattttatcggtaaaggagctatggcaacatgagctcacctgactgagaaggaaactgattccacttataaaagggaacttgtaacagcaacatgtgttccaaacccaggagcacctgggcctaaatcctgctctccttcttactccaggcataaggaagcctggctgttgccagcctctcacctgcagaagatgcacctcatagcaccctggacaggtgaaccaagacacatcactgaagtgccaatacatgcacccctgagggcccaaagccaacctgagggctctgcctgcctggctccctgcacccgagtccccagaaacgtgctcacagcacagggagctccagagcccaagcctcggagtgttggaaaacaacatcaacatgagaaatgggtgctaggagtacctttgtaggtgacattaaaatgcttacattagatagcagagatgagaccaaagaaactggggggagggggtgcccccagccctgacactgtgggcctttgcctgtatgcagcctttgccctgcaagggacagcagcttcctctgcctataatacctgcaagcctcccattctcatggagtgcttccttttggctttttgcttttaggtttcttttgtttgtttttaattttaagaataacctgtttggagagctgggcatgggggcttgttcctatagtaccagcttctcagaaggctgaggcagaaggatcacttaagcctaagagtttgagaccagctctcatatagtgagaccttgtctctaaagaaaagaaagaaaaagaacctgtttggacacacaaaatctaacttttccccctctcttcctgatccctttccagcagtgctttggggctgagcagtaaaatccaaaagagattcagttgggtaaaatactaaaatctagccaggcacagtggcttgcacctgtaaccccagcactttgggaggctaaggcgggaggatcacttgaacccaggagtttgagaccagcctgggcaaaatagtgagaccgtgtctctataaaaaaatttaaaaattagcaaggcatggtagcatgcacctgtagtcccagctacctgggaggctgaggtgagaggatcgcttcagcctgagaggtcaaggctgcagtgagctgtggttatgcctctgcactctagcctgggagacagagcaagaccccgtctcaggaagaaaaaaaaaagtctgctctccctgcaaatcgcgtgtgctggtgatgagggaggcatgtgcagttcgtgaaaaaatagggtttctgattttccactcctcaggtacagggtgggtgggcctgggactcctggtgaagccctctacaggcagggtcatatcctaccctcaggctggtgggcagggcacactccaccctcaggctggtgggcagggcacactccaccctcaggctggtgggcagggtggccctcagtctcaggatggtggatgggggcagacccccaccattaggcagcgaacatgtgggaagacagaagaaagaggaaggaaaggcactgaacatgtccaccagggtattgcccaggccagcatatttgcagggttagtttgtcccctctgtcaggaggggtcttcagcccctggggaagtaaggtgcctaagctctcacagctgataagtggcagttcttgcagatgagtctgagctaggtgctaatgcctcagtgctcatttttccaggctctgcaccaccaagaccttactcaggtgtgtccaggccagcatttcccaagggcatctagagatcactgtgatcactggttgttgatgttcatttcccccactagtgtctaagccatatgaaattcatattatttctcaaatctggctctcccacctactgcctgtgtgactgcggggacatcccagagcctctccaagcctcttttcttatctataaaatgagatggtaataataacattgacctcagccgggctcggtggctcacgcctgtaatcccagcactttgggaggctgaggaggttggatcacctgagatcaggagttccgagaccagtctggccatatggtgaaaccccttttctactaaaaatacaaaaaattagccagacgtggtggcaggcatctgtaatcccagctactccagaggctgaggcagaagaatcacttgaacccgggaggcagaggttgcagtgagccaaggtcgcaccactgcactccagcctgggtgacaagactccatgacctcacaaggctgttgtgagcattaaaggtctccatccacgtaaagcacttataaaactgtcaagcccataataagtactcaataaatgtcagctgttaatattgttatctgaaaattctgcctctaacctgagttcttaattgggtttacttttaaagggatcaaatctagttctccttgagcacttcatatacaaagaatgcagaatgaaagggcccatgagaacacgtggtcaaaccttttcctctggaggacaaaggtgcttgactgaagccacacagccagttgtccactctctgggctcccaggaacttgcaagccttactgcctggagcatcctttccctgagaaggacacaggcagctctcttagcagtgtgtagaatttattacttttttgttttacttggtttgtttagggtttatatcttttctcttcttactccagacaaaagttgcttgagaaggcagaaaagagatggagaaagttggggccaaccagtccgagcttctgccagttcagtcccaggcagacagttgttggcctggatagggaagccagcagccatagagccctcagaagcagcaagaagtaagagaagcgtgagggcttcggggtttggtagacctaggcacagaccctccagcgcatgtgagctgtgtgattatggcaccatccagaggctgcctggggttttactccccagggttcctcataccctctggcctggctgttagccccacaactgaggaaagcattgtcacgggtaccaggagttaaattcttggcttttacattttggaagtttaagctcagggaaggaacaagagatttggaagatatgagaaagactagagcaaattctctcttctctccctgcaatagaaattatttcctaaactgaggaaagagacgaaaccagaggaaaaaaagaagagaaaatttaagcaataagaaaatgtaatttttaaaaaatatatgacatttgttagagataaaacatgtaagtgttgacaaagaagagtcagactctaaaatattcgaagagatttattctgagccaaatatgagtgaccaatgacctgtgacacagccctcaggagatctgagaacatgtgtccaaagtggttggattacatcttggttttatacaatttagagagacaaaagacatcaatcagtacatgtaagatgtacactgttcggtccagaaatgtggaacaactcaaagcaagggcttccgggtcataggcagatttaaaggttttctgattggcaattggttgagttattatctaaagacctggaatcaatagaaaggaatgtctgtcttgtgataaggggttgtggagatcaaagttttatcatgcacatgaagccaccaggtaggaggcttcagaaagaatagactgtagctgtttctttcaaatgttaaaagcctggccaggcacggtgggtcatgcccataatcctaacactttgggaggccaaggcgggtggatcatctgaggtcaggagtttgagaccagcctggccagcatggtgaaacctcgtctctactaaaaatacaaaacttagccaggtgtggtggtgcacacctgtaatcccaactactcaggaggctgaggaagaagaattacctgaacccaggaagtggaggttgcagtgagcagagatggcaccactgcactccagcctgtgtgacaggaacaagactccatctcaaaaaaaaaaaaaaaagcatctgttttatcaatcttaagatctctgttttaatgttaatgctggtgagttgggcctgaattccaaaatggatgagggtataatgaggcatctccaactcaccattcccatcatggcctgaactagtttttcaggttaactttggagtgccgttggccaagacaaggggtccacttagatggttgggggtcttagaattttatttttggtttatataaggtacgtaggaattaacctaaaacataatattcaagacatatataaagaaaattactaaaaatggtgagataaaataatgaactaaatggagaactataccaagttcatgaatagaaagactcactattatagaggtcagtcctgtccaaactgaactatagattccataagtcacaatcaaaattccaattggattttgaaggaatttgacaagttggttctaaaacttagaggaggaaaagccaaagaattcataaagacttttgcacaaccaggcagctacacagcttcacgccaccagccatcccctcccccacttccttccatggtaggcactcattccttactcacctggatcagcagcctctcaggtcacaacacactctcaggccccatgcacctgtccttgcaactatctctcctatggggccctccattgaacatgccctctaagccttggctgtggagggtgaaggatctcacttcactccatctctgggcaggctgtctgtaggccaggcacactcatcctgaaggagctcacaatgtgggagcacatcaccacacctagagtagggaggtgaatggcaagagcacaggctgaacacagccccaggaaatgctcctggggacagggccagcccaaggaggaggttatcctaagagcagtggggggtccagggaaggattttcaggaaggtggtgatgggtcaaatgtttaaagatgctaggcatggaaggctcactgtcgtcatcagcagtagaagcaggcaggtgtctgggaccatgcatagccagtaggacagacatgggcatctgcaggccctctgaatgcccccttggcaccaggagatctgtggatgagaccaacaggcagccagaccctaggtaggcatgccaaggcacagccccagcccacccaggaggaagccccgggaggaggctcttccctccacctggacagagtgggtgtggctctgctactgttctgttgacaagcgcctctcaaatttgaaagggcagaggctggagaaataaattatacagaatatcaccatgtgctcccagattggaagcattcagaggttgctaatcataataaattaatgtaaaaaaaaatctcagtggggtcctataggctgcttcaaacacagccttgtcctcagtgtgggtgcctgagttttcccgtggctgtgacatccaagtgatgtttagcaataatatgcaatgtaagattttgtttatgtagagggaattttgtttcagaggcctgaatactcccttgaccccacagcagggcccatggggctccgttcacatagggtgaagccagcatcctgtgtgcacaaccagcaaaacacactcagacctgtggacaactcgcctcctgattcccagagacaattccaggagacctggcagccctccaggcatggttggtgatggtgtgcatggaagcttctgagcccatgaagagtgatagaggggggtctggccaatctgatcccacacccagcttcagtgatcaatgagtgcttgacctctctgggtctgtgactctctgcatttcagggatgtgcctatgtacctcccagggccgttgtgaggactcaatgtcgatgttgctggaagcagctgcctgagacatgctcagcaaaggtccacactgcctccttccttccactccccactgctttgacacacttagcacatctcgttcctctgagtggtcccaggaagatacccagagctgtgggggctgttcttgcagggcaggctctgatccttgtcatcactgtctccagaggagctcaagcactgggtgaaggctagggtgaagctgatctcaccccatctcctcagtcctcacacacaagtcagttggacatgcagattccacaggcctgatgtcatctaacaagctgaagtttcccctgggattcagcaatccaaggctcttcctgaacaaagccctcccattcagtctataacactctgcctctgtcctctcaaactttaggtccttctcacattcaaaatacattcattttatcccgatagccccaaaagtcttagcttgttccagcatcaatgtcagggtccaaaatctcatctaaatgtcatctaaatcagatatgggtgagactgaaggtgcaattgatcctgagggaaaattcctcttcagccatgaacctgtgaaacgagacaagttatgtgcttccaaaatacaatagtagggcaggcagaagatagacattcccattcccaaagggaagaaaagaaaagaaggaagggtgacaggtcccaggcaagtccaaaacctagcaaggcaagtatcattagatcttaaggctcaagaatcatcttattcagctggattctctgccctccagacctcctgggacagcagtcctgcctctgcagctctgccatttggggatcatgcctcccagactctacagggtggcgccaaggctttggtcagaggccacctggcctattcaaactgaactggtggtgtccctgtgatctctgaatcaccttcaggttctgtcttccccttccttgaagaagagtgcacatgcgtagccaaatcactctatggtctggtccagtcagatctaagaattctgacagccttccatcacttcatctatttttttctgccccctttagttcaaattagcagcgtctctgctggtataattccatctctattcctggcttccactgagatggctgaagaagtccatgagtcacacccgtgatttctttatcaaatggctgtacagccacacctgtagtgtttccttcagaacaagatttctcactttttgaaatacagagagactgagaacttctcagatattcaagttctggttcttttttgtttaagagtttcttcttcaattcctctctcttcttttgcattttactataagcagtcaggaggaaccaagctgctccttcagctctatgcttagaaatctccttggctagatatccaactccatcactcacaagctccgtcttctacaaaacactagaacacagttcagccaagctctgtgccacgttataaccagaatcactattcttccaatttgcaataacatgttcctcatttccaactgagacatcaccagaatcaccctaaatgtccatatttctagcacatacctcaaaactcttccagcctctacccattacccagttccaaagacactttcacatatctatgtatttgttatagtcaggtagagtagagattccccttctttttagggacctgtgtaccccccaagcatgaaataaagaaaaatcccaaggtcccttaaaaaaatttccaggcatctggctagtcccagaggtaattaagtccttgtttaaaaaaggtaataatagcctaagaacaatagtcaaggaagttaaagctccagaaatgtttgctttccctatagaaagtaaagataaaatcttaacatatgtccctaacctgtctctcagaggctgggacgcctgctgaggaccccctccccacctactaaagatccactggcacacagaccccagatgagagagaaactaagatgaaagtttttaactattgtctttgttccaagtttcttcctgaggggctgtgagaaactcactccccctagcaagttaacatttttctactgaccccctaaattttaaacaaagcttctcttccttaccaattgcaaatcagaagatatttaagtccacccatgatctgtgagcccccattcaagatgtctcatcctttcaagcttaaaccaatgtgtaacctctgtgtattgatttaggattttgcctgtagcttctgctttcctgcaacttacccctgcctgtgagacatgggggaggccagatcttgagcatttagctgcctggtcctccttgcttggtgctctgcagtaaacaccttcctttctaccactgcagaaaccctggtatgggtatttggtgttattgtgcacagagagtggcccccagtttggttctgtaacaatagttagcacctcacttcttagtcctgaaatctgtattcatctgctcagctgccatcacaaaattccacagaccaggtggctcaaacaacagaaacgtatttcttacagttttggaggtgtgagatcagtgccaccatggtgagaccctggtgagcactcttcttgcctgccttctcaaaagccctctgtgactcttctcataaggatgccaatcccatcacgagggccccaccctcaggacctcatctaaacctaatcacttcccaaaggccccaactcctcacaccaaactgggagtcagggcttccgcatgtgaattttaaggagacacagctcagtccatagcctctcccctggtggcttgggagtatactgtggcaccaaggtgacatccagcccaggccctggagtgaggaatcttggatcctcagtgtggagaaaagctgatggggccagactgcatgcccctgctccacatccatcctcctcctgctgctgctgtgctggcagcaactcaaggaagcttgcattccagggacacacctgtgtgagctgactacaaggaacaaagcctttgttcagactggaagatgctaggagctgtagtctggaggagaaaagctgacccctgccttaagctgcctgcatctccctgcagccccactagagcgtcccgctctcagcctcagcctcagcctcagcctggcccgtgtggacagcgccgcccactctgcccctgccctggccacgtggagcccaaggacactgcaggcctccagcctccccgccagcctggccctcccatatatctgctgggtccctcatcgggacccaactggccgcttccctgacttcaggtcctgggtccctttctctatgttcttcgtctgcctcctccttcccaaatgaggtgccctcactgcacctcagggggaaatggggccagagcctgtggagcaggaagacccctcagggtgctcggggccctgctgctgcctgctccatccccaggatgtcacctctgtggagagaaagatgagagaaaaaaggagggatgggcacgtgggagaggacaaagggtcctggaaaggcagggatggaaggaggggagccaaggattacgttcagaaagaaagaagcccatcttggtaggggttcagcttccagggagaggcagagtggacaccccctcccacgctgcaccccagggcctggaggaggtgctggagacctaaagaggtcggtcagagagcccaggtcccaggacgcaccagctccacagtgcgagggccacctgccccgacctgggtctccttggtggtatggttggtagactctagctcgggggcagaaatgctgtgcccaggagggacggggcctgaggcctccttggcccctttgtcacaggagcttggcaggtaccaggcattcatgtgactaatgcgtgaaggaatgagtgaatgaagacagaagattcacaagaaacctgctggagaaggtagagcgctgtccagatgccatcattcctttttttcatttctgcaattctgccttgccttttgggtcccttccattcagcacttggcccaatgtcacacctctacccaagcagcttgtctcccgaggtgttcggatgcccttatgcccactcaacctgctcctcctcaattctctaagctgactgtcagcaaaacccagggccccagaaacccaggcccctcctctacggagcacctcctgggtctccatgggtgctgcattcaccgagaaggatcaggcaggaacacaatttaccctttgcaagtgttcccgttgggtttgctagtcactttgcagtatttctgcagggtgatgatgagatgctagcaggctccccagcactcaacaccacactctcagaagtacatccccataggaaactggcccatggaggggacaaataataaacctgcaaaaatgtccacagcccgatcccccgaacattaccatgtggggaaagccttcgtaaatgtgattatgttaaggacgttgagatgagggattatcctggtttatccaggtgggccaagtatgatctcaagggccagggttggggaaggacaggtaatggtggatgcagaggctgcggcgatgggacatctcgttaaggagtacgggcagcctccagaagccgcaggctccagaaagaacacatcctgatggcatgttggttctactttttaaattttgtatttatttattttttgggagacagggtcatactgtgtcacccaggctggaatgcagaggtgcaaacacagctcactgccacttccacctcccaggctcaggcaatatttacacctcagcttcccaagtagctgggaccacaggcgcgcaccaacacacccagctaattttgttgttgttactgttttgtagagatgggggtctcaccatgttgcccaggctggtattgaactacgggacttaagcgatcttcccacctgggcctcccaaagtgcatagccactgcatcctgctgacacattaattttagccaagtcagattgatttcaaatttcctgtctccaaaactgtaaaacagtaaatatgtggtgttctcaggtgctgttggtggcgttttgttacagcagttgtagaaactgaaaagaaacacccctgccccagcgcttttgctcattccttcactcaaaattctgttgtttcacttttgttatacaacctttattcaacaattgtcaaaagcccaccacagaacattttctaaattataaaggaatacattaaatcagtcatactcatgtcccaaagctgaccactggccattctgggtgtttccttccagtctttcctcttgtctgtaagcagtcttttgcttgcagtgataccaccatgtctttgtattggtcttttcccacttcacatcaaggcacgagcattttccctccagttaaagaccactctgtcccatgagtggtcacacaccgtcatcaagcccgacccttagccccctctctgcaaccactgatagtctcagatgtgcagcattctaaacagtgccaggtgcttctgctgtggctttgtttggctttcttactgcttcttagaaccgattcctaaaatcagaattacaacatcaaaactatatagatgtgaaccaagtcagaaaagcactttccagcaagattgtcccagtgaccaccctaatcaccatgtgtctcctttcacacttgccagaatggcagaatggctttcattaaattctaactggtgtgactgctccccatgattatatcgtttctatttttcatgcctggggcagctgggaaatggataactcagaccacagtggtttgcactctcttctgtgggcgttttctcaatgccttgtgcatgctagtttgtgggcacctaaaatttcagaggaaaatgaaaacagaccctgatatcagggagctttcaaagcacttgaaaagacaaaactagacacaaagagcagatataccacaccctggcccgccgccgccatctgccatcacgcccttcctggcacaagcatgacaaaaactcctctgcagagccatgccacattgaaaacagccgaccctccctcagcaccctcaccacaaacacagccgtccctccctcactaccctcaccccaaacagcccaccctccctgaccctgaccccaaacacagccaaccctccctcaccaccctcaccccaacacagccgaccctccctcagcaccctcaccccaagcacagccgaccctccctcagcaccctcaccccaagcacagccgaccctccctcagcaccctcaccccaagcacagccgaccctccctcagcaccctcaccccaaacacagccgaccctccctcagcaccctcatcccaaacacagccgaccctcccctgggcatcctgaccccaaacacagctgaccctcccctgggcaccctgaccccaaacagagccaaccctcctctgagacccttacccctggcaggattgacccctcctctgagccccctgaccccgggaaggcctagcccctcctgtaagcccctgaaccaggacagggctgacccttcctctgagctccctaaaccaggacaggactaacctctcctctgagccccctaacccctggcagggctgacccctcctctgagccttgctggaatcctgtgccaagaggggcttgagtgtgccaatgagccatcccagggcagtcagcattttactgttctcagttctgagtatggtgcatgggaaagaacaggacctctgcaaatgattttaaagaatgaataaaactgagtacatatccaaagatggcacagactatcaaatattgaaactgtggaaggagagattggtggggaccagagcagctgggtttaggagctttggtgccagacagagctgggcttgatatcacctgtgccatttgcaagctgtgtgatgtggctgagttcccaaccgcctgagcctccatatcctcatccataaagtacagggctcacaagacaatgacctcatgcactgctgtgcccaccacagcatccagtgatcggccatggcatgggggcctgtctggggaggacagggcacacagaggaaggaaggatgggtctcaggtgggctgacacctgggaaaagggtggacaatctggggaacaggtcaggagaagtatagctggacctctttccctgggttaccaacttcaaattcccagcatgatcattgccctgccctgcacccccaccccacagccacacatactctctgacttcagaatgccctatgactggtgcaagtaactttttataatttaactgcaaatgtcttcattaaaaaaaaaaagctattgcatttgtgtaagccaaactctagaggtacacctttgtttgcaccccaacaaggttagcatagggggagcactgagttgggaagatagggtcattttcctcgccctacttattggaaaaccacatgaatggaacctccaggacacttgacagctttgccccgttggcctcaagctccaggactgaagggctggagtcagctatagtcctgtccccatcagcacatgacctgagctcagccttgggagtgctgcattccaaggcctgtccaaggagggctcagcttgggtgggatagaccccttgtgttcatgactggcctcgctgaggtttctgtgaaaagggcgaataggagcccatgtgttatcacaccctcatgtttgtgtactcctactcctcccacaggccaccaaggtgacataagcaggtccttctctctcctgccctatcaaagtcctgggccttcagaccagcagcactggtcacacctgggagctggtcaggaatgcagaatccctgatcccactcagatctggtgagtcagcatctgcacctcaacaagatccccagagatgggtgggcaccttcggtctgatgccatgcccatcgcccacagctggctccatgtatctcttggccccttcacaccccggagagctattttctgacaacccacagcacaactgcaagacctggtttctcccagcatgaccatgaccatgaccatgaccatgaccatgcatcaccatgagcatcgaatcctccctgccctcccaagatggcctcttctcagtgccatagggaggggaaagagcttgatgagttggttggatttgcagcaactcagaggcaggggaaattgacatcaaaagagaacagagctgtcaaccgcctaagagattttcttccaattccattaaaaatgtatttcataaaaacagaggccacttaaataaatccatgtcagggaatgagagattttggagagactcacccgtgtttccacaggaaagggctccatccaaaggcaggttcaactcccaggagaagcaccttaatggcattcaggaaacattgcatttcaggaaacggaatcccagaaatgtctaacttcatgactgcaggaaattggaggaatgaggtctatttaaaagatcagcctgtgagatggaactcagagaaaaggtgtcctagaaatgatgatggaaacatggtgttagagaagttaaattaaaacggaatcaccctctgggctgttgtcatcacctgggaattctcagtgaatcctcaggaaccctagaatactgcagtgctataattatggtgtgcaatccactcgtatctagtatgaagcctaaatgacaagtctatcaaaacaataatagcttaatagcaaccattaagagatgggcaatataaaaataattaaatcaagacaaccaaaagtaaaaacatggataggagggagttaaactgtagaggattttttggttttttttaatttccattttttgtgatctaagataagttgtcatccctttaaaataactctttatatctataaaatgtgttttgtaagcctcatggtaaccgcaaagcaaaaacatgtaatagattactgaaaaaaaaatgaattaaaacatgctaccagagaaaaattacttagtcacaaaaggaagacaggaagaaaggaagagagaaattacaaaacaaccagacaacaagcagcaaagtggcagtagtaaatccttacttatcaatgatagcactgaatgtaaatggactcagttctctaattaagacgcagagttcacactggagagaagcctccaaatataaaattttttaaaagacacaaaatggctgaacaaataaagaaacaagatccagctatatgctgtatagaaggaacccccctctgctataaagacacacacagactggaagtgaagggatagaaaaatgtaatccataaaagtagaaaccagaaaagagcaggagtagctacatttgtatcagttaaaatagagtacaagtcaaaggctgtaagaagaaacaaagaagatcactatataatggtaaaggggtcaattcatcgagatgatataataactataaatatctatgcacctaacactaaagcacccaattatataaaccaaatgctaatagatctaaagggagagactgcaatacagtagcagtaggggacttcagcctcccactctcagtaatggacagatatccagacagaaaatcaacaaagaaacatcagagttaaactacacactagaccaaataagcctaactgacattcatagaacattttacccaattgctgcagaatacacattcttttcatcacacatagaacattttccagaatggaccatattttagcccagaaaacacatctatacaaattcaaaaatctagaaatcacatcaagtatcttttttttttttcctgagacagagtcttgctctattgcccaggctggagtgcagtggcatgatctcagctcactgcaaccttcacttcccaggttcaagccattctcctgtgtcagcctcctgagtagctgggattacagacgtgtgccatcacaccccagccatagcaagtatctttttcaccacagtggaataaaactggaaatccatgaccagaggaacctcggaaaagacacaaacacataaaaataaaaaacatgctcctgaatggccaatgggtcagcaaggaaatcaagagggaaagtaaaaaatttccgagggccaggtgcggtggctcatgcctgtaatcccagcactttgggaggctgaggagggcggatcacctgaggtccggagttggacaagcctggccaacatggtgaaaccccgtttctactaaaaatagaaaaattagctgggcatggtggcaggcacctgtaatcccagctactcaggaggctgaggcaggagaatcacttgaacatgggaggtggaggttgcagtgagctgagattgtgccattgcactccagcctgggggacaagagcgagacttcgtctcaaaaaaaaaaaaaaaagaaaaatttccaaaaaacaaatcacaatggaaatacaccaaaatctgtgggagacagcaaagctgtacaaagagggaaatgtatagcaataaacacctacatcaaaaatgtaaacaagcatcaaataagcaacccaatgatgcacctcaagaaactagaatcacaaaaacaaaccaaacccaaaattagtagaaggaaagaaataataaagatcagagcagaaataactggaagtgaaactttaaaaattataaaagatcaatgtaataatgtgaaatatctatgcaagaaaaactataaaacactgcttaaagaaattgaataggacacaaaaaagtggaaagatattccatgatcatggattgaaagaattaatattgttaaaacaacaatattacccaaaacaatttacagattcaatgcaatgtctatcaaaataccaatggcattcttcacagaaatatagaaagcaatcctatattgataatcctaaaatctatatggaaccacaaaagaccctgaatagccacagcaatcctgaggggaaaaaaaaaaaaaaaaaagctggaggcatcacattacctgacttcaaattatactacaaagctatagtaaccaaatcagcatggtagtggcattaaaacagacacagaaatcaatggaacagaatagagaaccactatataaatccacacatttacagccaattcattttttgaaaaaggccctaagaacatacagtgagaaaagagcagtctcttcaataaatggtgctgggaaaactggatatccatatgcagaagaatgaaactagactcctatctctcactacatacaaaaatcaaatcaaaatggattaaaggcttacatctgagacctgaaactatgaaactactaaaagaaaattttgtagaaatgctccaggacattgatctggagctcaaaaacacaggcaacaaaagcaaaaatggacgaatgggattatatcaagttaaaaagcctctgtacatcaaaagaaacaattaacaaagtgaagagacaacctacagaatgggagaaaatatttgcaaactatccatctgacaatggattaataaccagaatatataagttactcaacaacagtaaaaaaaaaaaaaaaagtaaaaatgggcaaaagatctgaaatagacatttctcaaaaaaagacatttgtttaatggccactacacatatgaaaaaaaaatgcttgatgtcagtaatcatcagagaaatgcaaaccaaaaccacaatgagacatcatctcaccccagttagaatggcttattatcaaaaagacaaaaaatagcatgctggcaaggttgtggagaaaggagaaccctcgtatgctgttgtgggaatgtaaattagtacagccactgtggtaaacagtatggctatttctcaaaaaattaaaaatagaactaccatatgatccagcaattccactactgtgtatacatccaaaagaaaggaaatcaatatctgcactcccatgtttgttgcagcacaactcacaatagccaaaacatgtaatcaacctaaatgtccatcaataggtgaatatgtaaagaaaatgtgatatataaacacaatggaatattattcagtcattaaaaataatgaaaccctgtcatttgcagcaacatagatggaactggaggtcagtatgttaagtgaactaagtcaggcacagaaagacaaatatcacatgttctcacccatatgtgggagctaaaaaaaataaacagggagggtctcatgaagatgaagtatattggtagttatcagaggccaggaatggtagagggcagcagggattaagtgaggttgattaatggctgcaaatatatatttagataaatgaagtgagacctggtgttcaatagatcagtaagatgactatacttaacactaatcaattatacatttcaaaataaccagaagataatttgaatgttcttaacattaaaaaaagataaatatttaagatgatgaatagcccaattacccttatctggttatagaaatgaatcaaactatcacatgcaccccaaaaatatgtacatctgatgtatcaataaaaataaaagacagtgtcaggcagagagggagagaattctcccttactccacactttcgttctatctggaacctcaaatgattagacaagatccacccacataggggaggccatctgctttattcagtctatgaattcaaattaatctcatccagaatcaccctcccagaataatgtttgagcaaatatctgggcaccccatggcctagtcaagttgacatataaaattaatcacagagactaaactgtattttccaactctagaccccagaatcatgacttatagatccagaaattctccagaatgtctagctcctcatacacaagtataattagagggatcttaaacttggaattgtatgaagaccacacagggatttgctggaccatctgagcccacattctggaataaaaactatgtatcgcatcatgagtgaagcaaacttaaatcaattccgctgtaaagatacccagtgcagacctggggctgtctcggtgagggtagagtgacttcagcagagagccacagcacagcaaagtccaacctcaccactaacagcaagggtgagggcattggtaagctcctataaccaggcctccatggctggctggagcacagccctcctcctacacctcttcctactcccactgtcacccctcatgtgctcttggctgtgcccactgctgagtgtggcattgtcaggtaggagctggccacatctagacatggaaataccctgaggcagagaggctgccctcttccttgagacccttgctcagagctaagttctcttgctcaaagccccagcagccaccccaggtctccttggccagagttgattgcaggctggaccctaacccagccagatgcaagaggcactgaccaagccacccagagtggggctggggctggggatggggcaagacctgcacagcatggagctaggtgaggaagtgcagcccagcatcggtggtacaaactaatgcctgagtttctgctcacacagtgaggacagcagaggggaggagaggccacaggacaggtgcccaatgctgccagcaagaattggctctgaccagctaggatcaggctgtggcttgggctcacaagtcttctccttcaccaggaagacgagcatttgtggtatcaactgagatacttcagggaaactgctggttcatggtaagcatccgtggagcatggtttcaagatccttacttatgctgcagttttgaaatgaccaagaaggcctcattcaaaaagtgtatgctgttgccctcatccctccatcattcccctacttgctggctgagtcctggaaaccctttaccaagagacaaggttttccctaatctaataaagcacgaggctggaaatagaaatccctgcagtgagagcctgccgtggccacacgcacccagagtaaaccaagccgatgacaatatggccagagccagccctcaagggcccagccttccccactaacaggcctgctcatgtcccagacatggtgacatcagaccctggcctggacacggatttgtaactgggggttagggtggggcctaaccggacacaggcacaggagcactcccggaatcctaaggaggaaggacaatgtcagggggactgaggaccccccctgcccagccctaggcagctgtttgtgcactaggcaacatggtgggccttgtccctgccctgagccctccctccctgaggctgaacttggtgtgtccttgccctagtgcaccagtgtctgctcctatctgtcctcgccccttccctctgggacccaccagacacatgcgatgtggctacagtcgccccctcctccccatcccctcattctctccccagagcctgcctatcacctgccccagcaccagggccttgtctctggaaaggtctctgctggttcctgtggaagggccagtcccgggccacggtccacgcaatgagcactggacacaggagtctgggaccaaacccacctgctccctggcaacccgaatcctgggcctctcactcccacctaaatcctctaagccttggcttctgcttatgtaaaatggagagtcacagtctcttcccccaggctctcgcgtgaagctttctgaaatagcaatggcgatgtgctttgttggtgctgggcactgcacagcgcttgccacacagcggccctgggctgctccctgactcactcacatcctcccattgccattgcggcctccgcctggagagctgggcttcccggtcagtctctctggaccctgggccctaattcttctgcatcctggtgacctgtgggacctgcttccagcagaaaaccacccacaaagcccaggtgccacaagctgggactcccatcacagcagctgcaggccacagtcggggggaggggtgggcagtgccctctgcaggcctgttcctcaggagaaagctggagttgtcatcagcccggtggggcgaagccaacttttccccagggctttgcagccagcgcctcctcgtgtccattcagccatgccagccatgtgcttcccccggccccaggcactgcctcctcgttggttgaacgaataaacaagcaaagatggttctggcgttggcctgtggagtcaaagcatcaggggcacactccctccacggccttcccagggcagcgagggtgcctggatgccaaggcaggggcttgggtggatcagaacccctcaggacctactcctcatcctcccccagaggcctagggttgcggggtgagcccaccctctcctttccatgggaatcagagcagaaacttgggaccttccagagcaaagaagtgtaaggtgcaggaggacgccaggtgtctgcagctgggcctgccccaccgatgactaacttagttcctccaggctgccacagggctccctaatcagcccaacacaaaaatcaatacacactcaccagatccattacagagacgtgagggggggacgtgctttcacgcctgctttttgtaaatcagcatataatcttctgtcatttttctgattataaatctgtattcattgcagaaaattagcaaatagaggaaaggatgaaaaagaaagaaaagctctccataattttcctacccagaaaaccacggtgagcaactcagtacatttctttattttttaagtgaaattatatggaatattcagttttgtaacctgatttttcagttagtcgtttataataccatattcctacttccttaaaaattctcaaaacccaggaagctttcttccagtcgttcgctgctagatgtgacgtcgtttcccaagttgcaccatcataaacagcaacacaatggcaattcctaccccacatctctaaagcggccactgcggtcatccctccccacgtactcctcctgggcatgcagccaggctgtgtcccagcctccctgcaggtgagagtgagtgactgagcttggacaggccctggaagcctcccgcacactcttccccttggaagccaatgctcatagtgccagagccttcatcatcatgggtccctgaacgaccccatggaaaagagcggccctacagatcaggtccgcagcccaggagagccaggtgaccaagaaatgaacttctgttttattaaggcaccacctgtttgggtctacctatgactatgccactctcaccaatccaggtacattcccagaacatcttaccaaactttgagtgtggcccatgacccccagcccctgagtgttaagaggccactgtaacgaccctcgtaggaggtgcacaatgggagtctgcagggagaatgctaactcagggcaaagacagcgtgggccagtgccacgtgagctcaccttgatgctgggaagcagtcctcaaagaaaggcaccctcctaccttccagccgcctttgggctaggtcatcagcgctctcaccatctgcaagagaagacagacgtggagcaagtgcacaaaggcaggacttgggtttcaagagggaagcaccccgcatgggaacacctggcaggggaaaaatctacccccaggaagggcaaagctggagggtctccctgaggaattgacctccacactgaaatctgaaggatgagatgacagaattaacctggtaaaggggagagagactcagaagaacttcccaggcaaaagacagaatggctgaaaatttccccccaaataatggtcttcttccacattccccaccttagcaaatggccccatcaggcaaccagcacctccaaacaaagaggcaggagcaattccacacactctcccacccctccgaggccaaagtccatctctgcggcccaccccctccctgggtgccttcacccatggcccccagcccagactccaccctcagcggagggtcctttcatgaccactctggtcacagcatcccagcttcaatccctgcatccagtccccactcttctgagggcaagaccaaagccaccacctccatgcgacctcctgctttctccactatggaaggtgtatccaaccctccttgctccagggaccaggtccagctaggggagctgagatgctgaggctgcctgcttgtctagcagaaagacaggtctgtgctatttggtgtacaagtgctcaagatagaagcaagcccagggtccatgacacccagaggagagttacctcctgggctcaggctggaatcagggatggcttcctggaggaggtggtacctttcccaagtctcaagtagcaagtgggagttacctggaaagaggaggaggagaatcgggaagacgtgaatggtagtcctgaggccccggctttttcagagaaggctaacaggcccctgagggtgggagtcagggaaacactctagctttcaaaaccacaaccccctgagtccctcagaggaccatccaggccagatgttgcttcaaagctgtcagaaactttgggtcacctcagtttacaccagggtccccatgtgagggcaatgcttgcactgtttgccgctctcctgtgctgtttgctgctaggctcaggggtcggccttgctgggtgtcctgcgctctggcccctgcctggatacatgggtcttcctcagtttcccagggaattctcatttcacatgaactcagtcacttgcaggctgcccattccacgggagccttgcgttgagctggccagggcgctgggctgcagaggaaacaactcctctcctgctgtcattgccctgccaagtcctgttcacccttcctgacaacagtgatatttttacatttgcattcccggccactggccctgtgttgtctgtgagcatgtattgaataaataaatgagaccctagtgtcacaccaggaggccccagccggcaggagagcctggcattgcagggctttgccacgctgtgcttccctcccccgtgcctgcccgaggggaagagcttgggcaggttctgcatctccctaagcatcatcctcactcctgagacaccagagtgggcccatagttactgtggttacccaggctggtgagcgcccccgcctccacatgcatctgtcttcccagggccatccccagggtggaggttcctgcaacgcctcaggaccaaagtcccacactgagatgggccggtccagagcctcctgaatcccctggactccctgtctctgcccttctcctgtctgtgcctggcgtaggtccgagggatgcaacagtgggcagagcccgcaggaggggcccgcaggctggaaagacagttggtaaacaaggaagtatatcatctcctgtctggtggtgataaacgagcagggtggagagagacggaggcatctgtagatcggtgctctctgacaaggtgacattgagccaagatcggagcagagagtatgagagaatgcaggggtgggaagtgttggtggacacagagcaaggacaaaggcctgggggacagcaggcgtgtgcccccgcatgagtgactgagaagggaccacagtggctggagatgagaggggcacactggggcaggaggcaaagtggggaggcagattttgggggaggcagatccagggggccagggcagacctgacccaagggcttacccccacagactcttggggcagagcgggaggcagaggagagggtggaccaggggatgctggggggcagctgagcagccagggtacaaaatccatttggaagacaacggcctttgcctctaggaaagggggctccctcaaacggggtgagccagagagaggagccaccatctgcacgagggcatgagccactccttgaagtggccagtggacactcagcttctcccccgcatgtgagagagcctcccacaaaatcatcactacccttggttgcttgacaaacaaggcccaggttaacacaaacatgtctgttcatcacgtgtgtgcttttccctgagcacaggacatgaatccaccccgcctccccggacagagatggacagccgcaaggatgttagcaggttaataatgacagtcactttccttcctcctaatcaccagagctcattgcctccaggcaagtgtgagagatggcaggacctggcctcttcgagaccccaaaaatgagtctttatcccccaaagagaagtgcaaagcaccacgctgtgcttattatgtgccctaaagtgtgtctttcatttcagacccaacaagccagatggtcactggtaatgctactttaacacacatggaatgcaacctcaatttatatcaatttaaaaaggtcctaactcctaccgtgtgcaagagaggcagttatacaatgcggtataatgcaacacaacagcacagtacaatgtagtgcaacacaacagcacagtacaacgtagtacaacacaacacagtgtaacataatataatacagtgcagtgcaacatagcacaacacagcgagtacaacatggtccagtgcaacacagtgcaatgtaatagcatacagtgcagtactggaaaacactacgtaagcaggaagcacactacagcacggcacaggacaatatacaagtaatgcgatgcaatcattatacagcctggagggaaaagggacatgcattcaaattctgtgactttgggcaagcaccttcctctctctcatcctcaatttattcatgtggaaaatgagaacacagtccccttcacaggtttgtggcagaaatgggatgaaatcactggtaaagctccagcccccagcacattcaccaccatgccccaccccaggtaagcatgcacagagagcagtgtgggcgcctgaagagggtcagggtcagaggagtccaagtcagaccacgaaggacacctcgggaggccagggaggaggccagaggggcgcagcaggaccacccagctgagcagcagctgcaggtgttcaggtgagcggctcctactccctcggtgtcaagtggctggaaccgcctccttgagctctccagcaaccctagaaggaacacacaggtgatcaagctgcgacagctcagagcagtggctcagcgccttggcctcatggccccaagtgaagcctgagtgcagcccggtgccttgaggaaacctgccgtgcccagcagcagcctcctctctgctcctcggggagggccagctgcgggcagcactcacacccagagccatctggctctgctgaactcccagctgctctcacatggggtcacccggcctgatacccagccacctccagcccctgcctcacctctgtgagatgaagatggtgaaggcccggtgcccactgaggagtgccagaggtgccctgggggagcctcgcagcagccagatgaagcttgaccacccatctccagagctcagcctggccctccgcaacccccaccaggctcagcgagcccctccccacggctagccttggcccctcggccctgctcacgctccaccctggctgtctgtacttgtccagggcaggaccatttgccacagtggaaaggattttcagaggcaagccgccatccttcaacaatatttatgaggttgtcacaaggtgatacagaaatattcacaaatataaaaagccctgcctcctgatacctatattttacagtaagctctggatgcagacggttttggttacacagaaaaatgattctgatatgattattaaactcattaaacaactttttccacatttttccacagatggggcctcaaagttcctccaaagaagggttctctacaatgttcaaatcccctccccactgtccacccccaccccatgagggtcctcccaaagcccactccactgtggggttgcaggacaggaagggtgagagatggcggagaagcgggaactccagcctgggccagccagagcccgagatgctgagcttcagattcttgccctcagggcaacgtggcccaggaggcacatggagtgtggccaggagaagggacaccatgccaaaaagcaggctacagccttcccggggtccacagtgttcccaggtgcttttagctgtggactccttttccaaatgaagtctgaaaaggaaacaccccatatcaaacaggtgaaagcagcacgggcctggatgacgtgggcgtggaaggctcagagccctgactgccctcctgccagtctggggacccctaaggcacagcctgcaagttccgcacagagaatccttctccggctcctgagaccaggcccacaggcattgtctgacgctctgtgaattgtgcagcagggtaaggcctttccaggagtgacaggcgagacccctgaggggtgttgtaggtggcacagtccacagggccccaccagaccaactgctcagctcctcagctttcactccttggataccatagcaggtctggacccacggggccttgggaccccccatgggggtgacgtctttccagctcagaggcaccccaagcccacctgtgccactgaggcccaccagcaccacagggacaaactgggagtcctatgccttgaccaaaggggtatgatctaaggattacaaaggcaaaaatcccctctcccatcaccatgtcataatctctggatccagcgtagcttctttctgtctctaatgctcatcatcacaactcatcgcatggtgggcagggacaggtggccagggacagaggaggcagtgctgccgtgggatggagaggtctcagtctcaggggctcctggccccaggtgacacaggcactgctcaggaagggggcctctcctgccccctgaagtcctccctcaggtgtgatctcagtctcagttatcacagccaaacacatgcaaacaaacctcatgcaaagatgaagagaaacaagaaacctggggaggcaggagcctgtggccttgccagggcctgtttaatgtgcctcaggcaagcaatgggaagccatggctgtcccaggcctggccctgtggagatgcccactggagacgccccgtcctgatgccaccgctgaggcaggccccctcaattgcccgggaatcccagaccacatataccctccttcctttggttggaaggaaactccaactccacagggcaggtcctgggctgtgcatggcatgtgcggccccacccctgcactgacgctggggtcaccttatgttccctttgcccgcatgtggtgtctgtctgtccattgagtgagaagcacccccctacagggtgccttggatccaaggcatgaggtcagtcaggaccctgtagctgagcactgggaggaagtgtggcatgggctggagccctggctggggccctgtactcacaggtcctgagaggactgggaaggaagccccgaaggccccacttgttgtgctgggctgggttctgcccccaggaagatctgaagggccaggaaagaagggactgggcttgctctgtggcaggaccaatcctaacaagtaaggcggtgggagaatccctgcaggagatggaccagtatccccaggagcagagggagtcccactggaagtgttcaagcagaggggtctcccacagtgggatctgtcttccctctgccagcgaggcaactggaatccgaacagggtgccccttgtccaaccttgcagtaagtcgtggcaactggaatcagaacagggtgtcacttgtccacaccttgcagcaagttgtggtctctggccatcacccagccctcccctggacagcacgcggcatggctggggtctgcggtggacagacctggcctccatggtactgcctgggcagtcaccagcttctcatagcctcctgccccatccagaaaaagcataggggccagtgtgaggataactcggggatgtctgtcatgccccattgctgtgcctggaatacaggggaagctgagaagacctcaatcttcttttctgacccccaccgcagccgggtcattgaggatcactccccttcccaggccccagcctccctgccggagctcccactctctgggcacacccagcattcagcgtccccacaggaaacagaattcatcctggttggctcaagtgaaaggctgacactgaggcatgagtggaccctggggggccagccacagtgggggcctcttaccaccctcttaccacgttaccttaccacccggggagggtccgggcaagtagcaccaagaaacggagcccagcaggaagcgggcagggaaggaatgcccatcctcaacccctgcctgtgcctcccaccggccagacctagcaggaagccaatgggcaagggagccccagggcgtgtgcagagggtctctccctagggcagggcagggcaagggaggagagaagcagggcaaaggggacagcccagcatcccacaaagagcagcatggaggaggcagggacctcggccctgcaaccaagactgcagggcaacctgaatgagcttcaaagcatattcatccccagagcctgcagacgcaaactcaggcagcaccctgatttcagcctggcgagactgagcagagagcgcagatgcattacatcatcatccctctcacctatggagcggcgcactgacaggccgcactgtcccagcctctacgtttgtggtcaaagagcagcaccttcctgaggcctgaggcctagcgggcacgtgaggttcgccacatcattgtttcaggtcagtcccgctgatggagggtcactaactccttcttacaggaagttaaactgaagcagagtgggacaacgacctaccccgggctcagtcaccccagccaggccagtcctgtctgcaggaaagggacagcaccacagacagcagggcgccttctccaaagggcacagtacagcccaggacacatgtagggcgggcccagggtgagggcacagaggaggggctgagggatgcgcaggctgtgctggtgggaagggggcacagctgggcaggatgcagcaggagtccggagagctgggcggcaagagcaggagcggaggccccgacaccgcagaggagacttggcgaggcagcacctggggtctctcccaaacaaggccgagtccacttgtgtgcccagagttcagtggagttttgttcagttgctcatcaaataaagtgtgatctatttccacggggaaggaatcaagtaccggataaaggtcgtttccatgcagtgcccctgttgccacacgtccatgtggctgtgtgggtgtctgggtgtgtgccatgcaggaaatctgagcatgggtttgatcataggggtatatgtgtctccgtgtgggcatgtgtgcacatggattcatacatgtgtgttgtccatttcttcgagctctccagctcactctgtgggcatttacccccctctgtgccaagggcaggctgcagcaggggacgagctggcccatggctctgttcctgcagccagacctccgttccccatggtgccaaggccagctgaggctacggccccaaactaccagaggccagtcacaggacagcagggcgcatgtggaggctgcacagggacactggtcatggggtgcaaggcagagagtaaggtgggctccctggttttcttacagccatggtgggtggtgcgaggtgacccaggcagactagggtagcagaatctcaggctccagcacaagagatcaagtgatgtgaaaactctggaagccacaagctctctgggaatcaccaaagacagtggaagtgcagcaggcaggccccatacagaagccgcttggggcaggggcctgacacgccaggcctatacctctcactgtgagagccggaacacgtggcctcatgtctgagccccagctgtaaacacagtcaggaccaagggagagggcaccggaagagcacccagcccagagcagacccccgacagaggccactccttccatttcccctgccgtccggcgaaggccttgactacctgtcagtccagactccaagtggcctggaggcctctggaggcagcccaggggtgggttcaggatctctctcccttatactcaacccaacaagattgcatagtaacttagaggagtctggacagacgggaatggctgctttgggagtcaaaacctggcgttacatctgccattggaagccacataactttgaggaaattatccaatgccctgtgcctcgctttccacggtgtaaaatgtggtgcaacaagcaggattttcctaaactgaccctgggattccctccagtttgcctggacaatgagccacatgggaccaggcaccccctgatcccagtgggagtgggttagccaagctcagcttcttcccagaccacacagtctccaggggaggggcagctgaagctcccagacagctcctacaaacattgggcaccccaaaccagaccatgccggacgtgtctgcttgagcccactgagaagactgctctcacacttgccctgaaggagggaagtcagcagagcagggccacacacagcgacacagcagttctctggcctcagagtgggagcagacatggcaagacaggcacaatgacagactgaacaaccaggcacagttacagacacacagggcaaccaggtacagtgacagacagcagggcaaccaggcacagtgacagacagcagggcaaccaggcacagtgacagacagggcaacgaggcacagtgacagacacacagggcaaccaggcacagtgacagacagcagtgaaaccaggcacagtgacagacagggcaaccaggcacagtggcagacacacagggcaactaggcacagtgacagacagacagggcaaccaggtatagtgacagacacacagggcaaccaggcacagtgacagacagacagggcaaccaggtacagtgacagacacacagggcaaccgggcacagtgacagacacacagggcaaccgggcacagtgacagacagacagggcaaccgggcacagtgacagacagacagggcaaccgggcacagtgacagacacacacggcaaccgggcacagtgacagacacacacggcagctgggcacagtgacagacacacacggcagccgggcacagtgacagacacacagggcaaccaggcacagtgacagacacacagggcaaccaggtacagtgacagacagaacaaccaggcacagtgacagacagggcaggcagacacagtggcagacagacggggcaaccaggtacagtgacagacagggcaggcagacacagtggcagacagacaggacaaccagacacagtgacagacagacagggcaaccaggcacagtgacagacagggcaggcagacacagtggcagacagacaggacaaccagacacagtgacagatacacagggcagccaggcacagtgacaaacagggctaccaggcacagtgacagacacacagggcagccaggcacagtgacagacacacacggcagccaggcacagtgacagacagggcagccaggcacagtgacagatacacagggcagccaggcacagtgacagaacaatcaggaacagtgacagacagaacaaccagacacagtgacagagcaaccaggtacagtgacagacagaacaagcaggcacaatgacacacacacagggcagccaggcacagtaacagatggcaggtctcaccagcctgaaacagagcttagtcattctatcaacaaatgctcatggagcatctacctgtggcacattattctagggcggttggcagagcagggtatgaagcagacaaaagcttgtccctcacagagcttacattctactaacaggagacagataatagattaattagcagactagcatattagagcatcttaagttttgggtggaaaatgcagaggggacattggcacagggagaggtgcatatgtaaacccccatctaccaccaggcctctctgtggactcacgcactgaaataacacctctgggagccctgctattacctggcctgcacatcccactgtccagagcacagtcccccatcgtttcagaacaagaaaactgagaagggtaggacctcaccagattctacattcagacaagtgccaaagaacactctttctcataggactcctctaatttggtagcacatggaagcactccgatttctcagccattccccttcctatttataaatcagcatcctaaatggtgctgcctcagtgagctggtgacaaatgcgcttgaaatgcattctcctgcacacccataaagttgatttaatatttcaattaatcttccctcttcctcttccacaatttatgtggctgctttttaagcaagtctttcttggagcttaaatgagcacaagcgtaaacatcagttaatttatctgtttcactagacataatttcatatccctgaagcacctctccatcccctttatgggctggcagaagggctcccctggccagcacatggagtgacagtctctaattgcattgccagtgagggcatctatcgtgttgtgtcttgcccactttgagaggccataaattcagatgcccaagtaaatgaggagcaggtattccccccacagaagaagacactgagcaaggcagccatggcatggaggctggaagagaccaagagagtcttctggcaggagcagaggcaggcagccaacagctctctctctgatgccatcaccacccagccggtctaaaaggttcatgtcagcctttagcactgaactaagctcagctcagagacttgttttgtgttctgcagggaaagcatccaaaatccgcaccttaaccactttctagtatcctggtggataccttgaggcaaggtgttcatgtaggttaatgaggagaattgcattgcttatttctggcttggtagggaagcataggagggcaatgctggcaggatagggacctcgatcatcctgacaggcccactatattaggcgatatgagctcttattcaaactctgtaactgaagtgctagttagtcttggccaagccattttcccgctatggcctaagtttcctcacatgaatagaataaactgatttccaggtcctataagatggtggacttagccatgtgcagtggctcatacctataatcccagcactttaggaggccaaggtgggaggaacacttgaggtcaggagttcaagaccagcctggccaacatagtaaaatcccatttctactaaaaacacaaaaaattagccaggcttggtggcatgtgcctgtaatcctagatactcaggaggatgaggcaggagaattgcttgaacccaggagacagaggttgcagtgagccgagatcacaccactacactccagcctgggcgacagactgagactccatctcaaaaaacaacaacaaaaaaagatggtggactaaaatgaccccaaacctcttcaaatagagacaccaagaaatactggggtaagtacaacaaatattacatgcatagctaagctcataagaaattttttaaaatctttggacagaaacaaagaaaaaactaaattctacactctgaagtatataagctgctgccatgatgccaatagtagagtgggaaggtattagtaccagttaattagagggctaagtgttaacatttacataggaccaggcaacaagaattcaagaacataaagatggcacaattttataaaagtacatgctgttttgaaatatattcaaatataactttctgaaattaaaaacatagtttttggattaataatccaaaaagatgggtttaatagcaaattatatatgtttgaagaaagaaacagtaaacaggaagacctgaaaaactcaatgagaatagagatcaagagatgaaaaatataagagaaagtttaagaaatgtaaggtagtgatgtcaataatatggtgaaataggaggtcccagtcctcatcctcccatacaagcatcaacttaacaatgatatacaaagcaaagtacctttatgacaagtccataatttgaaagagagagcagccacattgaaatgggtgacaagagcaattttatctaactagcatagctcagggcctgcagaaagtatctcagtccatgacttctccatcagtgagaaacgaaaagtgagtggagtatatatttattgttcccagtattttggggtgctgcccaaggaatcactttctatcccacctcacccagagctctggaagaactggcataatttaaacacgtgattgaagctaaaagcaaattaatggagtgggtagctaattgcaactagcatggctttgtaagactgggagaaagtgcacaatccagagacttctctaccaggaaggaaggagaggagtggagcatacacattcttacacaaggtttgagaagttcctggaatctgtagccaggctgattggcagagttctttccctctcaaagccagtccacaaagattgggaaaggtgtctgtgtcttcaaatgcacaaaaccaaggcaaaactacaaggaacatgaagaatcagggaaatatgacacaaccaaaaggaaaaaattaatatccagtaaccaaccctgaagaaatggagatctatgaattgtctaacaaagaattcaaaataatcaccatacagaatgtcaatgaattaagcaaaatcaagaaaataatacatgcgcagatagcctgttctctgctgtgctgcctgttgcacccttgcaagtgaaagaaaggaaagaaagaaaaaagagaaaagaggaaggaaggaaggaaggaaggaaggcaggaaggaaggaaggaaagaaggaaggaaagaagggagggaggaaaggaaaggaaagaaagaaaagaaagaaagaaagaagaaaagaaaaaaaagaaaagagggagggaaggagggaggggaggaaggaaggaaggaaggaaggaagggaaaacaatgtatgaacaaaatgaaaatttccacaaagagacagagccataaaaaagaaccaaacagaaattctggagctgaagaatacattaactaaactgaaaattcaagagaatgtttcaacatcagacttgatcacagacgaataaagagaaaaagaatgaaaaagttaagaaagcctaaggaaattaagggacaccttcaagtgaactaatgtatacattacagaagtcccagaagtggagagagagagacccagaagtggagagagagaaatgggcagaaaacttgtttaaagaaataatggctgacagccaggcacagtggctcatgcctgtaatcccagcactttgggaggccaaggccggtggatcacttaaggtcaataattcaagaccagcctggccaacatggtgaaactccatctgtactaaaaatacaaaaattagctgggcatggtggcaggctcctggaatcccagctactcgggaggctgaggtaagaaaatggcttgaatgtgggaggcggaggctgcaataagccaagatcacaccactgcactctagcctgggcaacagagtgagactccatcaaaaaaaaaagaaaagagagatgaaagaaaagaaagaaagaaagaaagaaagaaagagagagagagagagagagaaagaaaaaaagaaagaaagaaagaaagaaagaaagaaagaaagaaagaaagaaaggaaggaaggaaagaaagaaagagagagaaagaaaggaaagaaagagaaaggttgaaaactcctcaaaagagaaatggacctccagattcatgaatcccaaaggatccgaaataggaagaacccaaagaaatctgagataaatttataatcaaattttcaaaattcaaagacaaagagaattttgaaagcagtaaggaaaaagcaactcatcatatacaagggaacctttaggagaccatcagtgggtctctcagcagaaacctagcaggtcagaaagaagtaaggtaatatatttaaaacattgaaagaaaaatggtgcccactgaaaatattatatccagaaaacttatctttcaaaaatgaacaggagatactcactggcaaacaaaagctgaaggaatccatcaccactagatctgccttacaagaaatgcttaaagaatctcttcaagttgaaaaaaaaagaatgctaaacagcaacataaagcaaataaatgcataaaactcactggaaaaagcaaatacatagacaaatacagaatgttgtaatactataaaggtggtataaaaatcacacttaatttcagtacaaaaattagacaaaactattaggaataactataactacaaaaagtgtgagtagagacaatataaatgtataaatttcgacatcaaaaacaaagtatggggtggggagaagtaaacatacagggtttttaatgcaagcaaaattgagttgttatcagcttaaaatagactgttataactatgttttatacaagcctcatgataatcataaaagaaatacctatcgaagatacacaatagaaaagagaaaggaatcaaaacatatcactacaaaaaaaccaatgaaacacaaaggcaacaacagagaaaaaaagaaacaaaagaaccacacagactaaaaaatgtttaacaaaatgtcaatagtaagtccttccctaggataattattttaaatataagtgcagtaaatataagtgcatacaaatactaaataaaacagggtggggatggacatacttatagcagacaaaatacactctaagcctaaaactatcacaagagacaaagaaagacattttaaaatgataaaaggataaattcatcaggaagatataacaatcataaatatacgcacccaacatcagcacatttaaatatgtaaagcaaacattgacagaaatgaaaagaaaaataaacataaatacaatgatggtagaaaaactttaatattcccctgtcaataatggatagaagacatccagacagaaaatcaataagtaaacagtgcacctgaacaaagctatagacttagagaacctaacaaacatttacagaatattccactcaacagctgcagagtacatgttcttctcaagcacacatggaacattctccaatattcataatagccaaaaagtccaaacgacccaaatgtccatcaattgacgaataaatgaataaaatgtgggccaggtgtggtggctcacgcctgtaattccagcactttgggaggacgaggcaggtggatcaagaagccaggagttcgagatcagcctgaccaacatggtgaaaccctgtctctaccaaaaatacaacatttagccaggcgtggtggtgcgcacctataattctagctactcgggaggctgaggcaggataatcgcctgaacccaggaggcagaggttgcaatgagccaagatcatgccactgcactccagcatgggtgacagagtgagattctgtctaaaaaaaaaaatagaatgtggtatattcatactatgaaacattattcatccataagaaggaatgaagtactgatacatgctagaatacagatggcccttgaaaacattatgctctgaggaaaaagccagatacagctaggctacatattgtatgattctatttactgtggtacctccttaccttcaggagatagatttcaacaccactagtggatgcctgaaactacaatagtatctacttctatgatactatgttttttcctatgcatgcatacctatgaagtttaatttataaattagtcaccataagagattagtaacaatagctaagaataaaatagaaaaactagaacaatatgccagcttctgtgaagggagagttacgtgaaaaacaaccacgtatgccagcaacactgctcttgaactttgggtcttgattaagtgaatgaagtgttgctggaacacaagcactgtgatactgtggccgttaacctggtaacggagaaggctcctaagtgactaacaggctggaagtgtagacagcgtggaccatgctggacaaagggagcgttcatgtcccgggtgggacaaagtgggatggcgagggatttcatcacgccacttagaatgatgtgcaattgaaaactcatatattgtttatttctggagtttaatcttttaggactgtggttgacttcaggtaactgaaaccatggaaggtgaaaccacagataaagcaggactactgtatttaaaatgtccagaggaggcaagttcatggagacagagatcagtggtttccagggggggtggggggcagcaggaatgggatgtgactgcttgatagatacagagtttctttctagagtgagaacaatgttctggaactggcggtgatgactgcacaacttctgaatgtactggacgccactgcatttgtacaatttatttattttattatcattatttttttgagacaaggtctcactctgtcacccaggctggagtgcagtggcacaatcatggctcaccgcagccttggtctccagggctcaggtgatcctcctaccccagcctcctgagtagctgggattacaggcatgcaccaccatgccaccatgccaggctaatttttgtattttttgtagggatggggtttcaccatgttgtccaggctggtctcaaactcctgggctcaagtgatcctcctaccttggcctcccaaaatgctaggattataggcgtaagccactgcccccagccttacacaatttaaaatggttagaatgatgaattttacattgaattccacttcataggaaattttttttaaaacaacaacaaacctctttaatggacacataaattccctgggggtctgattgcaatgcagatttggattaaggagtccgggtgggtcctgagaccgtgctccccttgcttctcacctatggccacattttgagacgcaaggccactcgaagggcccccacctctgtgaatcaacccctgctccatctgcccctataaataagggaatgctaaagcacagatggcgggagtgggcgtgtccccaggtctgagcctggagggggtggccggcctcccccaggcatggaagtggagggagagggggctgtaaacgggttactctgtcagcagacacagaggagaccaaaaacagtagcttttatttcacacgaagctgaggaaggaaggcgagaggacagcgctggctatcagagggtgctgcctggcaggtgcaccacctccagctgctgggctccagctccggggctcagaagccatctgaaagaaagcagcggcctccactgagcaagctggggtgctgcagggtacccgcccccgtggtgctcagcagtgccttccctcccctccccagcccccgggaactcctcctgcgccagggacacagggatcaaggagagaacagagtgcaaccccatccctgcctgatcagtgggggtgcccgtcttccctgcgacggttttggggtggaacaggagtggctcctcagggggaaatgaaaggaactgaggagctccagtcgtgagaaggccaatgaagcaggtagcttctctgcgccggggttgtgctgagatgtcatctagggccggctcttccagaacctcatttgacgctgggaggcagcgaccgggtgtgggggcggggtggtaggggaggggagcagggatgatgcggtcccgattccgtccccagggggcgctgggaccctccctgctatccaggctacacctgtgcggcgtagcagccgtccccgtctcgcctgcacagcgccagatgacagcagcccagaggctgtcctctgccacctgcactgctcaccttttccgaggaggtcggggacggggctgaagggtcccccgggcaggttccaggccaggtcctctagcagcccagcaggcctttcacctgtgtccccaggtgatccacggtcttctctaccatctagagtgagaaggtgggtaacgtccaggacaggagtggtgccacgttctgcttcattagccaggtcctaagaagcagctggcggtccagtggggtgcagtggaaaaggactgggagctgcgggacctgggttttcctcactcaggctctgcgcctacctgcctcaatctccccagatgacaatatcctatggggctcgctctctaaggctccttcctttttggcactcagtcacaggtttggataaagcgcgtgtagattaccttctcccttttggactttgcagcctggagctcacattctttttgttattctgctccctggtggtgtctctgccaaatgacaggtctgggattttgaaatttactcagggttcttaatggtttttccctgtgtatgccatggaccccattggcagtgtggtgaagcctacagacctcttctcagaataatgccttaaatgcaaaaaataaaacatatagaattaccaagagcaccaattgctttaaaatattattcaagtattaggccaggcgtgatggctcacacctataatcccaacactttgggaggccgaggtggacggatcaccagaggtcaggagttcgagatcagcctggccaatgtgggaaaactgtctctactaaaaatacaaaaagaaaacgggcacggtgatgcatatctgtagtcccagctactcgggaggccaaagcaagagaatcgcttgaaccgggagatggaggttgcagtgagccgagatcatgccgttgcactccagcctgggcgacagagagagactctgccaaaaaaaaaaaaaaaaaaaaaaaaattcaaatatttaaaattaaactttttggcccagcacgatggctcacgtctgtaatcccagcactttaggaggccgaaatgggcaaatcccttgagatcaggagtttgagacaagcctggccatatggtgaaaccccatctctaccaaaaatacaaaaaattagcggggcatggtggtgcatgcctgtagtcccagctactcaggaggttgaggcatgagaatcactggaacctgggaggtggagatggcagtgagccgagattgtaccatgcactttagcctgggtgacagagcaagactccatcaaaaacaaaatttaaaaatttggatatatgtattggccgggcacagtggctcatacctgtaatcccagcactttgggaggctgaggtgtgtggatggcttgagcttaggagttcgagaccagcctgggcaatatagcaaaaccttgcctctacaaaaaaatacaaaaattagccaggcatggtggcacatgtgcctgtagtcccagctacttgggaggctgaggtggaaggattgcttgagcctgggaggtggaagttgcagtgaaccgagactgcaccactgcactccagccttgtcggcagacagagaccctgcctcaaaaaaaaaaaaatgtatttattaactcactaactcacatgatctaacatcaggcctaacaacaactgaaattttgacataatgaatgatataaatgttcttctattcataactagaagaagatgaaattatctggatttctattggtgacaaagttatagtactattaacaccacggcttgctgtctgtaatttatgatgaatgggaatgctcaatttcagttaaaggcttgtgacaataaagatgtaaacttttccccacacaagttaggaatcgtggctatataacaaaacagtgactggatttccaccttcccatccagtaatgatgctgaaatgtcctggtgggggtaagtaaggccttaggggaggcagggtccattgggggctcgccagcctggcagcctagatgggagggtgatgttggacaaggtggccccagggcaggattggcctgatgtcctgacattccaaagcaagcttgcatctgcccataaaaacatcatcctagaaggtggtcctgaaaccacatgtccttccaaagcaccctgttacctcctctatgacatctagatggcattgcatagccatgtgtctgtcacatgctgtgctctgagctgagtctcctcagggagcgatgaagggttctgcagctgtgggaaaacaagtcttgtcactgtgggacccttagttttccacaatgccagagacttctgtaaatactgggctcaagtgaggtcagtcctcaaagcaaactcaagagcaagaagaggatggcccaggtgggggtcagtgtgcgactgtcagttatctcaatcccaccaatctctacagtggcagtcacctacagacccagatggacttcctcaaggaggtgaagcccagggaggaagggaaggcgggcttcagccaggaagaatggcacctgcaatgatggagaggcctgaaagagcatggctcactgtgcaaaccctgcagggagcctgcagtggctggagatacagggtgggtgggagagagactggagagggaagtcctggaaatgaagccaaggggacagagctttaaccaagaggctttcataaaccagttctgatgtttgtttttgttgttgttgttttgttttgttttgtttttgatggagtctagctctgttgcccaggctggagtgtgatggtgcaatctcagctcactccaacctctgcctccccggttcaagcgattctcctgcctcagcctcccgagtagctgtaggaatagtgagaaagaaaatgagaggaggtatttcagtagcagcattgacactgggaacccattagtaacagctgtcatgtgatgagtgcttaccatgcaccatgtagggtgatcacttaacctctccaacagcctgttcttatgcccaatctacatgtaggaaaactgatgcacagaagggtgaaaggatgtgtccagagtcactactcataagcagaggatctgccattcaacccgctcaactcctgattgagcactgttctccttgagttagctcttccaggcaccatcaaccttcacaacagaagtctgagatccctgattccaagctcggatttcagagttggtaaccctgagatgcctgtggggcatcagggttggctggaaccttggagaacactgacactcaggaaggagagtgctgccccagcagtcaagagaagccaagagctttacggattctacaggggatgaaaagtgttggcatagccgaaagcagcagggaggtctagcaaaataaggactggaaacacagcatgggaaaggccctgctaaatttcaccccagcacttttaggagtggaggaaaagcagagtttggattaccatgacatgagaagggaaggtgaggttgggagtggaaacttggattctggaaaatttcatgaagcttggctgtgaaggaagggagattggatcgcaaggtctagagaagtatttatggttgtcatttgtttttgtttttgttttaaacactggaaaacacaaccatgcttacagcctgagggacaggaggaagacaagagaacccaaggaatgcacttcctgaattgatgggaggccctggatccagagcgggtgggaacacatctggaaggaagacagagggaatgaagcaaaaatgggcaaaggtaaaccatctaactagagggccaaaaagtggagtgagctcccacctgatagcctctatttactcggtgcagtaagatggagatcacgtagggaggagagctagatgttaaaatttcaagaattctatgagtaggttgctaaaaacagacattaaaatagtgaccatggtgtctggaaatggtagctcatgcctgcaatcttaggactttgggaggccgagtgggaggatcacttgaggccaggacttagagaccaggctgatcaacatagttagacccctatctctaaaaagaaaaattttttaagtaaaaaaagaaaaaaaaattgtggccatgatgagaacatttacatcacagaaatcaacaccccccccgtcctttttttttttttttttttttttttttgagagccagtccatcagtgtaccactaggtaagggacttgaataaaaagagggcttcaaaaggggatgtgcagaatgagggatgcagtggaggaggaccatgaagaatgagctggcatcaacaaggaatcctggaagcacaagtcctcccccagcagtgctccacagtctgggtgcaaagacagatggccggatggagctgaaacctaggagtctgcaggatggatgtggtggaagcaaggggccaaggaactgagatttggccagccaggggtttaggagaggagccctggaatccagctgggataaggaaagaaatgaggccaagaagagggccaataaattgggagaaatgggggctgaagagactggaggtcttaggaatcacaggaggaacaagaggtaaagaatattgcaattttagcttttagagttagggcagcttcagatagtgacaatattaaggctgtggccatggatgtgggcatccaaagctcagctgggggagagagttatggaacggatctctgtacatgcagtgtctgtagctgtaaggccttggtgttggatgggttggccaaggggtcatctgcagttgtctagaagtggggcaggtcttgagataggatggagctggtgatggatgtgtaactctgagaggccgagtgatttgtctaaggtcacaccatctgcaaatgcctggaactcaggcaccctcacctccaggcctcatctcagcaagatggggccccctgccctgtgattttctgatttcaactctatctagctctcagctcttccactcagggatgagaacaagaccaggaacaaaacgtccttccactctgagcatcttttgtggagaacaatctgtttttcaaattctccttttcattatttccctccactgaacttagaaaagattctgcaaaagatcatggtgttattgctgaatctggggagggaggaggacattataatggtgctttggttatttttttatggtgagtcctttaaagacctatactgaaatatttacagatgaaatgctatactgtctgggatttacttccaaataatccaggcctgggtggggatgggggagaggcatgcgtggatatttagagcaaagaggatgggctgacagttgctaattgctgaagctgggtgatgagcacacgggggtgcattcagcaattctctctacttttgtgtgcatggtttgaaatgttccataacaaaagctggctgtctggcggggttgtcagcagaaagcagcagccatggtgggctgcaggcatccatgtaaaatattcagagagagagaggccactgggggctatgctccatcctggccccacattctgagaaggcccttgagaggcaggagcaggtctagagaaggctatgggaagggactccttttttttttttttacagggtctcactctgtcacccaggctgaagtgcagtggcacgatcatggctcactgcaacctctgcttcccaggttcaagtaattctcccacctcagcctccagaatagctgaaactataggcacacattactgagcctggctaagttttgtattttttgtagagatggggtttcactatgttgcccaggctaagctcgaattcctgggctcaagtgatccgcccgcctcagcctcccaaactgctgggattataggcatgagccaccgcacccagtctgggactccaaattttaactcaattgtctcagctgaaactgggctgctcggcttggagaggaaaagctctgaggaggcccgaagagctgttctcacccacagagtggccgacctgggagagggcctgtcatcatgagtctgtggatacacacaccccctgctggctctgtccagaggcctttggccaagcctttccccggaggctcacctgccctctcccagaccctagccactctcccctcacacacctcccccaagctcagaccaggaggacgcagtgtgaccctgccagccaagtgggagtctggctgctttggaagtcaggagcaaccagagcctgctcctctccactggcctaaaacaccctgttctctacgtgtctgtgacaaggtctaacttggctccaaaacccctccagggaaaaggctgggctgaggtcactccccacatggctcagcactaatccttcacatctggacacaattgtgctctgtgcaccctggagcaactgtccatgaggtcatcaaggcctccacggagtgcatctgagagaacaagcttggagcagggcctaacattgtactgcctgctccctctgcaccagagtcctcaccatggcgctgacttgaacgcatcatggcagaaaacatgctggagacccctgttctcagcctggttcagccactaatgattgtgggattgtgagacagttccttctcctccctgagcctctgctgcctcctccataaaatgggggtagggtaggcttgaggccctgaatcccccatgtagctcatccttaattcttctctgtctttcagaagctgcagagaggcctcaaaaattagctacaggggctgggctcagtagttcacatctgtaatcccagagctttaggaggctgaggcaggaggatcgcttgaaaagaagtttgaggacaccctgggcaacatagtgagactctgtttctacaaaaaaaaaaaattaaaaaattagccaggattggtggcttatgcttataatctcaggtatttggaaagctgaggtgggagaatcgcttgagctcaggagtttgagactacagtcagctacgattgcaccactgcactccagcctgggcaacagagaaaaaccctgtcttgtattaaaaaaaaaaaaaaaaaattagtagacacgcacatgcacccacggggctgtcagtggctcagacaaggggagtggaaaggctgaaggattatgatgattaaccctgagcagccaaggctgtggctccacagggctcccttccttcttttcttcccgctctcccaggcaccgccagttgggaaatggacctccttggatgctgcattgttttctctggcccagctcctgcttggggcctgatgtacaccctggatggtggctacaggtggggcaccctgtgctggtgagtacaggctgctgtggagcccagaagccccaggggacggctgggctgggctggctgccccagttaaagagacgtggcccctgggtcccatcctttgaggcagaagtaccgctccatctacttccaggccttatggggagaccttttgtatctggacccaaacagtaagaaagtgccacaacgcagatgatttctgcgtgctcggtgatgagaaatgttttctcagtggcatctgtgaaaggtgctgctgtatcttccgaattgtcaaaatcacactctgctttgaaaaacaaccctgaccacctgggggttaattatatttgaccacattcaatacaatacaataataaatttaccacatccaatatttgtattaaaatgtatgattcattcaaaatgatccatgggttttgattatttttgaaagcagcagaacactattcttcaagtgtttctataaaaaactccaaaatgcgggccgggtgtggtggctcatggtctaaaaagccatcagggataaaggtttctctgagtgctgctaaaagaaaccaagactggggcccagtgtggtggctcatgcctgtaatctcagcactttgggaggccaaggcaggctgatcacttgatgtcaggagttcaagacaagcctggccaacatggagaaacccccctgcccccgtgtctactaaaaaatgcaaaaattagccaggtgtggtggtgcacacctgtaatcccagcacactgggaggccgaggcaggtggatcacttgaacccaggagttcgagaccagcccggccaacatggtgaaaccctgtctctactaaacacaccaaaattagtcaggtgtggtggcatgtgtctgtagtcctagctgctcgggaggctgaggcagaagaatcacttgaacccgggaggcagagtctgcagtgaggcgagattgcaccactgcattctagcatgggtgacagaatgagagcctgtctgaaaaaaaaaaaaaagaaaacatacaatgcctggatttcctttaaaataatccagggaagggagaaagggtggagactatagataagaaaaaactgcccatgaactgatacttgttgaagcagagttaatagtacattatatcattctttcatatactattattttgtattttttgtatccaaaagttttcataataaagagttaagatatatcatctaaaatctgaaagaatatgcacaaaaatgtaggaagtcaatgtgaaattacactaacacatgaatactttcctccttttcttcttcattttttttttttagacggagtcttgctttgtcacccaggctggagtgtggtggcttgatctcggctcactgcaagctccgcctcccaggttcaagtgattctcctgcctcagcctcccaagtatctgggactacaggcttgtgccaccaggtctggctaattttttgtatttttagtagagacagggtttcactgtgttagccaggctgatctccatctcctgaccttgtgatctgcccgcctcggcctcccaaactccttttcttctttatctgtagcaatgagcatgcataatcagaaagaaaaataacgtttaaaagtgggtttaaagtctctgtacaagttgtggctaaaaggggcaccaaaagtagccacttgtgggcaggctgctccctcctccctccgggagaaacacaggtgctgctttgtgcccttagctcctggagcctggggctgagctgggagggagtaaaggggaggggggtggcagggtgtgtactggggcctgtattctatgctgagcagagtcccagccactcctcgtgcagcttgtgaggaagccattggtggtcatctttaacaggtgggtaaactgaggctcagagagatcagtggagtcatctgagagaatgtatgttgatgcatgttccctgctgggcacttcctctcttatctaatctctgaggccagccctgtggggtgggtatcattctccccaatttatagaggaagaaacagcaccagagaggggaagggactcacccaaagcaggggatcccgagggctggtctggatcctttccccaagtgcttaatcccacagttcaccgggccctgaaaggcactaggggcttctatcttagtacaggacacttctgccaaggtcggggcaacgacttgtgggggcaggaggcctggatgctttgtgagggctctgcgttggcaccatcatgagatctgagctttcccctcacctgggcaactggaatgagcaatagccatccctggctaagtgggattgtggcttgtaaactgtaaagtcctgtgcaatgtgcagggtggtggaatgagcatctgtgtaccgccccagactgcagtctagtaagtcacttgacatgagtcaccctgtctgagcctcacctgtgaaggggcaacattaagctgaggggggaggtggggggaagaaaggggacagcgaaaggcaaggaacccagctaatggagtaccgagacagcctctccctcccacacagctctgcatctccatccagtcccccatctccacccaaaacagctcagttccccagagaagctccctggaaaccgggaggctgacttcttcaccaactgcagaaccacctgaggccacctggcaggtgagtcggtggcctttctcctgggctcgcctgcctggctccttaaggctgtgctgggctggcctgggtcactcaccctttggagtctggcttcttaagcaatgtcctataaagccaggcctgagcctccgcaggccctctgagatggagctggcctccggggctgccccacccagcagctgtgacctcccaccccggatcctggctccttctctcttgcaagctctactccgggcatcgagcttccctctctctctcctttttggtatctctcaaatctttctcttttcttatcctctctccctccaccccttgccattttagtcactctttctctttccttcttctcttttgtctctcaaactcttttttatttctatcttggttcatatctgttcagggaaagcctctttctgtctcggcctctccttttttcctgttcactgtttattcttccctctctcctttatctctccgttgctctacttctctgcctttttctgagtctgtttcctctcaccatctctctctccatccctccctccctgtatctgcctctctctccatctcgctgctgtgtccagctctgtctcttgctcattccttcctcaccatctgcggatctccccggctccgtgtcccctgccatgccccgcgccccactcaccggccaaagcgcccacggcacagagcagggccagcccggccagcgcgcaaagcaggggccgcatggtgccagcctggctgaaagcagcgcggcttgcgaccgcagccgcccttcccggatcgcgcccggccggcccagaaggaaatgctctcagtccgagccaaacttcctgggcgactccgggctttctggctggagagaacccgccccctccagaggctcctgcgcaccccatgggcagcgcagaacccagaaacccccgggacctgaggcactgacgtgccacccgggagcctccggaggaaagggggccgcccccccccccgagtccccgcgcctcctgggggcacgggaggaaggagaggggttgggtgaggtcatgggctcaaggcgactgagcctgggatcaggagtttgttataagcccatttcacaggcaggcagactgagactagagagaagtgtcttcctcagcatcactctcagccatggcacaagatctgaactctcgtctcctgggagtgtggaaggttttctctgtctaccgagaacaagaaattaattctaatcacatggaacagtgtctgcccctaagagggagacccagacactcactgctctggtaagggagtgatagcaatgtgaaaaggtacttttcaaaaaaaaaggtaaaatcatgactcttgtaaagatatgaaattagcatatactaaaggttttatttaattcattattaatgaggggacaagtaagatggtacaagcagtccaaagtttagaacacagtagtggaaacttcccctatgggacatgcccatccaacaagtgcaacaagaaattaagttttagtgaaaacaccaaggaaaaaagctacagctccaacttctctgctgcagagccctgagtgccttgcctggctgtaagaggaatactttcatcaccaagcctaggagaatgcctttgtccattgagggtccccattggggttaactggagcccttgcagatcaaggctgcctctgccttctgtgttcctggctgtggctgtgcagttgtccataacagtcaccaccctaaccagtgatccagttctcactccctcctccagagcaagataatagcctcaaatgaagaaattcagattctgagcccgagaatctgagacagactcagatctaaatctttttaaagtcttcaaggagtttatgatgcccagtgagctggctcagaagaatttatttcaggaatgccaagaatttctcatgcttgttggtaggacattccttgataatttagccaggtgggaagttgtcaaagaactgccaaacccataaggattcttgtagctcacagccaggggacgaccttatattttgaatttaagattaagggaaaaaaagaaacacaaaaaacatatacagtacattcttgttgtggtagagcacaaagtaattaagtatacagagaaaaacatgaaagtcttttctgttacaaattccctctgtccaacgattcaggtccagttcccttggcttggtaggctctgcctgttccacatctatgcattccccgtctatctaatgtgtattcagagacaaatgtatatacatgagatcaaatcataaatattttgaagatttgctttcattcatgtttacctcagtcataacattaaatcttggctgggtgcagtggctcacacctgtaatcccagcactttggtaggccaaggtgggtggatcacctgaggtcaggagtttgagaccagcctggccaacgtggtgaaaccctgtctctactaaaaatacaaaaattaactgggtgtggttgtgggtgcctgtagtcccaggttcttgggaggctgaggcaggagaatagcttgaaaccaggaggctaaggttgcagtgagccaagattgcaccactgcactccagcctgcgcaacagagcaagacttcgtattaaaaaaaaaaaaaaacttggagatcaatctatgtgagtacagataaatctaaaatatctcatgaatagatgcaagcagcattatttatccaaacagtcccctattgacggacatctagattgcttcctttttctctccaatataaaataaactttaataaatatacctttgcatatatttttatgtacatagtacatattcatgtatttctgaaaggctggaagaggaattattgggtcaaagggtcttttacattttgccagataggccaaaaactgttccccaaattgtcactaaacccacagaagggacaggagggacaggggtcttccagcgcggttccaaggtgcactggagtacatgtttggtctacgtaagaattgggctgcagggggcgccatttacataaaatacttcgggattggagctacctgaagtgtaaacctagcggtcacctacattctccaacattggatatttatcatttaaaattttgacagctcgatgatggaaaatgttaccttgttgttatttttacttacatgctatttattatgagtgaggttaagctttatttgcctcgattacttttttctattttcctccttttcctttatatactctgattattaatgcaatgcctgttatatatgttggcaatgtcttcttccagccttccattatctttacgtttcttggtggtgtctttcattattcaggagttttaaatattaggtagccaaatctaatattttcttttctggcttatagtgtttacaacttgcttatgattccttgaatcaaggctgtaaagatatttttctatgttttcttcaaattgttttaaggttttctcaaggtctaatgtctaatccatctaaaatttttatgtggttgcaaggaaggaatcaaacttaaaattttccctaaatggatatctaaatgtcctaattctctgtattgcgtggtccaaactttgccactactttgaacataaagtagtttgctagctactcatttccaaggggagttctgggaaaatctctgtacatcacatctgtcacaaggtcaaggaaacaaaaatgcaaaataaacataatttcaataaatactgaaaccatatttgatgaaattaaacaaccctccctaacttaaaaacagtaatagcaacaaacttacgataaaaataaaagaaataatgggacatttccttaacaagataactactttttaatttttacacttataatttttcaaattaaaaaaaaatagagatgaggggcttgctgtgttgcccaggctggtcttgagcacctgggctcaagtgatcctcctgcctcggcttcccaaagtgctgggattacaggaatgagccaccgtgcccggccaactacttttatcttaaatagttcacatgtacatacaagaaaaaggagaaatgtattctttattaaatcaggaatgaggtaaagatgccatattgaccaggcattgtggctcatgcctgtaatctcagcactttgagaggccaaggtgggaggatcacttgagcccaggagttcgaaaccagccttggcaacacagcatgaccccatctctactaaaaattaaaaaaaaataataaacattagccgggctttgtggcatgtgcctattactggggaggctgaagcaagaagatcgcttaagcctaggagtttgaggctgcagtgagctatgatcataccactgcaccccagcctgggtaacagagtgagacactgttctaaaaaataaataaataattaaaaaattaaaaattaaaaaaattttaaaagatgccactatcaacaagtgtttggctgggtgcagtggttcatgcctataatcccagcactttgggaggcagaggcgggtggatcagttgaggtcaggagttcaagaccagcctggccaacatggggaaaccctgtctccactaaaaatacagaaattagccgggcgtggtagcacacgcctgtaatcccagctactagggaggctgaggcaggagaatcacttgaacccagagggcagaggtttcagtgagccaagatcgggaaactcctgggcaaaatgatagtatggagccagtggacccagttaacaaacctcctccttccaatattctctaaagtgaccagtgaaattaaagataggggagactggcatcagtggcaggaactagagaaatatgccaaccatatgccaagcctcaaagcaagggggtagccagctggatctaataatacctcttattatttattattctattatttgctaaacttctctgaacccggtattgtgctggggctgtatatgcattatcctatttaatccttgcgtcagtaagcctatcaagtagatatccttatccccattttaaaaaataagatctattaaatatatttgattcaagggtggagggtggcagatcccagtttggaagctaggtagatctggttccaaaattcatggtcctcagcatgatcaggccccttgactctcaagtcccaagaagggcactaaatagagaatctggaaaagagtggaggtgagaaagggacaaatgggatatagggggcacagaggggcaagacctgtgcagttaggggaaaacgctcataaccacctgcatgaatgaagtgtcctaatgtgcagacgttcctctttcacttaatgctcccatgaccctggcaggtagcctcataatccatgcagattgtgacagtacctgccatggtcatgggagcatgtagaatgtgaggcttggagaagttaggaggtggcccagggcacacaggtactatttaggaatttggggatttgcctcccaggcgcctgtgttgcctccacaggcaatgctacaggatgtgcacaggtcctcccagcctggctgggccggggcacaagtggtggggaatctggcaggggcttgctctcccaactcatacccaaaggcaaagggcaaaggaaacaggaaataggggctggtcatctctctggggagagaagtacgctgagaggacagcccaattaaaagagcctcagtggttgggagggtctgagctgtacaaagcctccttgtcttctccctctggcacaagagaggatttccagagataccaggaagacccacaatgggagagttctcagtgagcactgggcaaggctagcccgctctctgcacagatggacaggggctactaacccaaggcacagaagttatagccggagaaagtgagccagtgaagtgtgaatgtggatgtctctgttgagggaaggaaaaggagggggcgacacgacaggttgagatttaagtttttttgaggttggatgcagtggctcactcctgtaatcctagcactttaggaagctgaggtgggaaggtggcttgagttcaggagttcaagaccagcctggacaacatagtaataccctctctctacaaaaaaatttaaaaattagccgggtgtagtggcacacacctgtaggcccagctactcaagaggctgaggtggaaggatgacaagctcgaggctgcagcaaactatgattacggcactgcatgccagcctaggtgacagagtgagactcgtctcaaaaaaagaaaaagaaggttttttgtttgtttctttggttcgcaagttttattcaagaactcatacaaaatattccagataaatgaaatttaatcctcatcttcctcctcttcctcatcctggttaatttggaagtaacataactctgctgttagcagctacacaaaccaatcacatagattattcttcttcaaaattttttggtgtgatatttcaaatatcttttggaaaaaggcacctcagatgtcatggtgatcttgctcttgctcctttcgatggtcaccacccctccaccaggtttcccagcttttcagttcactttgatcctctctcggaaaggctgttcaaaattggcagcgtccatgattccgtcttccacggggtggctgcaatctagagtgaacttcagaacctgcttcttttttttccattcaccacaagctttttcccaggcgccatggcggcagtggaggcagaaagagagctgtttctttttaaattgttattaattttgtaaagtttcagtagctttgggggtacaagttatatttggttacatgaatgaattgtaaaacggtgaattctgagattttagtgcacgcaccacccaagtagtgttcattgtacccaatatgtagctttttatcccacactccccgcccatcctcccccttctgagtttccagggtctattatatcactctgtatgtctctgtgtcctcatagctcagctctcacttaagtaagaacatatggtatttggttttccattcctaagttacttcacttagaataatggtctccaactccatcccagttgcttcaaaagacattatttcgttcctttgtatggctgagtattagtccatggtgtacatataccacattttatccactcattggtcagtgggcacttaaggtggttctgtgcctcgggaattatgaactgtgctgcaataagccccctttctttttttttttttttctttttttagacggagtctcgctctgtcacccaggctggagtgcagtggcgcaatctcagctcgctgcaagctccacctcccgggttcatgccattctcctgcctcagcctcccaagtagctgggactacaggcgcccgccaccacgcctggctaattttttgtatttttattagagacggggtttcaccgtgttagctaggatgttctcgatctcctgacctcatgatccgcccgcctcagcctcccaaagtgctaggattacaggcgtgagacaccccgcccggctctgccccctttcttaaatgtggccctgaatcctcccaggtaggataagctgtaggaagatggggaggtctgcttggtacagggagaagccaagtgtagcgtgagggtagaggtttaatactaagagttatggctgggcgtggtggctcacacctgtaatcctggcacttcaggaggccaaggtgggcagatcacctgaaatcaggagtttgagaccagcctggccaacatggtgaaaccgcatctctactgaaaataataataataatacaaaaaaatacaaaaattagccatgtgtggtggcacacacctgtaatcccagctactcaggaggctgaggcatgagaattgcttaaacccaggaagcggaggttgcagtgagctgagattgcaccactgcactccagcctgggtgacagagcaagactgtctcaaaataaataaataataataataatattggccgggcgccatggctcatcttgtaatcccagcactttgggaggccaaagtgggtggatcacttcaggtcaggagttcaagaccagcctggccaacatggtgaaatgctgtctctaccaaaaatattttttaaagttagccagatgtggtagcacgcacctgtaatcccagctactcagaaggctgaggcaggacaattgcttgaacccgggaggtggagattgcagtgagccgagatagtgccactgcactccagtctgggtgacagagccagactccatctcaaaaataataataataataataatattaacagttataataccaatagttaaaacagccaacattaatgattttgacttcatgtccaacctggtgtgtagcactatatagtctgtttttttttaatttgtaaaaattatattatagatttattttttctgattaaaatgtgtttaatttttaatttttatgggtatatagtagatatatctatttatggggcacaagcgatgttttgatgcggcatacaatgtgtaataattacatcagggtaaatggggtatctgtcacctcaagcatttaccatttctttgtgctacagatattccagctgtactattttagctacttttaaatgtacatagaaaaggtacagtaaaaagaaaaagaaaaaaacataaaatgtgcaataaattattgttgactgtaattaccctgttttgccatcaaataatagatcttattcattttaactatatgtatttcaatagtttttggaacaggtggtttttggttacatagataagttcttttacatatatatatatatttcaatagtttttggaacaggtggtttttggttacatagataagttcttttttttaaattatactttaagttctgggatacatgtgcagaatgtactggtttgttacataggtatacacgtgccatgttggtttgctgcccccatcaacctgtcatctatattaggtatttctcctaatgctgtccctcccccagcacctcaccccctgacaggccccagtgtgtgatgttcccctccacgtgtccctgtgttctcattattcaactcccatttatgagtgagaatatgcagtgtttggttgtctgttcttgtgttagtttgctgagaattatggtttccagcttcatccatgtccctgcaaaggatatgaagttgttttcttttctttccttcttttttttttttttttgagacagggtctcactctgtcgcccagactggagtgcagtggcacaatcttggctcaccacaacctccacctcccaggctcaagtgattctcctgcttcagcctcctgagtagctgagattacaggcatgcgctactaccccccagctaacttttgtattttttgtagagagagtttcaccatgttgaccaggctggtcttgaactcctgatctcgaatgatccacccaccttggcctcccaaagtgctgggattacaggtgtgagccaccgcacccagccaacatgcatgagctatttagtggcaatttctgagattttggtgcgcccgtcacctgagcagtgtacactgtattcagtgtgttgtattctatccctcaccccctcccacactccctttccccagtccccaagtccattatatcattcctatgcattacatcctcatagcttagcccccaattataagtgagaacatacgatcttcggtttttcattcctggttacttcacttagaataatgttctccacctccatccaggctgctgctaatgccattattttattcctttttatggctgagtagtattcaatggctacatagtctatttttcagttaatcttggctgctaccctatgcaatgggttctgtgattctcccagagcttagcaatagcagttttccaaccagtgtcttttgaattgataaatccacatttagaaggggaggaaactggcctaaattgagggcccagcaaaagaactcagccacccgcagtgcctggtgtccatgtagtcggttttgagatgttttagctgcagattcacattgctaagtgtcaattcagttcactgtgaaatccgtcgctatttcctgaaagtgcatcaagctatgaattccctgtggcttcggcgggtagaagtgggttggcatttccctccagctctttgagaattttctctgcagtgctctctagggagatgatcttattttggctccctgaggtgagagtcagagtaaaatataaactgtctgaagacattgcttggctgactgttcagagcatttccgagttagtatctcttagtaagggaggcaaaggaattgagttcaaatcgtgactttgttcttgctagtggtgtagcttcaggcagttcacctcctctctctgagcctcaccaacaaagagggagtaataataacaccgatgatcacagaagaatgtgaattctcttgctccctgcctctaacctgctttcctgggcctgtcactatgttttctttgctgggtgtacttgcaggttataagtctcctgagggcagagagggttgtgagtaatgccagctaggcctgcagaggccccggaagaggatcaaggtttccaggagagatgactgttgaccaaggaagagctggcagctaactctgcttcctgaaggtgtaaagtaaaggccccccgaaagggtctttaaacatgagtaggagtttctaagcagtgcatccttcatgccatggagattgatggaggtgtgtgggcggcaggagaatgggcagtaaatctgggggaaattttggtcagattatggggggccttgaatgccactctcaaaagagtaacccttcatgctgtaggcagaggtgccagcagagtttttggctgaagaattacacaaacccatccaattccctctttctttttctttttaagtatttttccttggaaataattttgagtttacaaaaagagtacagcaaattcttgtacaaccttcaccagcctccccaaatattaacatctcacatagctacagaattatcaaagccaggaaatgaacattaatgcaatcctgtctgtgaatctacagacttcattcagtgttgccagtagccccactaacgtgctttttctcctccagaatgcgatccaggactgcacgtggcattccgctgccgtgtctcagtgggatccttccatccagaacggctcctccgtctttctcctcctctcataattttgacagttttaaagcatccaggctatttttgtctttcataaccttgacactcttgaagagtactggccaattattttgtagaatgtcctccaacttgagtttgtctagtgctttctcacaatgagaatgaggttttgtgtttttggtgagaacaccacagaagcaggttatacccttccccatgcattatatcaggaggcacatgtgatattgctgcatcccattactggagacgttaactttgagagatgatgtagcaaagatttctccattgtaaaatcctatttttccttctgaacttaatgagtatcttacaaggagctgtcttggagactatgtaaatatcttgtttatcatcatactttcaccaaccaattttggcattcattggtgattcttgtctgcaatattaattaccactgtgttttccaacagatgatttttctactttcataattccttctccatttattaattgtaattcagtggtaaggaagagctgtcccttctctcccaattacttatgcaattatttcagtatagactcatggatatttagtttattctaccagtgataatccatgaccaacatcatttgtatcattgttccaactgtcccaggtatggccaatgtaagcatcttcaagtcaccccttgtgtttgtttgaaatgcccttattctattttgagcacttcctttctgacataagatgttccaggattattttataatttcactgaccccaccctgtacttaatcatttctccaaagaactctgcttcctttattgagggaatgtatttagaatctaagatctgggtgctggatgtcctcattgttactgaggtgtcactgtgtctagggcctctcagcagacagagctagggaatatgggttaccaactctgaaactattttatgggtattctgagattgagcaaataagtaaatacattgtatttagtgggagggaggcatctcactgtcaaagagagaactacaaataaaaagggaagggcaaagtgaaccctattgtgttagattagaatcagaggcatcagcatgagctcctgatttttagtgtatgtacagattgacagatatagaaataaatatgacctggcaattccattcctaggcatatacctagcagaaatccatggtcataaaaaaaaacatggacaagaatgatcatgctgggagtggtggctcacgcctgtaatcccaacactttgggaggctgaggcaagcagattgcttgagtccaggagtttgagaccagcctgggcaacatggcgaaaccctgtctccactaaaaatacaaaaattagctgggtgtggtggtgcatgcctgtagttccagctacttgagaggctgaggtaggaggatggcttgagcctgggagtcagagactgaagggagccaagattgtaccactgcactccaacctggggaacagagtgagaccctgaagaaagaaagagagaaagagagaaagagaaaagaaagaagaaagaaaggaagaaagaaagaaagaaagaaagagaaagaaagaaaaaaagagagaaagaggaagaaaaaaaaagaatgatcataggatcatagctgcactattatcatagtcctaagctgtaaaccacgcaaattcccgttgacaccagactaaagaatgaatgaccgaccactacatgcaacattatggatgaaaatacaattgcggaaagacattttctcaaaaaatgctgtgtgataccatttatataaagcacaaaccaggcaaattaatccatgtcacaagaactcagtatcaattttctgcaagagaaacgagggggtttctgagctgctggtagtgttctgtcatttggtctgggtgctggttgcattggtgtgtctaattcttaaaatgtatatacattattcatcagtaaaaagttttttaaaatattcatctcctggctctaagcttcattttatcttcatttcaactcagctgctgcagggaccccataaaatgaatagagtaggactaacttctaaacctgctctgcttctattcccttccagactaggattgatattttccctccaggattgagactcctgttaaattttcttttatttccccttcttttctttctttcttttctttctttctttctttttttctttttcttttttttttttttttgacggagtctcactctgttgcccaggctggagtgtaatggtgatctcggctcactgcagccttcatctcctgggttcaagcgattctcctgcttcaccctcccaagtagttgggaccacaggtgtgtgccaccatgctcagctaatttttgtatttttagtagagacgggggtttcaccatgttggccaggctggtctcgaactcctgacctaaaatgatctacccgccctggtctcccaaagtgctcatgattaaaggcatgagccaccgtgcctggcttcccccttttcacaagttcgatttttttctttttcctgttctttttgttttgtttcgtttttcttttcttttcttttttcttctttctttctttttcttttttccttctttctttctttctttttttttttttcaggcctaggactcttgatccagtcccacctgctggtgtaggtcaggaagagattattttagccccacccaactaggaagctgcgtagatgtaggggaggaaagcaacttgccaggggctaccctaggtaggagatgtggctatattccagagttgttgaaggttaataccagctaatgttctttcagttactgccttccaggtattcacaacaaggattaaggaagagaattaaactctaatgcaataggcttccatcatttgtaatgaattaacttccattgtcctcattgttaaaagatacatttattaaaatggataaaaatcatcagcctggagtggctgctcatgactataatagcagcattttgggagactgaggtgggaagatcgcttaaggccaggggttcaagaccagcttgggcaatatagtgcaacccccctctacaaaataataataataataataacaattagccaggcatggtggctcaagtgtgtagttctagctactcaggaggctgagtcagagaaccacttgagcccaggaggtcaaggctgcagtgagccaagcttgcatcactgcactcaagcctgggtaatagagcaagaccctgtctcaaaaaaaataaataaataaaataaaatcatgactctcaaacagcagattataactgactcaaaggagaagtcaaaaaagctacatttgtatggagcaaaggaatgttgaaacaaacgcaccaacagagctcaagccagcttcttccagggtggcaaagggaattccactgaacctctactggcaggactaaatgtacaggtctagagccaagaattatttttcatttctatcagttatctacattttacaagctgtaaaataactcccatggagtcaaaagcagataatgtgaaagggtggactataggcaatatttaattttccattgaaaggaaatttttcctacactttccctctgttttgataaaaaataacctcatctattcccgggtaattcaacaatagtaacatatcaaatatacctgtttatttctggcacctctcttttcatacggagaagtaacaaatcttttgcgattttcaatggtatttctgggaaagctcagctatcattccttttattttattttatttcacatttaggaattttgggaatacaaaatccaaaatggtcaggagatttgaacacttaatgtaggatcataggtgtctgagaaataatatttgcctacccatttgtaagggacaatacaacatttaaaaataggccgggcagcccagtgctgtggctcacacctgtaatcccagcagtcttgggggccgaggccggtagatcatgaggtcaggagttcaagaccatcctggccaatatggtggaaccccgtctctactaaaagtacaaaaattagccaggcgtggcacgcctatagtcccagctactcaggaggctgagacagaagaattgcttgaatccgggaggcagaggttgcagtgaaccgagatcatgccactgcactccagcctgggcaacagagggagactccatctcaaaaaataaataaattaattaaattaaattaaataggtggggcacagtggctcactcttgtaatcccagcactttgggaggccgaggcaggtggatcacctgaggtcaggagttcaagaccagcctggccaacatggtgaaaccccgccgtctctactaaaaatacaaaaaattagctgggcgtggtggcgggcacctataatcccagctactccggaggctgaggcaggagaatcgcttgaatccaggaggctgaggttgcagtgagcagagatcgtgtcactgcactccagcctgagcaacaagagtgaaactctgtctcaaaaaaaaaaaaaaagaagaagaaaaagaaaccaaactaaataaaaatagatagaaaataacatgattgtaaagaactttagccctctcctaaataacaaatgttgtttctttaaatagtcaagggcataataaaatcaacatgaaaatcaaaaaattattctggtaaaacactgaatctttgctatctaggtagatttacatagaaaagaagaataacccttcataatataggtgaagacggcaaacagtaaaccagggaaacaaggccatgaatattaaacaaaatttttaaagaattttagtaaatttaatagtgttaaaatgcatatgatgtattttatatgcattatatattataaaatattatatattatatatgttttatatgataaagtgtatgttgttataaaagcaaacttttataagaccttaagcaaatttcatagtgtttaacatatttcagactaaaatattttatatatatataaataccagtctggccaccatggtgaatcctcatctctactaaaaatacaaaaattagctggatatggtggtgcatgccggtaatcccagctactcagggggctgaggcaggagaattgtttgaacaggagaagtggaggttgcaatgagccgagatcgtgccactgcactccagcctgggcaagagagctagactccatctcaaaaaaaaaaaaaaaaaaaaaaattcatgtcggcatgctcttttgcattctacaataaactcacccttgactttaggaccaagctcaaggggcccatgaggtcagaactaatttcacaatgctgctgaggtgtatttattgtacttcattcattgttgctatttttaaatgaaccattaaataagctttcttaaaagttatgttttatagcgtccaggcgtggtggctcatgcctgtaatcccagcactttgggaggcccacatgggtggatcacttgaggtcaggagttcaagatcagcctggccaacatggtgaaaccccgtctctaataaaaatacaaaaattaggcgggtgtggtggcaggtgcctgtagtcccagctacttgggaggctgaggcacgagaaaagcttggacaggggagatctctagttcagtgagctgagatcgcaccactggactccagcctcagtgacagagagagatgccgtctcaaaaaaaaaaaaattatgttttataggtatgtgctgagaggaatgaaaaaatattttttagaaatttatgtttaaatgtttaactgtaaatactaatagctataatacacaaaaaaaagctctttggtgtcctcattatgttggaggtgtgtaaagaggtttcaccaaacaaaccaactaaaaacaaactcccaaacccattgccccaaacctaatctgagtactgcagctttaagacaaaaccacagtactttattttccttagaaaacagaagtatacccaggggcagtggctcacgcctgtattcccaacactttgggagtccaaggcgggtgcatcacctgagatcagaagtactggaccagcctggccaacatggtgaaaccccatctttactaaaaattagccctgtgtggtggtgggcacctctcagctactaggaaggctgagagaggagaatcgcttgaacccacaaggcagaggtttcagtgagctgagatggcgtcactgcactccagccttagagacagagtgagactctgtctcaaaaaaacaaaacaaaacagaaacacatacacagttgtatttctctgaaactattgctccaaagcatagtgtcaatcactcacattaatgataacttttaagtaaagcaaattccatttcacagagaacacgggaagttggacacttttaactgtgactgtcacttaacatatagcagacaagcaaagctcatgaatgcacatgacacaactctctgcagccatatgaatcccttatggtataacttctccaagtggcaaaaagaaacacgttcattaacagatccaaagatgtaagctcttcgtagcatataaaaaaagaagcaagggccgggccggtggctcatgcctgtaatcccagcactttgggaggccgaggcgggtggatcacttgaggtcaggagttggagaccagccagggcaacatggcaaaaccctgtctctattaaaaatacaaaaattagccaggtgtgatggcacatgcctgtaatcccagctactcgggaggctgaggcaggagaatcgcttgaacccaggaggtggagattggagtgagctgagattgctccactgcactctagcctgggcaacagagcaagactctgtctcaaaaaataaaaacaggccaggtgctatggcttacgcctgtaatcccagcacctttggaggctgaggcaagtggatcatctaaggtcaggagttcaagacgagcctggtcaacatggcaaaaccctgtctctactaaaaatacaaaattagtctggcatggtggcaggcacctataatctcagctactctagaggctggggcaggagaatcacttaaacccaggaggtggaggttgcagtgagccgagatcctgccactgcactccagcctggccaaccaagagtgaaactccgtctcaaaaaataataataataataaggctgggcaaggtggctcatgcctgtaatcccagctcttagggaggcagaggtgggaggatagcttcagcccaggagttcaagacctgactggacaatatagcaagactctgatctccacaaaaaggaaagaaaaaagtataaaaaataaaataaaaataataaagaaataaaaataagcaaaagtttatacacttaaattatgcttcataatgcatattttagcctttcatttttcctagaaattatttatgtaactagcaaatatccatcaattaaatgagtagaaggttttaagttacctaaagatctttgaaatctaaagtggacataccatgaaagataactttttttttttttgagatggagtttcgctctgttgcccaggcttggagtgcagtggcacaatctcggctcactgcaacctctgcctcccgggttcaagcgattatcctgtctcagcctccaaagtagctgggactacaggcccacaccatcacatccggcaaattttcatgtttttagcaaagatggaatttcattatattggtcatgctggtctcgaactcctgacctcaggtgacccacccacctcaccctcccacagtgctgagattacaggtgtgagcgacctcgcccagccaaaagataacttttgaaataaaattcatcagtgcaatatatcaattttgttaaacacagattgacatttacatatttaaacattatgtaaaagcaatgctagcttattttatcagtaaatatgtataagttcaggaaaaaacatatataagcagaataaaaatgcatgcttgcattatacaataatatgggtgtacatttccagagttctcgtattcatacactgtataagaagatgacaaacaattttgcaatgaaaaatcttgtccatacgtttttggcatgcatcagaatatatctgtattcctgagtcaaagggtttgtgcatttgtgattttgattgataatgccaaattgcctcacagcagtgactttaatatacactctcatcctcagtgtatagaaatgctttcttcctcacacagctctaacaagcacgtcataaaactttttttttatttttttatattttgagatggagtttcactcttgttgcccaggctggagtgcaatggtgcaatctcagctcacctcaacctccgcctcccggattcaagtgattctcctgtctcagtctcccaagtagctgggattagaggcacgtgccaccacgcctggctaattttgtattttaagtagaaatggggtttctccatgttggtcaggctggtctcaaactcccaaactcagatgatccacctgccttggcctcccaaagtgctgggattacaggtgtgagccaccacatccagccataaaactcttaaatatgttcctcaacatgataggtggaaaattgttctcttagtacaatatttttttttttgttttttgtttgctcattagtttttgcttgttgttgttgttttgttttgttttgttttagacggaatctcactctgtcaccaggcggtagtgcagtggtgcgatctcggctcactgcaacgtccagctccaggttcaagcgattgtcctgcctcggcctcccaagtaactgagattataggcacccgcaaccatgcccagctaatttttgtgtttttagtagaaacgaggttccacaatattggccaggatggtctcgatctcttgacctcgtgatccgcctgcctcagcctcccaaagtactgggattacaggcgtgagccgttgtgcctggcaatttttttaattaaaaaaaataaaataaaatgtccagaactgtttgtatttccttttctgtgactaaatgtttatatcctttacttctgtttattctttttgtgttggtaggcttcttcctattgaatagtagaagctctttatgtattagggaagttcacctctgcctgtgatatgattgcgcataatttcttcttgcaggtatttctcccagtttcatgattgttttctcagtttgcttacaatagttttaacacagaacttttttatatttctatattgtaagatttgccagtatttccattaatatccctttatgacttttgtggagaacagagctttgggccccagctgagtggcaaagggcacagtccctcagtgtggaagacccactgcaggtgaccttgatgccaacaggcggcgggccagggggatgatgttgatgacaatcttcaactacacttgccgatgaagtgagacatggggtctgacttccacagggtaagaatggattggcccagaaaccactcgtttctcctttcagcaaacattctttgtgaggttgccacagtctttgcctatgttttacaaatgtgattgagaacagatgaaagatctgcccaaggtcacactggattctaaaacctgtttctaactgtgtcatcctccagaaagtgaatgtgcatcttggaggatgatccccaaccaacatgtgatctgaaagtacatattgcccataaaaaaaaaaaaaaaaaaaaaaaaggccaggtgcagtggttcatgcctgtaatcccgacactttgggaagccaaggtgggtggatcacttcaggtcaggagttcgagaccagcctggccaacatggtgaaaccctgtctctactaaaaaatacaaaaattagccgggcatggtggcgggcccctgtaatcccagctactcgggaggctgaagcaggagaatcacttgaacctgggaggcagaggttgaagtgagtcaagatggcactactacactccagcctgggtaacagagtgaaactccatgtccaaaaaataataataataatagcttatgtggggaatggggttgcttgtttctgactgaggtataagttcatttgtaatgcagtgttgaaatgattgcttctcctaaaagcagatcttgagaaaaaaaagaagaagaagaagaaagaaacagttgttcaattctcagtgctgtccgatcgtgagttcccagcaggccagataagcagagaggactgcggagggaattctgctgggtgacagctggggcaaaggttaatatgtaattgggggtcaatgttagtgaggaaacttgcctcaaaggagcagaagtgtggattcaggaccaacaagagatgagtttcttgtgacacaggggtgaggttagattagaatttttagaatatcataggcagagagtttcgttttgaataattgccactcttgggaatctccaatttgctgtagttgatgcataggccttgattaaaaaatacatatattcagaacagaaaactgagggactgtcacatgtaagcgactgcagtaatgtgatttagttaaaaacaaaacagaagtccgaggcgggtgaatcacgaggtcaggagatcgagaccacggtgaaaccctgtctctactaaaaatacaaaaaattatccgggcgcggtggcgggcgcctgtagtcccagctactcaggaggctgaggcaggagaatggcgtgaacccgggaggtggagcttgcagtgagccgagattgcgccactgcagtccagcctgggcgacagagcgagactccgtctcaaaaaaaaaaacaaaaacaaaaacaaaaaaaacagaacatcaagcactggcccggaagtgaggactccaggcagatgtttcccaactgtgccacttgttcgttctgtgactttgggtaagtagcttgccatttctgggtgttagttttcgccttctgtaaaataaggctgccggtgaagggctcagagcatttgcagcccaagcagcggaaagcagcccctttctgctgcaggccgtgggaaagaggccttgttggcaagcctgccgtctgcattccatgctcaatttcctgcctaggagggagatgggtaggaggcaggcacgtcaccttgcacccagatcccaggccagcggaaagacatgcccatcccagaaccccgaggctactgacagaattgggtggtgattaggacttgctgggggccacagcaatctgatttccaatctctgtctctctctagctgtgagctctctggttagtgctgcccctgatctgagtatcctctgtacaatggggatagtacccactccccttgcagttaccgaaaagatcaaatgagacgtgtgtaaatgcttagagcagtgctgggtacatattacatactcagtgctattttttattattggcttaattattgaaatcaaatattaacctccttacctaatgtaggaattctctctacagcatatcagacaactggctattctcactctgcttggatgcttccagtgacaggggactcactacttctcccagcaaattgtttcactagtagatagtgcttctggaattttatggaattttaaagctgagaggaacgttataaatcaagtgtaactgcctcacgagaaaacccaagttcaagaggtgaaatgaggccgggcacggtggctcatgtctgtaatctcagcactttgggaggctgaagcgggtgttcgagaccagcctgggcaacatggttaaaccctgtctctactaaaaatacaaaagttaaccaggcatggtggtgcatgcctgtaatcccagccacttggaagctgaggcatgagaatcacttgaacccaggaggtggaggttgctgtgagccaagattgcatcactgcactccagcctggacaacagatcgagactccgtctcaaaaaataaataaacaaacaaataaataaataaataataaaattctaccttcaaaattactgtctcctaatactttataactactatgtagtttgaagatgatctgttctctctctggaagcttttagagctttctctttgtcatattattattattattatcattttgagagagggtcttactctatggcccaggctggagtgcagtggtgcatgatcacagctcactgaagccttgacctcctgggctaaagtgatcctcctgcctcagcctacccagtagctaggactacaggcaagtgccaccatgactagctatttttttttttttaattttttcgtagagatagatagggtctcaaaatgttgttcaggcttgtctcaaactcctggcctcaagtgatcctcctgctttggcctcccaaagtgtaggattacaggcataagccactttgcccagtctcctcattatttttatttattattattttttgcttattatttttaaattttatacttgtacctaggaattgatttttccttatctcttgttagctctttataagtcctttcaaataaggtcatttttttggaaatgtatctccattatttcttcaagtatttcctccactctatttttacttcttatgccatctgaatttattgctcaggtgttcgcacttttatgtttatcatccacatttccaagcttttcttctctatttcttatgttttagtcttattgtgagaccaccacaatcatgtgttcatatattctttcttcaactatatccattctatttcatttgtcaaatttgattaatttccatttatcaaattctttgttttagctattttatttttcctacctaatattttcacttagtttgttttaatgatatcttgttcttgctgcatattgctaacattttctcttgtctcctatttaaggagcattattagattttgggaccttctgcttcaacatgtgtgatcagatgatacgtgctgcttgtgtagacttttcctcctcaactgtccagttatttggctgtgggctcattttcctttgggaaaatgtttggtcatacgtactgggaggggccaaggccagcctcatctatgttggttccggccatgtgaggactgagaatccagggatcacagaccccttagtgaatccctgtctgaggccaatccactaatcactcctttggctggagttttcacttttaaacccttaggaggaaataagataatctatagtcctagcaatttggttggaagcacggtgaaggaactacctgagggctgtctgtgactatttttgtgaattctctcccatgccccccgcagagtttgtgttgctgatatcagtggacaatgctccgggcactgttaactgtcatgctgaaggagtcaggctgatgactatctctctcaaggcaacttgaaggaacagagcagaatgtaaaggctgcccaaccagttcttcatgatgcccaggctacacccccacactaatttcagtagtcttcagtctcggagagggtagtgagaaattccctaatttccccacttagtgttagtgtatctctctcctgtccttccactatctgtttagggttgattttgaagatctttgcagggattctctaccatgtagtatcttatttatgtatttatatagaatgaatgaatgaggtggtgtgttattgtctttttcttttccttttttttgagacagggtgtccctctgtggcccatgctggagagcagtggcataatcatggctcactgcagcctggacatctctgcgctcaggtgatcctcccacttcagcctccccagtagcggggatcacaggcatgtgccaccacgcctggctaattttttgtagagactgggtctggccatgttgccccaggctgttcttgaacttctgggctcaagccatcctcctgcctcagcttcccgaagtgctgggattacaggtgtgagccactgtgcccggccagtgtcttcatctttataatattttatagtatcttcaactataaaatggggataatggtcacctcaaagagcagttgtggattttggatattttatatcagtttccagaacaaaataaatatttgaaaagtattgagttttttttactttcaaaagacctaatgcctaatttttcttctccgggagggagaagtatgtggataggtcagttggctgattccatcagcattttcagccctggagcaacgttctttgctggattgtgttatggctccaaatactattgacattaactactaacctcccaggaacagtgcctagaagtttttcttattgacggtgttggtacatatagaaaccaacgctaagcctcagaaatcaaggctgaaccatgtgatttctagttctaaattttctctattttgctactcaaagtggtctatccatccatgtggtcaagtttgaggagcacaggctgcaatgtgggcaatcacaaaccttccaggaaaactgtactcgtgctttacgtgttatagtttacaaagtttctttctttctttgctttattttccctccctcccttccttccttctttccttcttccttcctttccctttctctttctctgtctctctctttctctctttctttttttctttctccttctttccttccctccctccaccctcccgccttccctcctctcttctcttctcttctttttcttttctttctctccctccacctccagggttcaagcgattctcctgcctcagcctcccaaggaactgggattacaagcaggcaccatcatgcctggctaatttttgtatttttagtagagacagggtttcaccatgttggccaggttggtctcaaactcctgacctcaagtgatccacctgctccggcctcccaaagtgccatacaaattttgggattttttttttatttctgagaaaaaatatcgttggaattattattattattattattattattattattattattattattttgagagggagttttgctcttgttgcccaggctggagtgcaatggccacatctcggctcaccacaacctctgcctcctgggttcaagcgattctcctgcctcagcctcctgagtagctgggattacaagcatgggccaccacgcttggctaattttgtatgtttagtagagacggggtttctccatgtcggtcaggctggtcccgaaatcccgacctcaggtgacccacctgccttggcctcccaaaatgctgggattacaggcgtgagccactgcgccctgctctatcattggaattatgatggggatggcattgaatctgtaggctttgggtagtatggatatttaaacaatgttaaatctgtcaatacatgaacatggcatgactttccatatatttgcgtcatcagttcctatcatcaatgttatagaattctcagtgtagagatctttcacttccttggttaaatgtactcctaggtatttaacttcttttcaactactgtaaatgggattgcttgcctgctagcttttttttttcattgatagcttgttgttagtgtatgaaaatgctactgatttttgcattttgactgcatcttgcaactttactgaatttgtctattagttctaacaggtttggggtggtacttcaattctttcaatgatgaaaccaaggtccggaaaggtgcatgtggctagagctaggttaaatcccatcttcaatctcaactagtagggtaatactttctgatttttaagtgtgtcaaatgtatcaacagtatgcatggtgattttaggtaataattatcctttctttccatatatattagaaaaaatgtaatgaacaaaccaagtctggaatttcatagttattcttgtttaggaaatttttttaaaaagtgaatttctggccaggtgcagtggctcatgcctgtaatcccagcactttgggaggctgaggccggcagatcatttgaggtcaggagtttgagaccagcctggccaacatggtgaaaacccatctctactaaaaatacaaaaattagccaggcatggtggttggcacctgtaatctcagctacttgggaggctgaagcaggagaatcgcttgaacctgggaggtggagactgcagtgagccaagattgcaccactgcactctagcctgggaaatagagtgagactcagtctcaaaaaaaaaaaaaaaaagaaaaaagaaaaaaaagtgaattgcttgaaatcataaataataaattcagctgtattgtagacatgattaaagttgtggaggtgaccccatgtgcttgagatttaggtaactcttccctaccttacattatagatgccattcctctcatttataacaatgttaagatttcttcaatttcatcctgtgcaatgtattaaaacaaggaaaaagtaagcaaaagttcattcatgaatatttccctgaacagcatttttatttcttccttacttttaaaaattacttttccatttcccacacaaatgtaactgaacagtattcattgtataccaggaatatttcccttaatccaacataatgacttactacaaatagaaatgaggcaattgatgtacttaatcctttataaaagcttagaagccatcttaaaatacttcgcagaatttgcaaatacagtattttgagtaggattttcaaacgtttactgtggaatcagagcacaaatctcctctccaagaagagaaacgtgaatactaaagactcctattgtgcagtgtggatgaaaatggaaacataattcacaatttattgtggacaaggagcctcacagagagaatgtttccatggtcttcaagtgtattactcagctaccctactagcatttttttcactgtgctgacaagaaagggaagaaaaaatattcacaacccaggttgctaaactaagagctttaattaatgagactccagaaagggccctagcaagataaaaatgtgattgcactgtgctctctgacctcagttgcaggttctttgacttctctttcatgttctcagaccctcagtgtgaagatataagggctgtctgagattgcaagttgttttgctaaaaagcctctttacacatctgaaatataacctcttaaacctaactcaggcttatgttaacaccgtggctttaaaccatgcttagactgcatggaatcataaagatgttgaatataggaaacgctgttagtttatcaattgggcctactattaagttcttgaaggggtgggttgcccctccacacctgtgggtgtttctcgtaaggtgtaacgggagacttaggaaagaaaaagacacagagacaaagtatagagaaagaaataaggggacccaggggaccagcgttcagcatatggaggatcctgccagcctctgagttcccttagtatttattgatcattcgtgggtgtttctcgaagagggggatgtgtcagggtcacaagacaattgtggggagagggtcagcagacaaacacgtgaacaaaggtctttgcatcatagacaaggtaaaggattaagtgctgtgcttttagatatgcatacacataaacatctcaatgctttacaaagcagtattgctgcccgcatgtcccacctccagccctaaggtggtttttccctatctcggtagatggaacatacaattgggttttataccgagacattccattgcccagggatgggcaggagacagatgccttcctcttgtctcaactgcaagagtcatgccttcctcttatactaatcctcctcagcacagaccctttatgggtgtcaggctgggggacagtcaggtctttcccttcccacgaggccatatttcagactatcacatggggagaaaccttggacaatacctggctttcctaggcagaggttcctgcggccttccgcagtttctgtgtccctgggtacttgagattagggagtggtgatgactcttaaggagcgtgctgccttcaagcatctgtttaacaaagcacatctcgcaccgcccttaatccatttaaccctgagtttgacacagcacatgtttcagagagcacggggttgggggtaaggtcacagaatctcaaggcagaagaatttttcttagtacataacaaaatggagtctcccatgtctacttctttctacacagacacagtaacaatctgatgtctcttgcttttccccacatttcccccttttcttttcgacaaaaccgccatcgtcatcatggcccgttctcgatggtcactgtctcttcggagctgttgggtacacctgcagactaacaacagacaaaacaggcacacaaggattaatatgagatttataattgtagtacttccgatggtcttaacccaagtgacagggttaagatttgcgagaccatcagcaactcctgcaattgcctcagttcctggcaccaaatttaaatgggcttttgatgcttcgaaaatttgttcttttaatttggaaatgtctaaagtgagattatcttctcttccctgtagatagcatctaaccatgtcccagtgatgctcagactcattataaatttggggtgtaatacaaaagtctgacgtattccagtcacactgtaactggaaacgatgttctaagctcatgagtctgtctcccatccaaatgacagtttgtctaagatcattaatttgatttgccaatttttgatcaatactagattgtgaattccacaatcttgtagattttttttgccaatcattaacaaagtttaccgactgaacagaagagtgcaatgcaactcctgctacagcatccgtagctgtgactgcagttaatcccataatcactgcaattaaagtaaaagtgaatcttttggatctatttaaaacgccttttaatacttcagtcaaaatatggacggatggcgaggcctcccacggtcggtccatggacacagggatccacacgccctctcttgctctcaccagcagaatacggtgttgccaattaaaagttgaatcaatgcaagtaaacgatctacaatttgcacaggttatagtctgggagtctggtttaataactatatttcctacaactagcatataagggggctttacgcaactttgtaaaggaaccgttagactggaatttaggtcgatagtataaaatggcttacgatatcttgtttctaaagtttgacttccagaccaaattctaatgtggtgtgaggccacagtaagcctccataattctggatgttcaggaccagaaacaggacttattatttttggtcttggggtagagattcctttttctccccattcccaatggtagaaagactgcaattttttatgcttacgtttgtctagactttctgttaagtcgttatcaacagctggactcacttgtgcacttggacatgactgagtttgtcctgagcaattgtggtagaattgacctcgaggtgcccaatctataatagttccgaattcattgttttgtaatatcaccgcactattggccacacattcttcccaaactaaaacgtctgtattttttgattctttgggaatttccttggggcaaggtttccctttaggtctgaattttaatgatctttgataagaaaagtcttgtaaataatttacccgtggcctgagtgacatcccgcttaccatgtgataagtgaatctactgatgggactgacagtaggtacttctaccaaccagttttggactgcagacattaaacatcctggtgctctccctaggcaaataggaggataacgatacccaatggaaatgtttatcatcatcccttcttcctcaggtttggcagggcagcgatcatctgtggggccaggtacccataacatatacttctataggattatccatccatgtgactggtgttaccatctccgtggaggcgcttttctttgcatctccgatgggttcattgtagaacttcaaatgtctggtgggtatccaaacaggaagctgattttctcctggtgaaacacaagcaaaacctctcgcccacgttatcaccttccctatttcccatgtcttatttttattatctttccaccaaattagttttccttcatgtgggctgttctttttaccagtaagacgttgttctgcagaagtagtagtctgatttctataaatgtttaaaaaatttaaactatagagtgctagattaagttgcatctgaggagtggtacactcttactgtctcccccttctttttgtttaactaattgagttttgagtgttctattagttctttcaactatggcctgtccttggggggcaccagatgtaggggtgggttgcccctccaagttctgaggtcattagtttgttttgttttgtctttgttttttttttttttgtcggttttttgtccttttttatttttccaaactatatgtgctttggaaatctaaggagtgggtatgaaaacagtttagcctggtttttttccatggttgcttccaccaagatgcctctggccttttctcatccaaaatcaacataaagctgtttctcccatatcaccaccatgactaccacacaaagccaagatgtctccatttttaagtttgttgcttcacagacttactactaaactcctggatgatgggggaggtgggcaacacgaggcccagaaccatgcctctctgtgtgatactgggcagaggtagcgttcagcctcagctgagagtgtttatgggtctagggagaggagagcggtctgcaccagttgctcactaggtccccctttgcatctaggccagtggtaagagcccgagagtgagatgagaggggtgttatgcaggcgtgccttcatattgagcgtttttagcagagggcacgcagcagcgtatgacactgtttccatagggttaggagcaccacagtttttactttaccttttctatgtttggctatttttttgtttgttttgttttttgagatggagtctcgctctgttgcccaggctggagtgaagtggcacaatctcggctcactgcaagctccgccttccgggttcaagccattctcctgcctcagtctcctaagtagctgggattacaggtgcccaccaccatgcctggctgttttgtatttttagtagagacagggcttcaccatgttggccaggctggtcttgagctcctgacctcaggtgatctgcccacctcggcctcccaaagggctgggattacaggcgtgacccactgtgcctggcctgtttgtctattttttttaaaatcccatcctaaagaaaagctaggtgcacaaatatttaccattgtgttacagttaccttcagtattcagtactactctatatgctgtacaggtttgtagcctacgggcaacagactgtaccatatagcctaggtgcatagtcagctccgccatctaggtttgtgagtacaccctgtgatatctgcacaatgatgcactcacctaataatgcatttctcagaatgcatcccgttgttaagtgatgcatcctggacttcgtgcattaaaaaaatgccagaacactccttacttagtgcatagactttatcaaatgttgaatnnnnnnnnnnnnnnnnnnnnnnnnnnnnnnnnnnnnnnnnnnnnnnnnnnnnnnnnnnnnnnnnnnnnnnnnnnnnnnnnnnnnnnnnnnnnnnnnnnnngaattcccatagacaaaggcaatatcactatcctattcatacatttcttgtctcagttctgcagagccaaaatgtagagtccaatgcaataaaggctgacttggattatctaactggtacatgaggccccgtgtggtagtttactccagaggaaattggcacttgcatataattgtagttaagttgatcccttgatatcagaaaagtttctgctatgcagtcctttttgatgatttcttaatatatatcctcattttagatagtagcagtggccatagatgtacttggcagcagagtattacagatggtaaagcttgaatctgcgttttagtagcaagagcatttggagtcttgtgcttcccttgtagacatcttcttcacatctacagcctatctttcgtctactgttgttactgctactagttccatagacattctaattttcacttgggatatacatttttgttatttgtaagctcccccttctttttcattttttcactccatttcagactgttctaaaatcagaaaggaaattctcctccatgagcatgtatatgtttttggctcttggaacttgagatggtgcaagtaaagtacaaggacattttccagataagtcatgtgaagtgatttacatttcataatatgatcatttctgattgatcttatctattatgaccacccatagagatggctgtaaagaattaagaacatcaaacaatgtcaagttgttcattgcatgtatttcagaacattaccaagataaagccaggtggagtcattaatttcaccagctagttatttccttgctgcagtgccaaagattgttattttagaattaaaacctctggtttttctaactcatctttcattgttgatcatggcaagtgaataattagtgaatgtatatgtttaggttatgaggaatttaaaacacaccctaagagttgtaatgttgattgcttttaaatgttgtaatggttttgagagtgtctgctaatgattccttaattacatacttgcttttcttagaaaatcaactcatttcattattagtgattaattttctcttaaatatttaactttatattttaataatcactatgcctgggattccattagatatttgaaaagatcaagtttaatttttttacccaggtaacatatacaatggctgaagatttgtgttctttgatctcacaatttaaaaaaatacacattaagcaccatggaaatcccagcaacttcagcaagaaagagtctttgttccacagtttctttgcttgataaatacgtggaataaaataaatggaatatcttaattcagtttttgcttcatgagactggttgagtgaacataggcctagtgctttgaaaattggcctattgtagaagattgatattctagtagcctaaagagaatccatttcttataagaatatatatattttggaaaatgtggtatttctcagaaaactactgaaatgaattatgtatcttttctatctttatctttacttctattactttcaaagatctaaaggtttcacttgaaaattagtcttttggaaaaaaaagacattgaaactagtgttaaattaatttcattgaggtaatgaatatgaagattcatttgctgtaatctccttgtgatcttttagtttcttgtgcttttaaaaataacaatataatggtctatatgtttatcagtttttacaataatttgtctaaacttcgcttataccagtgtgcatgaagaaccaagtgcagtctgaattagcacaatgcaaatagaaaaccgaccttttattttcctcacaaaattaatataaaccttatgtaaaagaatttttaggtgcttgtaaattaataacaaaatcatacataatgtcagtggaggagaaaagttaaggattttatatcgcagtaaaatgcatttctaaatttacttagtattgttataaaacatattcttgattattgtatcagagtttatcaccactactgaagtcaaaataaagatgaatctctaaagtatgcaatttatttgggaatcacagaattgtagttctgaacaaaactgaaaaccacggtggtcttctatatgtgtgaaggacaaagagaagattgggggtttactagcaagggaaatgctacatattgttttgaaagaaagctcacagacactagagaagaatttgggagctggtcaaacaagcctaatgggagacaaatcttttgagacttcccaggatcccaactagaaaatcccttagtcaattttaggtgaaaaagagttaaatttgaatttgattctggggaagtttgtcatttgtttggattcaaaaagcctaaaaatatttaattaaagtagaattacatatccttgagagataatggtcacttatttaaccagagtaataatggaaagacttcaaaaacaaattcaaaagttacatagtcaagagaaaaaaaatagttagacctgtattagagatgacttagttttttcaggtggtcaaaacccgaataaagacagcccaaaccacaggaagctatcttgaaacataaaatacctgcttattaggtggattacttagagagagagaaaaaaaaccttttgtagtatgaccatttctcttggtatatgcccttttgagtaagctggaaattaaaccccatgaaaaactactttaattcaattagacactggaagagtgtgtgtctaaggttataagtaaaccatattataggataataatacacacacacacacacacacacacacacacacacacacacacacacacacaagtagtacctccaccaggtggaatggatggcttttagaaaaagtaagagcatgtgaaatttcctggttgcatagaacaatttggatacatcaggaaaagccgagtacagaattcgtctatactggaaaaacattgtttttccagtttttttgaggcaaacattctcagtgtcaggttataataccagagtgcgaagtggggaaaaatgcaataggaactgacaaaaaaaaaagaaaaaaaaagaaaatgagagagagagtcaccactttagttaagcaaaaagatgtaatgttttaaggagagaagtaagagcagaaggcatggatgtattaactgcaaattacatgtagtgagatgcataaaaagccaaacccttgagataaaaatctgaaaaactttaagaggaaaactccacctcctgaaatgaagcgatcatttatttttctttattgctgcttctaaaaagaagatacatgtacagaatgtgcaggtttgttgtataggtatacgtgtgccatggtggtttgctgcacctattgacccgtcctctaagttccctcccctcacccccatatcccccagcagaccatggtgtatgttgttcccctctctgtgtccatgtgttctcaatgttcaactcccactgaatgagtacatgcagtgtctggttttctgttcttgtgtttgtttgccaaggatgatggcttccagtttcacccatgtccctgcaaaggacatgctctcattcatttttcatggctgcatagtattccatggtgtatatgtaacacattttctttatccagtctattgttgatgggcatttgggttggttccagtctttgctattgtaaattgtgctgcaataagtagaatgatttatattcctttgggtatatacccagtaatgggattgcagggtcaaatggtatttctggttttagatacatggggaatcaccatgctgtcttccacaatgattaaactaatgtatatcctcaccaacagtgtaaaagcattcctatttctccacagcctcaccagcatctattgtatcctgactcttttaaataatcaccattctgactggcatgagatggtctctcattgtggttttgatttgcatttctctgatgatcagtgatgttgagctttctttcatatgtttgttggccaacttcctttgagaagtgtctgttcatatcctttgcccactttttaatgatattgctcatattaattttgaaatgactgaaaattcaaaataaagacaataaagataaaattatattttttaagttacaggtatgaagtatttttgaaaggaaagaaacctccagattatatatatatacatatgtgtatatatttatatgcatatgtgtgtatatatgtgtttgtatatataatatatagatattgttttcaacaaaaaaattattagagccgaagtagtaccatcttgagatgtttttattcagcttggtatctaaaatcatttaggtgactcattcccatgtttggaaaatttttaaaatttgttgtctacatctgtgatattcagtatagtagccactagctacttttaatcagttataattaaatgaaatttaaaattcagttcttccgtcatactagctacatttcaaatgctcaatagacgcacttggctagcggcttctttattggacagggcaggtatcacagaatatttaaccagacagcattgatctaaatggttggtttttttgtttgtttgtttgttttttaaactggagtgcagtggtgcaatctcagctcactgcaacctctgtctcccaggttcaaacaattttctgcctcagcctcccaagtagctgggattataggcgcctacgagcacacccggctaatttttttatttttagtagagacggggtttcaccatcttggcggggctggtcttgaactcctgacctcatgatccaccagccttggcctcccaaagtgctgggattaggcatgagccactgcgccaggccaagtatcttgtagagagagtttatattatgattcagatttccatgttgcccatctttttaattaatcttacagacacttaatggagcccttattatgtcttaagtgcatgagaagtgcaaagagtgtaaagacaaaaatcatgtagccaaatcaagtggtggagacagacatttaaaacataattgcaacccaacatgaattctccagggagaggagagcaaaggacaatgaaggcagaaagaatcacgcttgcaaatccatgaaagctgtggtgtgtttgggaaactctgggtaatttatttagccctagactagtaaaaataaggactagaaaggtatgctgaggccagatcttgaaagatttcaaataactgcagtcaggttacattccaatgaatgaaaagccagttgaaactggtttaaaacacaaaggtggtgtattgatgtacaatggaaaaaatccagcactagagtggtgagcagctgtgattcaactagagctctggctgccttggtctttgagtctctcaactctgccactttgttctggttttatcctcatgatgaataagatgtttgctgtagcttcaagctttacagacatacatggcaatgattggatgaagagaggctggccctctccaagattttctcccaagattgatgaaacttgttctctaaaaaccctcagcaaatttccctcccatcgcatcagcctagttaaggttacctgtccatttctggccagcccctgtggcctgagattataccatgtactaatttgttgagaaacctcagatataagccaatcactgttgagagtgtaagagtgcatggagatcaatcagcttttctctgaagatggggtgagattatgtgtttctgaggcaaggtggctactggaaaagggtgaatacctgcgtgataattcagaactcatcaagagatagaagactgggtgttagggggttagcattctgagtggagcatggtttctggagtcagacctgagttggtgtcctttatccaccactgcgtggtgtaactttatgtaactgagcctcagtttccaaatggagattataatggtcattctctttcataccattgtgagatgtaaagaggttaacgtaggaaaggcacttagaatagtgcctgaaccgcagtaagcgctcagcaaatattagctttaaattcatattcaaatatgggagggagtttgagctttatcttttagagtctgacactcccattgaaggtcttttgtatcttgacagctagaagatttcctactacttaaataataataaaagattagaactcaagtgatgctgatgatgacaggaaatgtgaattagttgagtagttgggacagaaatcacatggcccatgaagctgaggatattatctggccctttacagaagtttgccaactcctgaaatagaggaccagaaaaatgtcttctgatataaaacacctaaacatgttaagcctggtgcagtggctcacccctgtaatcccagcactttgggaggccaaggtagctgaatcctcccatctcagactccccagtagttccatatcagcctggacaacatggtgaaaccctgtctctaccaaaaatacaaaaattaggtgaccatggtggcagttgcctgtaatcccagctacttgggaggctgaggcaggagagtggtttgaatccaggaggcagaggctgcagtgagccgagatcacaccactgcactccagactgggcaacagagtgaaactctttctgaaaaaaaaaaaaaaaaaaaaaaaaaaaagtttttataaaatagttttaatgcatagctgaacttgaagcaaaataaggaaattcctaagtgtcccaaaatgacaagaaagtacacacctacacacaaacagagtgagagaagttgaacaagcacacacacaaatatgacaaatgtgtattgagagccaaatatacgtcaggtacatattgctctgtgcctggggagcaggggcaataaggtagaaaacaaaacagacatgggattaacctcatagatcttaaagtccagtgaggtaggcaacttctataagaaataagtgtatattaaatattttgaaaagtactgtgaagaaaaagagcaagacgctttgaaagagagtaacaagtgacacctgctttaggattatgtgccttgaaaaggactccagaaatagtgccactggaactcaggaggagttaatgtgttcacggaaatgggagagagcatttcttttaggtagatgcctaggctctgccaactttgcttgattctatctgattctattagacaagttatagaagtataataatgcctttgctacaaaaccagaaatggataaatacttaagaataaattttcacatctcatcaaatgtgcgttttgatgctatagtaattgttccaatttaaaacattcgtttatacatattttcttcttttctttttctttctttctttttttttttttttctttttttgagacaggttctcactctggttcccagattggagtgcagttcacaatcagctcactgtaacctcaaattcttgggttcaagggattctcttgtctcagcctcctgagctgctgggaatataggcacacacagccacagctggctagttttcatactttttatacagatagggcctcactatcttgcttatgctggtgttgaacttgtggtctcaagcaatcctcctgcctcagcctcttaaaagtgctaggattacaagtgtgagccaccacacctggtttatacatatttcaatcattttaatataacagcaaagtccgtttgaggcagaggacagacttttatttttttaattattgaaacatctgtcttgctcttatcaccaaggctggagggcagtgcatgaccatggttcactgcagcctcatccaccaggctcatgtgatcctcccacctcagcctcccaagtagctgggaccacaggtgtgcaacaccatgcccggctaatttttttttttttttttttttttgtagacatggtggcctcactacattgtacaaggtagtcttgaactcctggttttaaacaattttctggtctcagcctcacaaagtgctgggattacaggtatgagccatcacacctggctagagaacagacttttaataataaaagaaaagtcctttttatactaaggttgactttaggggcctgtctaaagtaaaggtgggtagatgagactgcttacagaaagctagctttgtgtgctgaacttgatactattagaggtttcttgaaagatgtgggaaaaaagtttaaaattgcaactggaagatgtttgctagactagaaatggagagtcctaagcactcaggaattcagcaaatggctgctggttaggtttttgtttttattttttggatttaagataccctcaaactttagttatttctgaattgaagatgaccaattgatgggtatgtttgtattagtaaaattgaaaagcttattaatttatatttcacattatcaaaacccataaagaaattatactttgcctttgtaacccatatgtcagcttggatatccctgccctttaataaaatgtaattaatggcattccccaagaattgttgaggattctcaggtggctaattgttcatggtcatctctgctgttgctggggatggatcagttttgtttatgaatcattttcatttcacgtgagctccataacaagtcgatccagaccaggtaaaggcctcattcttcatttgtcataaattgagaatcaaacaacaaaaaagagagaacacgtgcctaggccggcctaacactcgtaggacctgcctttacataccacacatagacatccaatctttcaatgggtcctctaccctgtcaactgaaattttctgtctttatttttctcatcttttaaatcttccatttactgaaatttaggagaaaatgaggtcactgagtttgttaattcattttgctgagtttagtacacaaattctaggcaacatttcacagacctggctctttcatggtgtaataaatgtgggcttttgcaaactgttttcctctttttggtctcacagctatgttttggataattaaagttgctaaagttctaaacagtcaatagcaggttactagtaggttttgttcttacatctgcactgggtggtagcatagggcggtagaaagaacactgaagctctagatactactatctcctcaatcagagaagtagagcttggtggagagaccatagcctagttagctaacccatatgagtcttgtttttattatgcataaagtggatctgataataatagctatttcacagggatttgcaaaaatcaaatgtaatcctaagtataaaataatgttttatattgtgcaatatagatattagttttgttatcagtaacctctcatttcttttacccaggtatgttcttttgttcattatccgtaagcaagactctctacattgcctgtgtcagtttcacactcttatcaaggatgtatacattcctacattttcttttctacagttagtcatcatttcattagaaagacatttagtattcacatttatattataacatttaatttgaaaaaagctttttgcaagaaaggagagtataatcagaaattcatctataaagtcctaggtttcaccagcctgtgccatgtgtgttcacagtcactctccattctgcatgagttgtactaatgtgggagctgaaggagataaaccccccaaatcagtagcttaatacaaatgaaatgtgattgtcaatcacagtagttctaactggtagaaggcgttgcactccacagtcactcaaggatccatgctgatggaaggttgccatcttctgcacgtggcttctaagtcatccatctctctggatgacaatatccagctgccaatggagtaaaagaggcactgacataatgtggaaggattttatggtccagtcccagcagtgcccatcacatctgtccatattccactctcagaagtgtcactgggctacatctaagtacaaggatggctggaaaatacatagctgtgtgcccaggaggaaaggaaaataggattgctgaatagctaatgaggttctgccatggccttctttttaggtcaccaaatatctgctttcctgtctttcccacacatacaagacactcattcctacccaagggtctcataccattattgcatccagttcaaagtccaaggtccaaagtccaaaggggaatagactatcctttgtatcagattctgatatgtcagcttctggtttggcattcttgaataaaaaggccaattttctgcctcccatgtaggggtaaaaaatgtctctcttctacctcttgtcatggtagaacagtgaaaagaccaccataattgaagaaaaaaataaaattaaacaaataaagaaacctgctatgcaggaaagagaagacaggcaggcaagcagcagtccctagattataatcataaggaaatcctgagtagcaagtagtgagaagctccctacactgggcatggagaaattccttaaatagcctctgaatctactctctgggaggaaccctcttttctgtcatttttggtggtggctccatcctctggaaggttcttatttcttattcgctggctgtcacctctgaactggctgttaaggagtgtgcttttcttgaggtctttggctttataactcatgctgcaagagtaaaggtgaaaactaatgggtgttttatgctgatctgtcccgcagactctggccaagcgatgaatgaaaggagttccctgacacaggtatttttcctgacagtgagctaggggactgcaccactcagcactgccaatgagagagtgcagcagccaaaaggagtgcagccccctaagctggccccacttgaatttatttagtacagatttaatgacaagggcttggagcaaacacaatttgtgggtaattaacattgtcaacccctgcaagtagagagcagtcctgcacatgaatgatcaaaggttggtttccagagatataagtagaacaatttatctagataagtttctttacattcccttgttatctaacccttgctcttaagagaatttaactgccttcagctaaattctcctttgaagcttttgcaaaacctcccattcttccaagaagatttgtgtctttccctataaccttttcttacaacttttcccaccaccctgaccaaactcctacagttttagatttaaggtcagtcatttgctggctctggggctgtggaagaaaaactaaatccctcagttcatgcacacagtgtgacagcttggcataagtaaaagacatgaacaaaaggattaatgaaggagtgaaagaaggaaggagtgtgcattaggcacaacatcatctaaaaactaaaaaaactggaatgcattaaacttgttcactcaacaagtattggttgagtgcctactaagtgtcaagtgctgggaccaatgtgggggatacagtggaggatacagtggcaacacatggaaagtaaaggcagtgaaaaggccatggatttaaaaattaaaggaaaaaaaggagtaatacatttgttattggtcttagcaaatcgaaaaaatgtgagaaaatagtgcagcgtttgccaaatctacaactctttcaccctcactgagtctcaaattaagaatgcacaaaagcagaattactaggaaatcaaagttttatgggtgtattccctgaagtaatagcactatactgcaaaattggtggaggtcgtctgcacatttgaaataaccaacctgcacctttaccccctcccccagattctaaccaaataaagtatgaaataaggcagaactcaccatgctacaccaacttaccaggaatgaagttgatgctgattggaaaagtgtcaagcaataaagaagagtttggatttatctttaacattgtcttcatgtcactcaagactttaatctcagccaaatctacttccaaaaccaatctcttgtgcaatgatcttgtctgggtccaggccaaggcttacttctattgcatagccactctcacccttcttgatttttactctgaagaactttcctgtctgggttagagtttcctctggtaggcatcagattctgcaaatatttattgtctcatgttaatcaagaccccctctagattctgctatttaactattttgacataaacagagtgatttaaatgcagttgtaacttgttcctaagtagggcctggtatagcttttaagcaatatatctctccagtcacacgtaataatgaatggattctaacttacgctaagtactaccgtgttcctgaaggtaaataaaccatgtcagctgtgtgaggcttataaatttttctttaaagcatagtaaccaaaaatgttaccagttttcctttgattactactatattgcccaggaagtgtcatcaaaagacatctgttgtatgtatcaaaattcatacatctgcttcattcatttccttttatggtatcacctctgacttccagtttccctactgtcagagagaaacaattaaatgggagctgctttggacaacaggatttttaaaaatccagtggccacagagaattggaactgaagaatcagaagagaggattaattttctttcttcttactaagtttcttaagtattttcagagctcttaaagggacatatcaatagcagggaaagtatctgaattaatggcaggattcttgaggactttctcacaaagataattaaggtggcactctaagaaaacaaccagagacatcacaaataatgtatagatatttttattgtattattacttatggtaaacttggatccaatttgaatgttccacaatagaggaaagattcaatcaacaacaatacatacaagtgttagaagagtattcaggcattaaaaatcatgttttatcaaatactaaatgacacaaaaaggcttgtaatatattcaatgcaaaaccatattcagtataatctcaactcttagccctaaatgttcatatgatcttggattaatttttttttttcacattttcaaattttcaaattagaagtatgattattctacttctatggtgtggaaaaaattaccctctgtaaaagtgaaaaagtaagaacagtcatcttctactttccacgttttccaaatacaatgaacacattacactttcacagtggtagaaaagaaacatctatcttttaaaacagtaaataaatcagaataagacaaattcatcatgaatttacaaaattatgtcatcaagtataagttcagttcatgtttgttttgaaactgtttatcaaaattaaatagtttgacttatttttattagaaatatgattctaagtattcaacattgctttttaaaaaattatcttctagtttttcacaaaatctgaggagctgatacggaaagcacaccagatctcatgtgttgaaatgtgaacatgctcaccacagaccaaggacattcaacctgtcaatccccaggatttccaagccaggagtttcatctcttacttgtggaaaatttgtccatttaattgtgaaccaatcagcttttcattgtgtcaaaatcaaatctagatagtgaaatatatattttatctttattgttatcttaaatatatcttggcttaaagagacataagtagctcttccccactacaccagataatgagttgcaaataaatcattcagtagtaaagttcaaagaaagcttgaaagcattttgaatttcctagtgtcttacagatttgtttctttttacaacaaccatgtcccatgtatatctgtttaggaccttaagttgttaataatctactctgaataattccttaagaaaacattaagaggacaatgtctatacctgggaaataaaacccaaagtagtagaaattgtattaaaaatcatgtagttaattacaaatgagtgtgagcttagacactgaaaaatgtgtcactgaaaaaataccaaaaatggtcagccttttcctgttaagttacagaaaggtatataatataagtacttagtacataagagaagagttagaatgagattgtaccaggttcagaattcctcatccgagaagaccagacaaaattcaaggtttttagagagggactaccctgaatgatgtcaccagtaagtgagtttataaacaaagacagagcttggcaagttgcactggatacttcaaaccagtttctctggaaaaatttgagttactcaataaaccctcagttttcctgaggtaaatcaactttgaaatacagtggagaactctgggtgataaatcacgccgtgctacacactaggactgcagttcacagaacatgattagatttaaggcaatagaagataggaacattttttgaactagtttattgaatccttttgagaatatcactgtttggcagttcctagaaagctgagacaaattaatcttcaagaggcaaacaaattaactttgaactaaaaaacaaaaacacaaccaaaaactttgaattagaaaacatctgctaagaaaagcccaacaatctgacatgttgattattattttttaacacttcaggaatgcaaagatgattttactattcagacctttacatatcacacaacagaaaaatccttcagttgactagtttccataaactttgtagcgttatggcaaaacaagagtcatctgtgaaatacacaaatgttttgtactgagggatattttcacataacacaggagatgatacacttaaatttagaccccctcaatctcatcgtcatactgattatactgtaagcagtgattggggtgcacacattgcatgttttgaaggtatggatgtggcaattctaacgtatgttaacattgtttctgaaaagctaaggttttgttattgaactactattagaagtcgaatgtgatcctcttccaatgtctggcgttgccttcctgtggaattaacactctttgtgatttagagtacgtgtcccgactttctcaatgctcataaataccttgtctgtaggaaactttctttaagggaaaagcagctttagcctgtctccagtacatggccctgacttgcttatacatgtaatctattatgaaggaaaaagagccatcctcacatatctacaagattaagatattaagatattaagatattcccttattagctgttcagtggcggcgggagcagcagtcatggctcggcttcattcctgacatgggtaatttgtgtcttttctcttttgtcagcttttaaaacagatttgttaattgcttttttcttttttaacttttctttactagaacagtagaaaacacaaaaagcaagcatgggagggaaataatgaagaggagaaaatgggaaataatgaagaggagaaatcagtaagatgaaaatttctcctcttcattatttccctcccatgtttactttattttgttttccttttcctagtttcttgagtagggactttgattgttgactggacaatttttctctttaattaattcaagcattcagtgatataagaatctcaacactgcttttggtatatcccacatattttgatatgttctattttaattttcactcagttccatgtatttttaatttcctttgagatttcccttttcacctatggattatttagaagtatgttgcttactttttacatgattggagtttttctgttttctttctgtcatagatttatggttttattccatggtcagggaatgtactctgcagatttctgtactttaaattttgttgagacttgttttatggcacaggacaatgtcggccttggtggatgtttcatagatgtttgaaaataacttgtagcttgctattgttgcgtgcagtggttctgttggttgattgtgttgctctgatgttctctccttgctgattttctgcatcattgttttatcagttgctgagaaaaggattaactcaaaatggatcaaagacctaaatttaagtgtaaatttcaatttattttaaagtgcagaattcagtggcattaagtacattcaaatgtggtgcacctatcaccactatttctggaactttttcataacctcaaacagtagctctgtattcattaagcactaaaccctattctatgctctccccatccctaggtagcctctattctactttctgtttctatgaatttgcctattctagatacctcatataaatggaatcatgcaatatttgtccttttgtgattggcttatttcacttaacataatgccttcaagattcatccgtagcaatgtgtcagaatttcttcctttttaaaggctgaataatactccattgtatggctataccacattttgtttacccattcatctgttgatagacatttgggttgtttctatctcttagctatcatgaataatgctgctatgaacattggtgtacaagtatcttcttcagttttttctttttttctttctttctttttttttttttttttttttttttagagatagggtctcattatattgcccaggctggtctcaaactcctgggctcaagccatcctcctgtcttagcctcctgagtagctgagattacaggtatgtgtcaccacatccaacttagttcttttgagtacatacctaggagtgagatttctgggtcacagagtaattctatgttcagctttttaaggaatggccaaactattttccacagtggctgcaccattttaaacttctatcaacattgcatgcaggttccagtttctccatgtcctcaccaacactgttatcttgttattttccttttcccattattttaatttttgtaatagccatcccagtgaatatgaagtggtaactcagtgtgatttaggtttgtatttccctagtgactgatgatgttgggcatcttttcatgtgcttgttgtctatttgtatatcttctttggagaaacgtctatgcaaatcccttgcccagtgttaatttggttgaatttttttgttcagctgtaggaatttttgtatattccagatattaatcacttaacagatacatgatttgaaactttctgccattccatgaattatctttttactctgttgatactgtagtttccttttatgcactaatgtttaaattttgatggaatctgatttatctattttttcttttgctgccatgcttttgtggtcatgtttaagcaattattgccaaattcaagtcatgaggattctttcctattttttcctaagaattttgtagttttagcttttacgtttaggtctttgatatgttttgagttgatatttgtatgtgaggtgaggtaagggtccaatttcatttttttgcatatggatatctagttttctcagtaccatttgttagtaagactgttcccattcaatggtcttgacagtatagtagaaaatcagttgaaaatcaatgtgagggtttattgctgggctttgtattctatttcattggtctatatttctgtccttatgccagtaccacacttttgattactgtagttttgtagtaagttttgaaatcaagaaatgtggatcctccaagttttccaagattgttttagctaatcagggtcctttgaaattccaaatgaatttcagaatggatttttcttttttttttttttttgagacggaggagtcttgctctgtcgcccaggctgcagtacagtggcaggatctcggcttactgcaagttctgccccccaggttcacgccattctcctgcctcagcctcctgagtagctgggactacaggcacccgccaccacgcccggctaattttttgtatttttagtagagacagggtttcagtgtattagccaggatggtcttgatctcctgacctcatgatccacacgcctcagcctcccaaatgctgggattacaggcgtgagccaccacgcccggcctagaatggattttttctaagctgcaaaaaaatgccattaagatttggatagagattacacagaatttttagatcacattgggtagtattgtcatcttaactatatcgagttttcccatccgtgaacacagaatatctttccattcattcaagtcttctctcatttctttcagcactcttttgtacttttcagagtaccagtcttctgcctccttggtttaatttattcctattttaacttttgtggtgttactgtaaatgaaattgttttttaaatttccttttcagattgcttattgctagtgtgtagaaatacaactcatttatgggtgttggttttgctgatttagtttacttagccctgtgtgtgtgtgcgcgctcatgtgaaagtaattctagggttttctacatatgtcatctgtgaagagagatacttttacttcttccccgacaaattggttatcttttatttccctttttcccctaattgctctagccgtaactttcaggactatgttgaatagaagtggtgaaagtgggtttcattgtcctcatcctgattgtacagggaaattttttggtctttcaccattaagtatgatgttaactgttttttgtatgtggactttatgttgcggacattcctttctgttcctaatttaatgttttttatcacgaaagggagttggattttttttcaaatgctttttttctgcattctgttcatggtcccctgctttatcctgttaatatgggagtgattgcttgattttcacatactgggccaccttttcattccagggataaattccattttgtcatggtttttaatccttttattatgctgctgaatttgctagcattttgttgaggatttttgcatcaaagttcctaaaagacattggtctgtagttttcatttcattcatgtctccacagtcagacagtatagtgtctctgtctgactgtggtattaggataatgctggcttcataagatgaatttggaaatgttccctccttttcattgttttgaaagattgtgagaaggactggtgttaattctcacataaatgtttggtataatttaaaagtaaagccatttctcctgggcttctctttgttgggaggtttttgacttactgattcaaccttcttactttttataggtctattcacattttctaactcttttcacattggttttggtagatttgtacatttctaggaatttgcctatttcactgggttatccagtgtgtaggcatgcagttgttcattatattctaatctatcaatttctgtattatcaggaacaatgtctcttctttcgtttatgatttcagtaatttatcctatttttttcttagtaaatatagctacagatttgccaattttgttaatcttttcaaataaccaacttttggtttcattgatttttctattgttttcctattcactatttcattaatcttcactctaatctttttttttttttttttttttgagacagagtcttgctctgttgcccaggctggaatgccgtggtgcgatctcgtctcactgcaagctccgcctcccgagttcacgccattctcctgcctctgcctcctgagtagcctgagtagcctgccaccacgcctggctaattttttgtatttttagtagagacggggtttcaccgtgttagccaggatagtctcgatctcctgacctcaagatctgcctgtcttggcctcccaaagttgctgggattacaggcgtgagccaccgcgcccggcccactctaatctttattatttccttccttctgcttgggtttagtttgttctcttttttttttagtttctaaaaatatataattaaattgctgatttgtaatctttcttctttcataatgtaggcatttacagcttacatttccctcttagccctgctttcattacatcccagaagttttggtactttgtgttttctttttcattagtatggaggggttttctaatttctgtagtgactttttctttgacccactggttgtttatgttgtttaatttccacatatttgtgagttttccttctaagaatgagttctagtttcattccactgtaatcagacaaaatactttgtgatttcaatgttttaaaatttattatctttttgtggtttgttctgtagaattgacatgagaaaaaatgtatattctgctattgttgagtggagtgttctgttatgtctaatcaattagaatgttgttcaggcctctgtttctgtattgatcttctctctagttgtgctatccattattttaaatgaggtattgaagtctccaactattatagcattgtctgtttttttccttcaattctgttgatttttgtttcatatattttggggctctgctgctaggtgtttatattttataactatatctttttggtgggttgaaacttttatcaaatgagtctttgtgtcttgtaatctttttgatttaaaatctattttgtctgattacaatatggccacgcagctttttctttcttttttgagactgactctcgctgtgtctcccaggttggagagcagtggcatgatctcagcttactgcaacctctgcctcctggattcaagcaattcccctgcctcagcctcctaagtagctgggattactggcatttgccaccatgccctgctaagttttgtatttttagtagagacggggtttcttcatgttggccgggctggtcttgaactcctgacttcaggttatccagctgcctcagcctcccaaagtgctggtattataggcatgagccaccatgcctggcctactcagctttttctatcagctatctttttccattgtttacctttgtaatgtaatatctttttccatcattttactttgaatgtctttgtatctaaatgttttataggcagcatatagatggatcatgtttttatttgtttatttattttgagatggagtcttgctctgttgcccaggctggagtgcagtggcacaatcttggctcaatgcaacctctgccttctgggttcaagcaattctcctgcctcagcctcccgagtagctgggattacaggtgcccaccaccactcctggctaattttttctgtatttttagtagagatggggtttcaccatgttggcaaggctggtttcgaactcatgacctcaagtgatctgcctgccacgatttcccaaagtgctgggattacaggcatgagccacggtctgcatcatgttttttaaaaaaatctaatctggtctgggtgcagtggcttatgtttgtaatcccagcactttgggaggctgaggcaggcagatcatgaggtcaggagttcgagagcagcctggccaacacaatgaaaccccgtctctactaaaaaacacaaaaaattagctgggcgtggtggcaggcgcctgtagtcccagctactcgggaggctgaggcaggagaatcccttgaacccagaaggtggagattgcagtgagccgagattgtgccactgtactccagcctgggcgacagagagagactccatctcaaaaagaaagaaagaaagaaagataaaagagctatagcaattaaaatggcagagatggagcaatggaacaaaatttaggtctgaaaaaaagcccatgcatattggggattatgggatgttttgaatgggtgggaaaagggaatagattggtgtttagagaactgattaaaaaggtggaaaaaaataatttggcagctctgtttttcaccattaacaaacatacatttcacaaggatttttttttcctttttgagatggagtctcgctctatagcccaggctgaagtacagtatggcatgatcttggctcactgcaacctccgcctctcaggttcaagcaattcttctgcctcagcctcccaagtagctgggactacaggtgcacgccaccacacccggctaatttttgtatttttggtaaggacacggtttcaccatattagccaggctggtcttgaactcctgacctcatgatccacccgcctcggcctcccaaagtgctgggattataggcgtgagccactgcacctggacagatttcacaaggaatttttaaaagctaaacacttagggccgggtgcggtggctcatgcctgtaatcccaacactttgggaggccaaggcgggcagatcacgaggtcaggagatcgagaccatcctggccaacatggtgaaaccccatctctactaaaaatacaaaaaattagctgggcgtggtggcgggcacctgtagtcccaggtaattgggaggctgaggcaggagagtggtgtgaacccgggaggcggagcttgcagtgagccaagatcatgccactgcactccagcctgggtgacagagtgagactccatctcaaaaaaaaaaaaaaaagttgctgggttttctgtctgtgtgtgctctcttcacaggtgagctgcaacacactgtagttagatatgcttagtcattaacgaaactgccttcttccttttctgttttgtggagaggactctgccttgctagggatgtatctcctcaacagctctcattagagtcctgtaaggaactgctcccactgtccttgttcacaggtgaggaacctgggctaggaaggcccaggtgagcaggctagtgggtgtcagaacgcacttaccttcctgagccaccgcggaccacaggccttccagatgcccttgctggaagcacctgtggtgtccttcaggttcctgtgacttgatctaaagttgtgtagctggagaaagcctgcggaggaggtgctttgtaaactgggaagtgctacagaagacttaagagagaagaaatgccaatgaaatgtgtcatctcaggcatttgttgatggtctgaggagtgaagctgtgataagccctgggccacctggaaaccctccctgctgcctgcccgtggaggccagaacaccagctgggcaccctacctgactgttctgtaaaagggaagccacatctgactgctgcagggaaaccaatgattgtgtcatcaaaatcttaaggagaaggctaggccaagacttaaggagacggatccaagacggtcctaaatgggaggaccctgggtcagggcagacccccgttcctgccatcagttagaagtgagatgagattggagataaccaaggaaactcccaactctttagttttaaaactgatttttggccatgacctgattttgaaaagccataaggtaaggccaggtgcagtggctcatgcctgtaatctcagcactttgggaggccgaggccagcaaattgcttgagcctgggagtttgagaccagcctgggcaacatggtgaaaccctgtctctacaaaaaaaataaaaaaattagttgggcgtggtagtgtgtgcctgtagtcccagctacttgggaggctgaggtgggaggactgcttgagcccgggaggcagaggtttcagtaagatggtgccactgctctccagcctgggcgacagagcgagactctgtctcaaaaaaaaaaaaaaaaaaaaaaaaaaagccacaaagtgtatctttttggagagaatatttgttggtgggcccctgacacgggtgttttaaaacccttctagacgattctctttttttttgagacaaagtctcgctctgttatccaggcttgagtgcagtggcgccatctcagctcactgcaacctctgcctcccaggttcaagcgattctcctgcctcagcctcccaagtagctaggactataggcacatgccaccatgcccggctaatttttgtatttttaatagagacggggtttcaccatattgatcaggctggtctccaactcctgacttcatgtgatccatccgcccctgccttccaaagtgctaggattacaggcgtgagccacggctgggaaggagacccaaggctcactgcccaggggcaaaggctgtgcagatggaagggccaggctagaggaggtgaccagcctaataagtgattggtgagtggcagagtggtgctgtaatctatctgtcctgactccaaaatctttcagaatccccaaatcatgcaaattaccttaaagaccacgagacttccacagaccatgcatgggtcttatattcttggctgagctctctcatttgatcttcactgtagtcctatgaaattggcacctgtactttgatctccgttttctggatgagaaaaatggggactttgccatattaagcaacgtgcccagcagcacgcagccaggagcccagaaagcctgacgctggaggcgcccctgcgtgagctgcagcgctgagatgtgctgtgagtataaaattctcaccggattttgaaaacgtagtcctaaaaacaagtaaaatatctaatgaacaattgttcatattgattaatcggttaaataatatttttgatacactgggtcacaaatcaatctcatgtctttttgctttttcaacgtggaaactggaaaatctaaaaatgtgggttgtgtcttcttcccagtggacagcgctgctggaagcctgcccctccccgcgctcggtccagggacgctggcgtttctgcgcagccgtgccagcagccgcgaaagcgccaggcagggctcaggctttctgtttgggattcatgtccaggtgccggcctgatcctgagcaggcgcttcaggtgcccgagagtccattcccaaatctgaagaaggggcgagggactctcctcacagagaagcgtccagcacagcgctagggagggcgggggtgcggggtccggttgggaggacgacgaaggcggacgtggcggcgctcagggaggctcgcccagggcccgtgcgcgttccagacccccggcgaacggaaacggtagaacctccctagaattgacacgaaataagccacgtaaggggctgggagaggagccatgtagaaactgatacagtgctgccggcgaaccgggtggccgccagaagattcctgcgggccgcacaagtctcaggggctgtggggaggggccaggggcccgcagggctgcctgtcactctggccccgccccgccccaacgccgcctgctgctgtcaccgctatgctatgacataggatatatgtcctatgatatagctgggccatagctatgaaaacacggcagtgcttaagtagatcaaagcggctgttcagaaagtatgggctcctccacgggtgcagttcgcagagcagctctggggagacacgctgagtcgtctgtcagcacgaggggactggtgggcaccggaaaatggggatgagaagaagggcgttaaggggcgttggcgcaggtgacaggctgcagatcagcgcccgaggctgcagcacactcccaccgcgggccggaagggcagggactgcacgggtaccctggggacagagtgcaagtgaccccctgtccgccaccccagagtacagcgtgtaactgtacaccctggaggttccccagccaacctcctgggtttcaggcaggtggccagggtgggtgtgggtccgaagggagaccccagccagggcgcattggctgcagccctaaacccccgcaggtctgtgtagctcccccagccactcagccgccctaaacaaggaagctggaagcagacatccctgggtgtgttcagctgcccaaggccaccagcaccttgtgtgtttccttcttcctgcttggcagggagcagctggaagccatcttgtcctgagactggttgtttcatggccgcagatggctgcactccaccaggaagtagaaggaacacaggccgccttgcaagcctgtcttgtgtggaagaaaccacttccctaggagaccagaactaagtcacttgactcctctcagctgcaagaaaagtgggcagccctgatgggcacaccctcgattcccatctgaggctggcacggttgctgccgggtgggtgggaggtatgtcagcaagtgggggtggctgggtgggaggacactgtgagggcctgggtcaccagtgaccccagaaactgcaatgcactccaggtaggtagtctgcattgctcatcacagtttttcagtgccctagaatgcctggcaaagaatctgcttttaaacacaggttaaactatgatgacgctcagtcgatgggagcttgtcatttgggcagaaagtatgcagtccactattggggcttctgggactgagatatgggaacactcacatcttgggcttggagaaagatcccagttacaactgaagtgattctaaagtaccaggttagctcatcttctagcattttttcctcctaagtaaaaggctttaaaagcatgaaagatttgggctccttagcagggcttgagccttcagaggtggaagtgatccacccagctaaccaccccacacgagccaagcaagtgttaaactcttcccaaaagagccgcttggcaggacaccatctaagggcaaaggctttagaggtgggtgagttacactatgctcagtggtgctgcgggcccagagcactgccatggtctcccaagcttgtcaagatcctagttacccagagcattcacagcctactgtttgcactaactgaaaatacttaagtgaatgagaaagtcctcattcatcccttggacaaggaggaagccccatggcacgcactgtagaccctgctcccaggttgccatcgttctgtttactggctctcgaatagttgaaagtccacttaataataaagtcatccagcgcgtttctccttgtcacacacagagctatcatgagggaaccttgtaagtgcctcgttgaaaacctggagcactctagctttgtcacagtgtttcccaacagttgggcctgggagcaactctgtggaaggaggttctgtggtgacatcactttggagaactctgactatgagattcctcttttggaaagatatagtataccttcatgtatcaacagctgtatgtccctttgaaaataaaactctttaacagaaaactccattccttttattcatgtaatattaattaacatctatggtgggcaaattaatggcccctcagagatgtccctgtcacaattgctggaatctgtgactatagtggtttatataacaaaggggaaatcaaggttgcaggtaagattaaggttgccaactagctgatcccagataaggagggtatactggtgactcaggttggcccagtggaatcacaagggtcctcaaatgtggaagagggaggaagaaagtcagtcagaggagagacgatgacggaagcaaggtcagagagagatttaaagatgctatgcagctagctttgaagatggaggaaggggccacaggccaaggactgctgcagccactggaagctggaagacacaggatacagattctcccctagagaccccagaaggaaagcagtcttgctgattccttgagttagtcaagtgagatgcatgcgggacttctgatccccaggtcaaatgtctagtgtggcatccgcatgttcgggagagaatcaggggcctagacaacataccagacatttgacctagagctaagatggggagtgagagcaggcatgaagatatggtctgagatcaacatggaactcaggaacaacaggcagcgcttgcctgcctgagacactcacatctgtgtgtgaggtgcccatggtgtgagcacacagtcaacctctgagttgtcaaggaaccaaccacagcaactgctgtgagcagaaagtcacgagcttgtgctcactgttgctgccatgcaaactagcaaactaggcccctctttccccgatcctatttttaatatctctgacaatgaaacagtgtgtgctaacccaaagaaaaggtaagtcatgtccatggataaccttggatttgagatgatcccttttgaatgctgtgctcctgtttctccatgtccacccactctctggagagcagccaggcagataacgtgggaacgtggaaatgtaaagtggagactcatacccccacttccagtagtaacgatttcttaagtttttccagctagagagtaggtgtactctggaagctggggagctgcaaccaggcttaggggccatggttgtcacccagcacctttgccatttgcttgtcagagttctcccagagctggtgcttttatccaggaggttcattcctaagaatatttatcttacccactgcttaattttgggtaagagactctggaaagaaaccatttcttgtactttgctaaatcatcatcagtagtcagtggcctctaacaccaggctctccacccagtgtccattgctgacagccctgccgagccggaggcccagcatctgctcagtgtggctccaggcatttgcagtcttgctgacctggcagggggctcagggcaaagccgcaaacaggctgtgtccaggaagctcctctgttggcttgagcaccatctaaactgagctcattcagcagaacaaaagtgtcaagccaacatgtagttcctttagtctcttgcattccccagaccctggcgtgtgcacttctgggggtgatgtaataattacagagtactctgatgaaaatatttttattttattaattgtactggtatttgtgatgtgaaaagtaaaaagaaggatcagatgacatccaaagaaaaatgttaagaaaaacagaaaaaaatcagagacagccacgacaaacatgacatagttgtgccctgtgactgatgctggggcacccggataggaaggagggctcctttccagtacatggggtaatgtccagtgaataccttctctcagaggacacgtgcacctctgcccacttgcttccatccctctccacctctgggcacattatctcctgattaagtttattggtaaaagggtctcctgcaactccacctgttacacatcgctgtttctatttttccatattcttttccgggaagaggctatttgcatgaggaaatttgcatatttctctgtggctgttattctcatgtagcgagtttgcatttggcttatttcactcaatattgtatcggaagcattttccatggtgcatatcatcccaaaataattctcaactgtaggggttggttgtttcctgttttttaaaagtttttaaattttttgtagagacgaggtctcaccgtgcttcccagcctagtctcaaactgctgggctcaagccatcctcctgcctcagcctgccaaatgcataagccaccccacccagcctgtttcctttgctttttttttttttctttttaaatgaataccactggacacacagctcttgccttctgttgaactttcagttgtttttggagaataaattattgcaagtgggtcaaagcgcataaatgttcacacttcttaagtgcccaccccactaagcttgaggcctcttcacccatagaaacaatggtgacctttgttctcaatatgcaaaggaccttatcaaagaaacttttcaatcaatgagataaaaaaaagtggaaaaatgatgaaggatatgaatgttacttcagaaaaaaagaatacacttggtcacaagcatatgagacatactcaacctcactgataattaaaaacttgcaaattcaagcaaaaaaataaaaaagtcttataagcaaggactgaaaagtttggtaatagccccgatggtaaggtctggggaacagtcactgtcattgtgctctgcagacatgtcaatggacaaagctgtaggggaggataacttggcaaccactgtcctcagtgctggggacagcagcactgtccagtagcacttcctgccaccgtggaatgttctggacctggatccagcatggctgccacaagccatgtgtgcttactgagcaattgaaatgtgactggtggaggctgggcatggtggctcatgcctgtaatcccagcactttgggaggccaaggcaggcagatcacaaggtcaggagatcgagaccatcttggctaacatggtgaaactctgtctctaccaaaaatacaaaaaattaccaggtgtagtggcgggcgccggtagtcccagctactcgggaggctgaggtaggagaatggtgtgaacctgggaggcggagcttgcagtgagctgagatggcaccactgtactccagcgttggcgagagtgcgagactccgtctcaaaaaaaaaaaaaaaaaaatgtgactggtgcaatggagggactggatttttaaaatttttatttgcttttaataaacgaattgaaatagccacacatggctagtggcacctgtattagataagtgacacctgcataaggatgctggctctaggaagcccagcagcctgtgatgggtctgctttgagaacagggcatagctgagtgccctatgctgggctgtggctaagccagctgagttaagcacatctcagggaactttgtgtgcaaaacaagaaagaggaattgaaaacagagaaatagtgggaagaggcagaggagaagaatgagaattgcctgttgccgtttttgaagtgtggcctccaggccttgcagctgtatatctgaatggccatgagcagcaccccgggcctgtgtgaagtctggctgagtggccaccgagaagggtctttgctgcctcaggtcccagatgtggccatcagtacttgtcagaaccagagcaggggactgtgccttacagttggttagctggatcagctaaccaacactctctggctgttcctggctcttacatgtggaaccaaaaatgttattgtatagtttggtaaaaacaaatcattacctcatacatgatggcttacaaatctggatgcaatggatttgcacaaaatgaagcatagcttagtttcttcatgatctggcctagtgtaaaacgaggggatgctgtttgtcatgtcaatgacggggtgggagagagagtggccactctgccagtggtttcctgcaccatctgtggtgtgcactagcatttcccaaagggagcaatatattggacccttttcaaggcaaatagtattgacaatgcctgataattcatctagggaccctagttaagtgttctataattattaaagagagttagaattgtaagccaattttagttgacatatacatatatacatatatacacatacatatattttaacctttaaaaaattcttcctggctgaacgcggtggctcacgcctataatctcagcactttgggaggctgaggggggtggatcatgaggtcaagatatcgagaccatcctggccaacatggtgaaaccctatctctgctacaaataccaaaaaaaaaaaaaaaatagctgggtgtggtggcaggcgcctgtagtcccagtgacttgggaggctgaggcaggagaattgtttgaacttgggaggtcgaggttgcagtgagccaagatcataccactgcactccagcccgggcaacaagagtgagacgctgtctcaaaaaaaaaaaaagttcttccattcttttcatttattttgatcacatgtattacttccaaatatagtcataagagagacagatgctagatatgtggataggcattttctaccccaagggtatgtaatattccatattttcagatatacctctataatttttttaatatttagctttttttttttttttgagatggagtctcactctgttgctcaggctggagcgcagaggcacgatctcggctcactgcaagctctgcctcctgggttcacgccattttcctgcctcagcctcccaattacctgggattacaggcacacgccgcccagctaattttttgtatttttagtagagatggggtttcaccatgttggccaggatggtctcgatttcctgaccttgtgatctgcccgccttggcctcccaaagtgttgggattacaggcatgagccaccgcacccggccctaaatgtttagcttttaaaaattccttgtgaaatctgtccaggtgcagtggctcacgcctataatcccagcactttgggaggccgaggcgggtggatcatgaggtcaggagttcaagaccagcctggctaatatggtgaaaccgtgtccttaccaaaaatacaaaaattagccgggtgtggtggcgtgcacctgtagtcccagctacttgggaggctgaggcagaagaattgcttgaacctgggaggcggaggttgcagtgagccaagattgtgccatactgtacttcagcctgggctatagagcgagactccatctcaaaaagaaaaaaaaaaaatccttgtgaaatgtatgtttgttaaggtgaaaaacagagctgccaaattatttttttccacctttgtaatcagttctctaaacaccaatctattcacttttcccacccattcaaaacatcccataattcccaatatacatgggctttttttcagacctaaattttgttccattgctccatctctgccattttaattgctatagctcttttttctttctttttttttttttttttttatttttgagatggagtctcactctgtcgcccaggctggagtgcagtggtgcaatctcggctcactgcaaactccaccttccggattcaagcgattctcctgcctcagcctcccgagtagctgggactacaaggcacccgccaccatgcctagctaattttctttagttttagtagagaggggatttcaccattttggccaggctcgtcttgaactcctgacctcgtgatccacccgcctcggcctcccaaagtgctgggattacaggtgtgaggcactgcgcccggccttaattgctacagctcttaaaatttaaagctgttcctggacattttctctcacagatgaatagtagaatccatttgtcaaatttcattttcaaattattttggtaacttgattaaatatgcagtattttctaagctgacaaagaacacaatatagtctgaaggtggaggtgagtcaatgggctttcctccctcactccccaaacagcccccatttccacatggcctccctctgacatgcagccctggtcactggccaagagcaatctgtctgcccatgccagaagccttcctctccctcactttctagttttctttatggcattggtcagcaacaaataatatgtcaacattatttatgcatattttagatttattgtccatctcttcttgctataagtgaaaactttgagttaaaaagggcagagctttcattgatctattcactgatctatctgcaaggcatatcatagacactgaatattcatagaatgaatgagtgaatttggagtgatggcatttgagatgtgaaatttgccatcttatttgaacaccaaccttggttttagggctaactcccctccaggggtaagatccctgggaaggtgctctctgttgaggaagagcaacttccccatggagaaaggcctttgtttggtcaacaccacatcatttcatttaatttgatcttctcaacaattctggaaggaagacaatgcagattcacctgcaggtgggaatgtaaattggtacaaccttttggaaaaagagtttggtttaatgtgtcttaaccatgttctcccctacccctcagtcagagaccaccagagcacactgtaggctaataaactgggcttgttcctcattgcagcaaggaagaacgcataccctggggagccttgtgtgtcccactcagtaaggttgttagaaagaaacgatgataggattagggcttgggtgacctgcaagggggtttgaggaacccgggctctgcttggatggatgctgtcaggaagtggggctagctctagggttgggggtctttctttacaagcaggaggaaggaagccaggcaagagctgcccagcaaggcagccgccatgctcaagcagccagcacagggcatcgtggcttctgtggcggggatggtgcatttgtgctcagatgtgagtccagaggggcttggtcctgtctcgatccctcatggtcggggtggacttgcctgacatgttatgttccatgacatagtttacattcagcagaataccagggcccagctcctgcatgtcaggggctgctgttctctttctcactgccttttaacccaaggagtccacttttgggcatcaatcataagcaaatagatacacacgcaaatgaaaaatgtaaggccgggtacagtgactcacgcctgtaatcccagctactcgggaggctgaggcaggagaatcgcttgaacctgggaggcgaaggttgcagtgagccgagattacgccactgcactccagcctggcgacagactcaacaaaaaaaaaaaaaaagaaagaaagaaaaaatgtatgtacatctcaccattattattaacagagaaaatgccctccatatataggtgcagtaaagaagttttacaaagcaaatacgtgccacaggccatgctgggcagggcagagtgcagacaaggctgaggatggcatgaccacgagtggccaccataagctggtgtgtgatgcagccctacaaagatggctcactggcccagagacactcaaggacagtgctaaatagagaagtgagacatacgactataaatatagtgtactatcagtcatgtaagggaaaatctttattcattcaacaaatacttcctgaggactgactccctaggggacagacctgccccttgtccgtcttttcactgtgatgatggtatagggagatgacatagaatgtcctagagggagactggctaagttcctggacctggcttcatgaggcataactaccagctgctgaggtccagaaattggatgttttccccatatactccaaattgatgacgcttctgaggaccaaacaatgacaaccaagttcgtgttttggtgactgccaagagggtatgggcacagttgtaaatccactctgttgactgccagctggggatgacttctccagtgagaggacagctcagtcgtgctcaggaactttctggtagcagaaagacctaatattcggccttggcaggggtcaggctggccccagaattaaagccaggtgagaaggagcatcttggacgagagtcaccaggtcccagagggtgagagcaaatcctgggcaggctcctgatctaaaggatggattttaggggagtccccaaacagtccatgtcctttcaggtgacatgttttacatttcatatctactgtgtaaaacaaattattcccaatcttagaagcttgaacaacaatacttcttatctcacagcttccctgagtcaggaatctgggtgtggctattcggggtcctccagaacagggtgtcccatggcatctcaggcacagtacaaccccacgtctgggtctactcatctcctgcaacgtatactttacattctgctctttttttttccagcaaggcctttccatgtccacatctaagcacacacagcaagtttctccgcttgctttttaagtctgagtattctgggtaatccagtaactcctggccctcaacttcccaactcctgactgggagaccaatctgatccacctgtgctggtcgcaggccggtgcctgagccatggcctgtccagcaggtcaggtgagcggctgcacatgcccccagtaccctgcacagcatcccctccttcctcgcctcccacttgcaccctgctctctgagtgtgcctagcccttggcacgtcctttaatgccaacaattccttccagaccagagacacaggcaggggctgaatgcatgccaccccctcgcaggtccatggggttgaaaactggccttgcccccagcctgccctgtcccaacaccctggctcctccttccacacattccgagtgtcacccctgtgggtgtgaatgtgggaatgaaaccaggtggagacaaagccactgaagcaaattctgtcccttaaacctgtggaaccaaagcaagactggcaactctgactctcctgtgcctgctctgccctcccagtgactctagctccctaagctggaacccagatacagcttcaaagggcatccagaggccacacaggatgtgggcttatctcttgctctcatgcgggggaacagcttcccagtgtgaataagacatttgatcagccagtcctgctcagagccctagatccaccctgctcttgctaacctgaagaacagacactaggctggacatggtggcatgtgcctgcagtcccatcaacctgggaggctgagatgcgaggactgcttgagctcaggtggccgaggctgcagtgagccatgatccagccactgcactccagcctgggtgacagaatgagacgctgtccctaaaaaaaagaacagacactgcaagaagcactctatcttgttataaatttcacctgccaagaactccctgctttgacctgcttgcctgcaggtcattggccctgagcaggtagtcaatgttcttttaccactttgtagtcgcacctccatttctgttgcccttatccttcttcacatccactggtaactgtctcctgactgagttcctcaccaccactacctgcatcctctcccctttccctcatctaggaaacatggtgctttctagttctaacatatcatgattttctgtctctcacctacccaaaacaccatgtcctcaattccacattaaagctagaactagctattcatcttagaaccacagaactcagctatctagaagaaaacagtgttgtgcgtctctcttcaaaactacatatatcaagaagcttcagatttggggaaaacataaaaatagctgatgttggaaagagtaggggtggggcattggggaggagaaagaaggagccaaaaattggtaggagatggccatgaagcatattctgtcttccagcaaatggtgaagccattctagaaatacactaattactccactcagtcctggggagtctaaatttctttgtaatacatctccaactagaggcatttatcagacataaaatcccctagacatctaacttgcctttccaggaaaaaaaaaaagacaaatataatttaacaataaacttgtgtaggaagacagacactaatggtgagagctgcacatagttggtgttaatggtaaatttcttgaagtctgattattctagtgtaatcaaaatcctcctcaattcaaatagctcttaggctctcttgacccatcactagactgcctgaaaagcaggaaagttcagtcacttagagaacacatcttaggcacactattctgttgctggcacatgggacacatgagctgatgaattgagtgtgcctatggggtcaggtttgtctaagcaaaatcaaacgaacaaaggcctctgaatgagtagttgccagcggcctatgcagcgactacttcctccccactcactcagcaacttgggccacatttctgtattgcagggttggaatggactttgttcagcctcagtgaggaagggaccaaacacatttgtcccaggttcaaggagatcatgagattctcccattttccaaatgtcaacactggggatggtgtgtatacagtaggcacatttctggggaagtcggctatctcaccaaaatattgcaagtaattgttgatattctggatgctgactgcttagaggcatctgctgtacatatgacaatgcaaatttgaaacattggctggcagtggcagagctactgatcccaaaccctggtggggctctttgactggtttgaaggtcagggtggagaaagttcaactttagagctctttcccaccaagcttttcttttcttattaaattcaaaaaatgtttattgatcaacaactcagtgctaaacctatgggagaacccaaagacttaaaaacctggggtcctgctcgccaagacatgttaaatgagataatataaaaattcccatttctggtacctgaaaaaggcttggggctggagaggtgacatcgttcagcttgctgacctcatcaatcatctgtccccagacaggcagacagatctgttggagaagtcatcctcaaaagtaaggctgcagagccagggtctgtttgagagcaatggaatccaatggaaatcacttctcaagtacactttatgtttggacatttctcagctcttaaagcttctgacattgattggatgctggtatggctttataaacacttgtctttttcatacactcttaaggattcatgtctcctcgaccattttgtatattctaaaataactatgccataaaataaatgaaacaattcccacttactgcatagtttattcagatattgaccttatgtttgggctgaacttagctataattgaacaaagagtgataagccatcgttgcttagtgatattttctatcaccttcgctgaggctgcagttggcattctgcaggctctttccaacaagaccatttctctggtacacaactgagcaattacactgactgagctgaaatccacaagcatttgcggagcactgctctgtgcaggggaagctccaaacacctaggtggcaaagaggagcaagacccatccctgacccatagaacctgcctgtagcccccggatcctgccggcccagggcaggggtgtgatgaagtggacaccaagtgctctgaggagcagtgtgagggaagagaaattctggagagggagaaggccccacatccccagggcaggtgagatgtgagctgggtctcccgggatgaaggagactgggccgaaggagagggtagggaggagcactccagtaaggcagtgaagtttggtggagcactgaccgggtgggaggcaggagaggaggtgggagtagggcctggagggtaaggttaccaggggctgagaagccattagactctcagcagcagccctgagctcttgagcctgccctttgttttttatcaagcccccccccccaccatgttagtatcagggaagctcaggggatccctattgcaagtggcaattcctcaccctccccttctgcttcatgaggtcagatatcagctgcccaatatccagcagcaacttttaataccatgttttgtttctgaaggtagcaaggacatgtaagcttgggagtatgtgaaaaaagcactgaatcgagagttaggaaacagaaacaaagttttcatcaattatgtaaagcagctctctgcccctgagattggaaaccaacctaaccacaaatggggcctagttttctctcaggacgtcacggtctaagacaaacaaatgccatacaaaggagagaagtcaaggcaggggatgttgaaagcagaaaaggagaagtaactaactcctgtgaaaaggaggcatcatcagatccgatcctacttggaaactgacagctgagccttcactgttcctactgggtcagaaacaaagcaacacgagtatggtgcctgcaacggtcccattgacccccacatcccatgggggtttgtgagagcccagacagatgctgtgcacccagtgggctgcactgcagaagaggagccctgagctcagggcatatccagaaggaaacatcacctgctgcagtgtcctattgcaaacacagctctgagatgcccagttcaggagcggccaggccttgcattcctggatacccagtgtgtgagtttcctgtggctgccataacaaatgactataaaccgtgtggctcaaaacatgtttattctcttacagttctgaggtcccaaagcctgaaactgacgggtcagcagggtggttccctctactgtctgtgagggagaatcggccaggcctctctcctggcccctggtggtttgctggcaatctttggcattccttggtttgcagacacttcatccccatctctgcctccatctcaatgaccttcttctctttgtctctgcgtctctctctcttttctcttataaagacatcattgggtttagggcccatcctaaatacaggatgatttcatctccaggtgttttaattacatttgcaaagaccctttttccaaataaggtcgcattcacaggttctagaagttaggacttggacctatctttttgggggccaccattcaacccactacctccaggaaagacctgtaggagagcaagagacgggtggaggattgcctctcccattgctgagctttcttaacaagagaacggtttttatgtcagcctgaagtagtgatctacatgagcaaagacatgggtctggaaagaggaaaagaatatttgagacaaggtgtcatactttactagaagtgaggaaacccggagtaaatggtgtgagataaatcagcctgcacacttcctaagtgtcagcactgttctcggagctgggacagtagctgtaaaccaaacaaaaactcctgccctcacgcagcttacattctgatcaggagagacaggaaacaatattaagaggtaaatgttcaaatatattagaggcagaatctaggagaaaagtatccaaggcagagagaataaccagggcaaatgcctgagtggaaactgtgcttgccatgctgggccaggagtgaggctactgggtgtgaagtcagaaaccaagaaggcgcagagactggaccctcctcgcatgctgacaaggtggcctgcacagctccacatcacatgcacatgtgtataaaacaccagaccaaggccgggagcagtgactcacgccagtaatcccagcacttcgtgaggcaggggcaggtagatcacgaggtcaggagttcgagaccagccttgccaacgtggtgaaaccccatctctactaaaaatacaaatattagctgggcatagtggtacacgcgtttaatcccagctacttgagaggctgaggcagaagaattgcttgaacctgggaggcggagacagaggttgtagtgagccaagattgcgacattgtactccagcctgggcgacagagcaagactccatctttggggaagaaaaaaaggaaaaacagacctctgaatcggagaaatggacagtttattactcacagtgaacacagcagccagaacagtatctttagtcactttcccatgcccctattcccaagaagagggcatgtggatcgtaccagctgggcaggcagtgggtctgcatcccaggagagggacccgaaactgggagacttggagattttatcagggctgtggaggacctgcctttcttctcctccagagatagatgactcattatccagcaacacagaggtcagcaccgacctcaccagcagcaggctcacaggagtggcaggggcattgggagagtgggaggcagcacagggtcagctctttcacgaaaacagagaaacggggcagctctagagtgggagtaggggcacagagaacaggaaggaaaggcggccggcgaaggtatgatatcacaccagctcccactgtgggcacccaaacccaagcctcctgggaaagtctgggaactgttaaaaatccacacctcagcatcaccctgccaaggggtggggtggggtatgtacacatccccatcattccttgattgaaggctgcaggagagtggagttcatgccaaggcacttgagatcgaccatggatgcagccaggcagaggcagaggaaggccagccctatcccagagaagggcaggacaggggtggacatggggcccagggcactgtggcagtgcatacagggacctgggcaggcacagtgtcagtcagaggtccagagacctgaaagtgagaggggcgggacccttgaggttcagggaaagagcatcttatactttttccattttgcagtgacttggagatttgtccacaccagtgcacagagacgtgtcctccttttatttcttttaacagccgcttaatgttttatcctagcaggaaccctaccatgggccatttaaagtgtttcaaatcttagggggctgagcctggtggctcacacctgtaatctcagcactttgggaggctgaggcaggaggattgcttgaggttgggagttcaagaccagtctgggcaacatggcaaaaactcatttcttaaaaaaaaaaaaaattagacctgtagtcccagctactcggcaggctgtgtgaatagtaaggggtcagtctggttgggagtctgtctggcgggggtctggctggggtctgcctagataggtcctgatttgctgggggtccatctgtctgaatagctggagatgtgtactcatttgggggacttgtctgtcaatctggaggatcatgtctgactagctggggtccatccatcaagacatcaagatgagagtctggccggctggctgggatgtcaggattccatgtggctgatgtctgcctgtctggcagtccatctggttggttaggagtctgtctggccagaaggtctgtcagccagccagcccacctgagggtgggggtggggtctgagaactctgtgtatctgttcagcaggggatctgtttatatctgtctagtaatctaacttagggggtccacctggctgtccagctagcagagatgtctgtcttttgggggctctgtttggtggtctctctggctgcactggtctatcaagctgttggctggtctctctctctctggctggggatccctttgtccacctgtggactgtatctctgaagctttggctgtctgtccaggttggtggtccatctgtctgtctgcctatctggaggtctttttatcggtctgcctggggttaatctgcttggctgtggttatgcctggcttagttctgcctggatggcgaagtgtccatccacttctctgtgtggtcccctgagtgtccaagtgagggaggctcaggtgctgaggatggactagtgctgtgtggtgaggagagcagtctccggaagctcatctgtcccttctccccttcataactcaggggtcatgccccttcctgatcttctttcttgaatctgctctgtgcagcctcaccagccactataccctagctacctcctccagcctcaagccttgaatgctacagtcattggggcaaagcccccacatttcccaccctgagaaactttaactttgatccaggcccactgtttccattctgcgcacggcgctcagcagcaccggggcatcagcagtccgagctcacaagaggcaacaggcaggaactggcgttagacttacacccgggtccactcagcaggcgggtcccggggacccttcggcctcccaatgcgcaggttgaaacctgggagaagaagggtgccgtgggtctcatggagaagctgaggtgtgtggaagctggcagacatgaagaaggccatccccccgcctccaggtcctcctggttcactgcagccacatccacaggactaagctccatgccccatcaaccccagactcctgggttcactcaaagcagcaaagtcccagcaacccaggctctacctgacttacctagcccaccggtctgagctccacccgccacgtcctcgtaggcgccagatccggcaggactttggtcagcaggaactgagggcagcagaccccccacgggtcagctccggaagccccagggagtcccaagaccccacccctagcggggacgcttccccggaggcccgaaggggagagccgagggcgccgggcgggagaaggcacacaccccggacgtggcctccagcctttgggcgcggccaagacaagtattgccaggaaccctgcccctggaccgcgactgcgaccgccagggggcgcttccggggcgtggccagggacgcctggacatcagcgtcggggcgtggccaggctagcggctggggtccccgcggccgccagggcctgacggaccactgcaggatggttccgccctgcggatcacagcaggatgatgccctgagaaggagcaagcctcgactcaccgcggccaggcagcgtccccctcgcgtcctccgcgtgcgccccgggtcgctgggcgcgcggcgtcaccttgctgtagagcggcgcctcctccgcgctgcgcgcccccgtccccgtccccgtccccgtctgcgtcccactcccggcgcccgctggagccccgcgcttctgcaccaccgcgtaggtgtcagccatggcgtggcccggggacccgggcacagagatgctcctgcaggcagggagggccgggaggaagtgaaacggcggcgctgggcagggcgggagtggggaggctgctcagcgcgcaaaccacgggcttccttcccgccgaggcggtgcgctagatgggagggagggctccttgggttggaggcctcgcttctgtgtccctagcgccctgcaagttagggggatgaaggaggaacggggtcagcctggagggtaatttggggcagagtgttggtttgaggggtggtcatttctgtgtcaacgtctactgaacaaaagaatgcggaagtggcatagaagacaggaagggatggccgcaaggacaagggccttaagtctccgctgcgaaggcggctcaatcccatgtccgcagcacccaacgtgcggcctgacaagaaggcggcgtctagaattatttgctgaattttttttgttgtttttttgagacaggatctcgctctgtcgcccaggctggactgccgtggtgcgatctcggcttactgcaacctccacctcccgggctcaagcgactctcctgcctcagcctccggagtagctgggattacaggctctcaccagcacgcctggctaatttttgtatttttagtagagacagggtttcaccatgttaaccaggctggtctccagctgggctcaagtgatccgccctccttggcctcccgaagtgctgggattacaggggtgagccacctgaattaaggtttgattagaggatccaggaaaggcctaactcagaaggcagggcaagccttagaggcagaggcaaggggtaaatgaatcatcttgggataattgaatcatcttggggtgggttcccagagctcaattcgaagaaagggccagcgaacacttggcgaagtgaacaaggaacggactggtgttccaaggatgaagaaggggttagcctgagaaattgggcagggaagaatccggggatggagccgggtacctgaggacccctcctggtgggcggggtatggcgagaagtgcctggggagtccggaggaagagggcatcgtcgtagagtggggcacaattctgaagaaaaacaggaggggaggctcctgagggaggaagctggccaggcctctcaaggggctctgggagaaagcttaagatgggagagcctgataaggatgcctggaggagggcacaggtggatgtcatagtcagtgcctgctcccagtagtcccgggggctggaccctgctcggggtcctggtctctgagggtgctgatggtggacaggagagtgggaaaggagcctctgtacctctttgatgttctggtagtgggggctggcattctggagtgtggagcagaacatctgagccaccgtgtggtacaggaacctgtactgctcctgttggggtgagggaccatcaagaagggaaggcaggggcaaatgacagcagtgggccactgtccctgaagattaggagacccagggttcacctctgtctgcacggccgcaggccgctgcttcctcatcttaaggaccacatcaaagagactgaagtcaggtgggatcatctggggcagacagacaaggcacttgagcaggacacgtggtcatgggcagcacactgcacacacaggatgcctgtatcgtacctgggtcaggagcagctgcctcacataatccacggtgcacaggacgcctgttcgcccacaacccgcactgacaagagaatcagagtgtgcctggtcaggtcctgaccacaaccccttttagatggggcatttggggatgggggtgagggtcctgatggatcccctgcagagcctcttgattcccagaatcttcagattatatctgaacaaggaaaacctttttaatcacttacattttgttgagcaagagctgtgtgcttattccccagctgagtctgtgctgaacaagtgctcacaattacagtccatggagggtgagcaagggttctcaaaataggcactcagactacaagactagccccatgccctgtactcccctccatgctctgtcccctctgcctcaccagaccctcctgaagcccatttccaaaacctgcagtggacacagaggggttcagggccagatccctggaggcgacgggcttcctccaccatggcgagcatgtggtcaggactgctggggaccccacggtctggccaggacatatactgtagctggtacacagaacgggactcctgaaacacagaaaaagatgagcaaaagacttaggaaaaaaaagaaaaaagcattaattggccatctactatacaccaggcccacttctaggcatcttccatttatgtctaccagacaataactgaggaagtgggtactagtatgatgcccatttttacaggagaggaaacctctcccctttcaggagcccctttacctcctcctcccctgtcacagtaccttctggaatgtgaccttgagggtcctgagcatgatgtcctcattcagccacttctcctttatctgagtaaggggggtggggcaagtaagaagagggaggagaacaaagatcataggtaccagaagacatttatagaaagcaaagcattcctgattaaaaaatcaaatacagaaaacattttaaaaattcatatagcccaaactttccccaaagctttcattaaggaaacatttgacacaggagcaaaagaggaactattataaaaacacaagcccttttgcaatgaaaagagatgtcttttgttctaaaatgaaacttttattgcatttattaagtactaactgtatgtatgacttgagagagttccccaagctcttttgaaatggtaagagaagtaagaatttcaacaacctaaccaggcacatttacatgacagagattaactgattgtagccaaaataaaaatgcaaaggctatccctatagtaagttctaactatttgcaggctaacaccagagggtttcctgcagtatgagtggactgtgggttaaatcattcaaccttttaggcccaacccaaagcctttccaccctgggaatcttccttgaaaactcccacagctcaccagagtgatgcagaaaagcccagtctgcagtggctcctgctcctgggcccagtaccgctcacaccttttctgcaaaaggtaagggagaaaaggcagggagtgagaagagggagtcagcttcagagctagctcaatcatgccacaagacaccccaggtgctcgtggtggaagcacaggcagctatacttataacctataacagacgccagccaacagagccatcagattaaacacatgcagactcaatggaggtgcgctgctgaccatgcaggggaaatacagtccaggataccctcccactgtaagcaactagaaactggacaaaatacatgagccactattttcagacactggttggcaggtgttgcagtactgtggtcactgaacagaccactccggcttattgcatggaagtgtcaccaggctgtaagacatgagtctaatgatcccactgagttgagccagagaccatggctcaaggaggcaaaagcagctagaatttgcagggcagagtcctggaaggaacagaggtatgcaaataaaaacaaaacaataacttgcatagaagtcccctccttgattctttggttgaataatctgaatatatacaacatgaaaccccatgaggccaggcaagaataacttaccatgaaagaatagtagggatctgtaggatgaacatttccttgagctcatgatgagaaagaattcacattccctctagctagagtgtagaggcattatcaactataaggggcatttagtagggaacctagaatgaccacacattagaagtacggctaaattaattctagaacaaaggctacttgatcaaccatccaaaagttcctgaaaaggcaaaacactctaaagaaaacaatccaacacttacctgtgcaaaattcaaaatatcaagcatccaataaaattttgctggacatacaaagaagcaggaaagtgtgacccataaccaggagaaaaattagtcaataggaaagggcccagaaataacagttcaggaaagaagcaaaaatcttaaaatggctattacaaatacactcaaagatgaaaaggaaaacatgaacatgatgcagagtggaatgaaagatacaaaaaataacctgaatggaatttataaagaggaaaaataaaatatatgaaatgaaaaatccactaatagcagggtagacactagaagaaaggatcaatagacatgaaaacatagcaatataaataattcaaaatgaaatgaaaaaaatgaaaaagaatcagttctctgtagaaatataccagtctagtgtatgtgcacgtggagtccagaaggaaaggagaaagggggataacagaaactttatgtaaagaaataataggtgaaaattttcccaaattcgatgaaactatgaacccacaaatccaagaaagtcaatgaaccagagggagaataaacctaaacctaaagaaagtcacgccaaggcagatcatgatcaaattactgaaaaagaatgaagaagagaaaaaaaaatttttttttgagacccttgctctgtcacccaggcttggcgtgcagtggctcaatctcggctcactgcaacctgcaactcccaggttcaagcgattctcctgcctcaggctcctgagtagctgggattacagacacacaccaccatgtccaacctttttttgtatttttagtagagacagggtttcaccaggttggccgggctggtctcgaactcctgacctcaagtgatacacctaccttggcctcccaaagtgctgggattacaggcatgagccaccacaccaggccccagaagagaaaatcttaaaagcattatgcacaaaaggacacatcacatactgaggaacaaagttaagaattatagcaacattttgtcagaaacggcaagtcaatgctatgatatcctaaaaatgctgaaaaccttttcagacaaatgaaagctgagggaattcatcacaaacaaatctgcattatgagaaatattagagtaagctcttcagatgcttacagacagtggctgctccagctatttgagaggctaaggcaggaggattgcttgaggccacttcaacaccagcctgagcaacatagcctgtatcttaaaaaaaaaaaaaaaaaaaaaaaaaaaattaaaattagctaggtgtgttggcaacatagctagcctgtatctaaaaaaaatcttttttagttagctgagtgcagtggcacacctgtactcccaactacttggcaggctgaggtgggaggattgcttaagcccaggagtttgaggctgcagtgagtggtgactgcacactgcactccagcctgtatgacagagtgagaccctatctcttaaataaatagaataagtaagctctgcatacaaaaggaacgtgatacaaatggaaatacagatctacacaaaataacagggagaaaagtaagtggctaaatgtaaaagatatttcattttaaacatctttaaaagataatctagtgaattttatcaaacaaagaggaattaataccagcctttcacaaactcttgcaaaaaactgagaggaaccatttcccaacatattgtatgaggctagtattaccctggcaccaaaaccaaagacatcacaagaaaagaaaactactaaccaatatctcacaaacatagacacaaaaattctcaatgaagtactagcaaagtattaaacaccatgactaagtgggattaattccaggaatgcaagattggttcaacatatgaaagtcaatgtcatacaccatattagtagaatacaaaacacacgatcatctgaatagatgcaaagaacaaaatttgacaaaactcaacagcgtttcataaaaaagttcattagaaactcagtgcccaggatttttattggggcaccgtctgcacagaatgtaggcacactctgcctagcctgtaccaaaatgtcagactaccagcaggagaacaggtgttctgcataaagcatattgtttgtattaacagttcaggcatagtgagccactgttatcagaaacctaggtttctagaggccacccaagagtcaaccttacaggaaggcctttctaagcataaacatttatgcttgccatgtttaactcttctgcacagcaggggacctacccaaaatagccaaaacaatcttggaaaaaagaacaaatttggaagactcatacttcctgatttcagaacttctacaaaggtataataatcaaaactatgttacactggcacaaggataaacacatcaatcagcttaataaaattgagagttcagaaataaacccttatatttatggccaattaattttcaacaaaggggccaagacggttcaatgggcaaagcatagtcttttcaacaaatggtgctggaacaactggatagtcacatgcaaaagagtgaatgtggacccctatctcacatcacatacaaaagttcattcaaagtaaatctgagacctaactgtaagcaagaaaactataaaacacttagaaggaagaacaggagtaagtctttatgacctctgattagacaatgacttctcagatacaccaaaagcacagcaacacaatagattggaattaaagtttcacaaaatgtttgtgcttcaaaacacaccatcaagaaagtggaatgacaacccacagaatgggaaagacattttaaatcatgtactgataagggacttatatacagaataacgcttacaactcaataataaaaagacaaccccaaatagcccaattttaaaatgaataaatgacatgaatagacatttggccagagaagatatacaaatggacgaataagcacatgaaaaccaaaaccacaatgaggtaccacttcccactcattaggatggcatatatgtcattgtcatatgccacataatgatgttttggttaacaacagaccacatatacaatggtggtgccatagattataatggagcatatgtagaaacctgatacatggcacttgatattgacactgcatattaagttggggaaatgattgatactcagtaatggtgctgggacatttggttttccatatgaaaaatatataaataaaaaatgtatatactatctatgtttgtgtaagtatactctatgatgtttacacaatgacaagatagtcttaacaatgcagaccatatccctgtcattaaactacacatgtccctccctccctctctctctctctgctgatgggaacgtaaaatggtacagccactgtggaaaacaaaatgttgaacatagcgttatcatatgatccagcaattccatgctaggtgtatacccagggaactgaaaacagggattcaaacagatactagtataccaattttttgttgttgttgttgttgttgttttgagacggagtctcgctctgtcgcccaggctggagtgcggtggtgcgatctcggctcactgcaagctccgcctcatgggttcacaccattctcttgcctcagcctcccgagtagctgggactacaggcggctgccaccacgcctggctaattttttgtatttttagtagaggtgggatttcatcgtgttagccaggctggtctcgatctcctgacctcgtgatctgcctgcttcggcctcccaaagtgctgggattacaggcgtgagccactgtgtccagcctgtataccaatgtttgtagccgccttatttacaatagtcaaaaggtacaaacaacccagatgtccaacaggcgaatggataaacaaaatgtgatatatacatacaatgaaatattatttggccttgaaaacagtgaaattctgatacacactgcaacatggatgaaccttgaaaaaaggacaagtattgtatattagtgtattcctgattccacttgcatgaggtacctagaataggcaaattcatagggacagaaaggagaatagaggttacctggaaatgggggaatggggagttattgtttaatgaatacagaatttctgtttgggatgatgaacatgttctgaaaatagacagtaggaatggttaatccattgtgaatgtacttaattcaattgaattgtacacttgaaatggtttaaatggcaaaattatttttaacattcctcacagcacctataaactggcaaattttatgttatgtatattttaccacataatttaaagaaagacacaatggcataccacttcacaacccctaggatggctataattaaaaaaaaaaaaaagacagtaacaagcatcagggagaagaaatggggaccctcaaacattgccgtggaaatgtaaaatgatgctgccactgtggaaaacagtttggcacttcctcaaaatgttaaaaatagagtttccatatagcccagcaattcccagcaatacccaagagacatgaaaacccacatctacacagagacttgtatatcagtgttgatagcagcactgttcataatagccaaaaagtagaaagaacccaatttctgtcaaccaataagtaaaatgtggtagatccattcaatggaatagtattcagcaaacaaaacaaaacaaaacaaaaatgctaagcaaaaaaaggctacatattatgtgattcaattatatgaaatgtccaaagtaagcaaatgtataaaggcaaaaatagattagggattgtctggggctgtagaggttgctgggaaatggggagtgactgctaatggatataggatttcttttctttttctttttttttgagagacagtcttgctctgtggccaggctgcagtgtagtggcacaatctcagctcactgcaacctccaactccctggttcaagctattcttctgcctcagcctcccgagttgctgggattacaggcacatgccaccatgcccagctaatgtttgtatttttagtagagacggggtttcactatgttggccaggatggtcttgatctcctgacctcgtgatccaccagtctcagcctcccaaagtgctgggattacaggcatgagccaccatgtctggcctggatttttttatggaatgatgaaaatgttcaaaaacttattgtggtaggccgggcacggtggctcatgcctgtaatcccagcactttgggaggctgaggtgggcggatcacgaggtcaggagattgagaccatcctggctaacacggtgaaaccccgtctctactaaaaatacaaaaaattagccgggcgtggtggcaggcgcctgtagtcctagctactcgggaggctgaggcaggagaatggcgtggacccgggaggcggaggttgcagcgagctgagatcgcgccattgcactccagcctggaggacagagcgaggctccgtctcaaaaacaaaaacaaaaacaaaaacaaaaatcttactgtggtaatagttgcatagctcaggaatatagaaaaatgatggaactgtacactttaaatgactgaattgtatatcaataaagctgtttaaaaagatattctaaaacaactataatagcagtgtactgtggagtatattttatatatagaactataatatatagtaacaatagcacaaagcatggaaaggggtaatcgaaatatactacagtaaagttctgacattttacatgaaatgtagaatattatttgactatagactataagttaaagatatatattgtaaaccctaaagccacaactaaatatttaaaataaagatgtatagctaataagggaataattactatgcaatagattaataaaaaattctcactctgaaagagaaaaaaagaagaaaagaacaaacagagcaaatagaaaacaaatagcaagatggtaggtttaaacccaacattattgataattacattaaaggctgaatattccaattaaaggcagagactgtcagattagatttaaaagtaagtcctggctagatgcagtggctcatgcctgtaatcttagcactttgggaggccgaggtggaaggacagcttgaggccaggagttcgagaccagcctggattatacgtgagacttaatctctacaagaaataaaaaacaattaatcaggcacggtggtgtatgcctgtagtcccaactcctcagggaggctgcgctagcatgatcatttgagcccaggattttgaggttacagtgaactatgattgcaccactccattcccctctgtcttaaaaaaaaaaagtccctacaatacaccacctacaagaaacacactaaaaaataaagatgaacatagatacaaagtaaaagaatgggaaaagacatatgcaaactctaaagaaatttaaggccgagggcggtggctcatgcctgtaatctcaggactttgggaggctgaggcgggtggatcacctgagggcaggagtttgagaccagcctggccaacatggtgaaaccccatctctactaaaaatacaaaaattagctgggcgtggtggcaggcacctgcaatcccagctactcgagaggctgaggcaggagaatcgcttgaacctgggaggcaaaggttgcagtgagccaagatcgcgccattgaactccagcctgggtgacgagggaaactgcatctcaaaaaaacagaaagaaagaaaggaaagaaaggaaagaaaggaaagaaagaaagaaagaaagaaagaaagaaagaaagaaagaaagaaagaaagagaaagaaaagaaagaaatttaaatggctgtattaatatcaaagtacacttcagaaaaaaatattaacaaataaagagtcattacatattagaaagggatccaatcattaggaagacataatcctaaatgtatatgtactcaatcataaagttttaaaacatgaaaagtaaaactgaaagaatagttaaagcagatttcaacattcctctttcagcaaataatagggcaagcagacaaaaaaaattgtcagaaataagacttgaatagtgctgttgacaaacttgacctaattaatacttattgaacagttggtaatttcaacactcctctctaagcaatccatacatttagagaaaataaatcagtaaagatataaaatatacagtaaagatataaaagtgtctttttaaaaagtctgtcagttgacctaattggtatttacaggacactccagccaaccaaagcagaatacacattgttttcaagtacacttgaaattaaagtagaaaatgaattagttgggcgtggtggcatgtgtctgtattcctagctactcaggagtctggggcaggagaattgcttgaacttgggaggcagaggttgcagtgagctaagattgcaccactgcactccagtctgggcaacagagcaagactctgtctcaaaaaaaaaaaaagtggaaaatgaaaaaatcaatagagaaaatgaatacaaatgaatacaaccaaagcaggttctttgaaaaaataataaaatgataaacttctagtccaaagattggctgacatttttataaagggtcagataaatactttagaatttacaggccatataatttattcaacttgcaactactcaactctgccactgtagcataaaagcaggcatacacaatatgtaaataaatgagtgtggctgtgttctaatacactgtttacaaaaaacaggcaggagcatgaaaaaagagatagcgaaatagagagatgagacagagagagagagagaacacaaattaccaaaatcaggaatgagaaagagacaagactacagatcatacagcctccaccatcagctagtcaccccagggaacccctaccccatccatggagtaggcaagaatgtagaaaccacatgaagctatgtgccttcagccttcaatattgacatgcatttatttatttagtaactaatttatgttaacaggcaaaacaaaaatccctggccttgtggatcttaccttctaaatcagggagattaagcataaacaatgtacataatacatttgtagattatccagtgtgttaggagttcataagaactgtgaagaaagaaggaaaagtaggacaagggagggagaatggaagtgctgagagtttaaaatggtgtgaagacccaccccggaaggtctcattgaggaattaccatttgagcaaagacctgaaggaggtgatagagcaagccacagggaaggatgtcctaggctgaaggaatagccaaggcacagaccctgaggcagagccatccctggaacatgggaacagcagagaccagagttgttagagtggagtgaataaagggaagagaggtggaaagagagatcagagcctacaggggaagcagtcagaatagggccttatggtctaaggtgtgaaatggctgggaagcccagcaggagaggggttgccaacactgggggatgaataacatatcaacaaaaacttagaggaacaatggggcttcccacagagctacaataaggtcactccaagagctggaccctcgggtcctggggtcaaggaggagctagcaagatccctcctccctcctcccacaaggacatgaaacctgggggcagagggcacctacccgcccattctctatctctcgacaggccatcaggatcacctagacaaggagggtcaggggagaggaaggtgatttgggtgagggggccagggaaactgccgagggggtacttagatgttgaccccaccattgtgccgcacccccaagtgctgaccttgaccccaaactcccagaccagtctccagaagtctagcagggtgtgaggcaagggtccttgcgtggcaatgtaggccaggcttccatccacgccctggtgaaggccgaattcacgactgagattctgcggcccacccctggccactcccagtccacctccttccgtgaccccaaccctcacccggatgaagttgccattaatgtagtcgctgtgtccctcttcctggagcagggagaggattactcgcgtctgatcatctgtcagcagataaggtgagaaacgtggagtttgggtaggatagggtgacggagcctctgacagccccctagctgaaagccagcaggggaccacacacatgcagagatcccaccaaggtgcccttgtgggctgctgagcagtgcagagggtgaggctctgggaggagagcacagtgggtgactccagtgcacactgacgcctggacgtggcagggcgtgcaaggctgcaccgactccctacggaagccccgacttacaaggcagcacgtctttgtagcggttcttcctcacgttctctggccgactgccggccacggtggagcacacgccgtcagccttccaggcggccgagcaggcctggatgtcctggtagagcattatgagtgggtcagggaggggagaagacaggagaggagccaggtcagagtcccaggccacctaggcacgcttgcaggatacaaagccagtggcctggggaggtgagtgcagaccctgatggcactgggcctgcctaataataatgataccgaaatagtgacccagggcaccttctctgtgccactctctgtgctaagggcatgtaatcatcacaggttcctacgacgtgggtactattattgacgtccccattgtgcaggcgggaaagtttatgcaccacgtggttcagcgacttgtggaaggtcccaaccaggaagtcacacggtgagggttgaactcagaccctctcggcacccaccccctgcacactcaatctgtgacattgtcttgtaagcaataactgtaatgaaatatattatgggctatgtagctaaacatataagacaatgtacaatgaatgcataggcattataatggataacatattatgtacaagatactataggcactgtgttactgggagattataataataattagtgaatcgtgtattaccatcatcgtcaggtattcgtaatctcaatgataataagtaacacccatgccaccactgtgtgccagccactattctaagtgctttacttgtgtccattgggtcatttaagccctcatgatgcccttgtgtagtgggaacacctagaagagcgcagtgattcctgcacatgcgggaggcaggcttggggagcaggggtgccctcgccacccagccttccgcatgtgaggccctccgcactgtacacggttcagaacccacccagtcgcatgatgtcatatatcacatgggtattatgtttacatttgttacacacattcttatattgtataattatatattttacatttattatgcatttcttagtttcttatatacaatgtttctacatgtgtgtaaattacttaggtttataattatctgttactttttttttttttttttttgagatggagtctcgctctgttgcccaggctggactgcagtggcgcgatctcggctcactgcaagctccgcctcccgggttcacgccattctcctgcctcagccacccgagtagctgggactacaggcgcccgccaccacgcccagctaattttttgtgtgtttagtagagacggggtttcaccgtgttagccaggatggtgtggatctcctgacctcgtgatccgcccgcctcggcctcccaaagtgctgggattataggcgtgagccaccgtgcccggccatctgttacatattttatatctacttatgaatttatcaaataactttggtcattttataaattataatctttgttatattcatttgttgtattgttttatgcagttatgcaatgtttattgtataaacggtcatttataatacttttatatatttgtcatatttctaaacttgatacatgtcaccatatatcagtttatgcgtttgtatggtatgtttctatgtctggtacataagcgattacactttaaacacgtcatcaactgtaatgtacagtgcctagcattctgcgtgagccttcctaatgctgggcttgcactacctgtattgtaacgtttagattttttgtttggttttgttttgtttgagatgggatctcactctgtggcccaggctggagtgcagtggcaccatctcagctgtgcagtggaaccatctcagctcactgcaacctctgcctcccaggttcaagcgagtcccctgtctctgctccctagtagctgggattacaggcatgcgcccatgcccagttgatttttgtatttttagtagagacggggtttcgctgtgttgcccaggctggtctcgaactcctgagctcaagcgatcctcccacctcggcctcccaaagtgctgggattacaggtgtgagccaccgcacctggcccacgtttagaatctttataggcagtgacgaacgcccctacgaagtgtgcgcccaatatgtactaagtgcttttcacccacatcatttaatccttagaccagtttggtcattcatgtccccatttcaccaagggagaagccgaggtcagaggggccaggtagaccgcctggaccacacgcggatggccgggacgcggattcgggacgggaagcggattcgggcccggacgcggattcgagcccggcgttcacaccctcaccacgccacagcctccgtgttcctcttcgccctgctgcagccccttccttcctgtggtcacaggggacagtcaggtcgccagaagcggcggggccggggctgtccagcgcagcagggccgcccgccctcccctgcggcgcccgccccacctgtcccgcccgcagccaggttgttccgggagcgcgacgaggacaccgggaacgagggtgtgcacggtccgtcccggcctggccgtggacgtcgcgctccggggccggggggcagagagtgaagacggagacagcaagagcgacagagaagtgctggggagagaaacacggagagaccccccgaggcggggagacaccggggacaccgagacagaaaggcagagcccgccgtgcgcggaggacaggcgtacgcagggccagggccggggcgcgccgctcgcggaccccgtgtgccactcacgctgaactcgccggcgaggactgccccctcccggccgccccgcgcttccagccgctccaggaagctccgcgccgagtccaggctgcggctcatggcgccgcgggccagcaaggtccagcccggccgccgcgcgcgcggcgagtgtggacgccgcgggaggcggaggccggtgactgagtccccgcccttgcctcggcagccaatggaagcgcgcagcggcgggcagggcgccccagccaccgtgttctgagcccgcgtagccccaccccgggcgctcgggccgctgtggccggagccctaggtcctcgcgggctgccctgagcagagtccagcgccggcgcttcccctttttttcggctgccgcgcccactggtgggggggtggcacggtcccaggttcgctccctgccgcttgggacccgccctcagatcgggatccgcgcccaggggccgacctccgggtgccggctctgggtggacggccgagcggtctcgccgggccctcccgcccgtcccctgggagccaggccgcgcggagtccgagctggggcgggcagcagccttgggtggagacggtcgccgagatcaggctgcccctcgtgccagaggaccccgggtcgggggcgtcccgcgctgtgcgctccagccgggcccaagggaggccggggaggggcagccacgccgtgggaaaggccaagtggcagcgggatcttctctgtgtatttcccgaggaatttgtggttcctttttcccggatgcgctggggcaccagggtcagtcctgtgtgagcatctcgacctgcacaagcctgctgggaaacagaactgaggcactggaagtgggttctggggaacgaagagcttctcttttttgcctgccctgacactcccatcttcagaaagtgtgcagaggtcagaggagagccgccgttccagcttccgggatcaccgaggggaggctggagagaatggactggcacctgggtctcttcaaggacaggcctaggttagcccccttctcgccgaggtcggaagaattaagaggggtgtcactggaaggggcgtcagtggacaccagtttgaggtcgttgaggggttgaaaggtagcattggggcctggatgtgtgcctgagtctctgaagggtcaacaggggcatgatgtcaggtggtcaatttaattcactaggggctatcagagtatttaagggcacactttcttaaaggtcccggtaggaagtggttttggctttgctatcgctgccccagctgcttaactcagctgtggcagcatgaaagcagacaatatagtgtggctgtgtcccaaagaaaccatttatggacaaagaaatcagaatttcatgtaatgttcatgtgtcatgaattattctagtgtgtgtgtgtggcctacaggctgtcgtttgctgaccttggctgaagtgatggagcgatcaaagtggctctgtggggatcagcagctagggctgtttgatttatcgtggggtccgcaggggtcactgtgagattcatgttcatcatttatcagtttcatctttgagcattctcagggaggtaattgtttaggatggtggtgatagggaattcattggaagccagtcggggtcccttggatgttcatgggggggggggtgtcagtagatattaatgacagtcattgggaggccagtggatacttgggacaagaagtgaaagtaattgtggggccattgggatttggagtgttagtaattgaagggtccgaagagtctgggaagtcattgagagctctgctcagtgcatgatagtgactctcagtataatcattgagggtttgtggatggccatggagatccagggaggtagaatacagaagcatcagtaagctttcagaaaataaagacattttctgggaaaatgtgagcccctgagcacacatggttattcagggcagtctttatgggctagaggatctctgtccagcagcagggatcctgttgagggcctgtcctcataggctgaggtctgtctgactggtggagggcatgtcgtccagctgaaggtctggttgactaggtgggtggggtgttctctcctctggggtaatgtctctgtccattttggggagggcacctgtccttgagggattctgacctttgcctggctggggggcccaggtgtctctctggccacaggcctatttggatgtctggctgagggtctacccatctgtcagtaatctgtctgtttgtccagctgggtgtttccctgggattctgtccatctggaagtctgtccagccagggtgtgtgtgtgtgtgtgtgtgtgtgtgtgtgtttggtggtttgtctattagaggatctgagtgactagccagatgctgccttgtggcctgtgaacattaagtggctgaggctgtagtctgccatttgtacttccagctgccttgagtgtctttctgtcctcgtgttcaccctcactccaagccccaccttgttgtttaacccacctgtcctcctgacacctgaccgttcctcatgtctctccaaacatccaaactcttagcttgccctctgttcagctcaggctaggtgtgggggatgggaagaccccacatcttccagaggccctggcccaccccggcttttctctcccggaggactgccagctgtgttcttgcaatgagactcactgctgctggtggccctcctgttcacgctgccagcagcagtcttgcacagtgggagctgctggcactgctacagagaccccaagtgtaccaaagcccacgtgccatgtgccagtctgtcacctgcccaccagtcagtgtggctacatgggccgctcaacagagccaagaggacaaggtagaggaagatgcacagggacaggtgcacaaggctgtgagttcagcctgctctgagcctgcaaaggggaaaagagaaactacagtggagacccctggcagacaccccttcctctgggatgcttgcggggagctccttggagactgctggcatctccagggtacagttcttctccagcttccttttttgcttagttaaaaaagggcagagaccatcctggctaacacagtgaaaccccgttctctattaaaagtacaaaaaattagccgggcgtggtggcgggcacctgtagtcccagctgctcgggaggctgaggcaggagaatggcttgaacccgggaggcggagcttgcagtgagccgagattgtgccactgcactccagcctgggcgacagagcaagactccgcctcaaaaaaaaaaaatcaataaataaaaataaaaaaagggcagaagactggaaccaaaatgtttgagttagaattctggcaccatgactttctcagtatgaccttgggcaagtcatttaatttctatgtctcaatttcctcctctgtaggactgtgtctcttcttgttgctttattgtgagaatttaaggaaatcattgtatataaagcatttagatagaacagcacttggcttgcagtatacacttggtactattaatattattattacactgctagtttccctttctgatattgccacgcccacctccttactccctcctctaagttaaaacaaaagtggaagggggggcataaatttgaaaacattttcccattgcttcattctgttaaaaaccttcaagctgggcaagttgtcctgttggtccatccacaagtctggcatttagcaaacaggaaaaaggcaaccctcttcagtgcaagaggaagcatgtggctgtgtccccctcccgtccgatgcctgagagctctaagtcctctgggagagcttttgttcctgtctcctctaactctcctcaggcgtgccaggtttcagtgttctgaatcaaagactcctcctgatcgctccatgggaaagggtcagcagctcagcgcggtggaaagagaaagccaaagagaaagaggccaaagagaaagccaccctaccccttctcagcgctaccaccaaaccccacaacccccagctctttgtggaggctgacctgctgccctcgggagctgtcctgcaattctgcttcagaaaggaggggaaaccactaggaatagaggggaaagccctcttccccatctttaaaatgctcataccaacttttcccccactactccagggcagagcctgggcatctgcatggcccagagcaggcccccgatgtgcccctggaggaaataaactcgggcagacaagtgctctaacagcaacgctggcagcactctgggacttccatgactgacaggccgggtcaggctgctgcctcctcagcctgcagtttctacacctgatgctagcccagcttcagcatacttcctctgtatgcggtgctttatttagaaaagaccaactggccatgttattgtcagcaaatgccggccagggtcctgcacagatgagggccgtgtctgtgggccctgattgcacagcccatgtgtcatggctgagtgcagttcccaggacaaccaaagggatgcatggatccgtgtgcattgctgtctgcccatcaattataacaccagagagaaatgagtgtgcatccatgcttgggtgagtgtaaacacctctggaaggattcctataatgagggggcaccctcactgctgctgctgaccagggtgttctgaagtcctaggcaatgcagggtggcaaggagaaaggagggaggggcccatcagaaatgctaactggcatatagcataatcagctacaaagttttagaaactcttatgaaaaactgtaaggacttatgagaaaatttaataaggtagctagttaaaatacactaactaggccaggcgtggtggctcatgcctgtaatcctagtactttgggaagccgaggtgggtggatcacgaggtcaggagatcgagaccatcctggctaacatggtgaaacctcatctctactaaaaatacaaaaaattagccaggcatggtggcgggcgcctgtagtcccagctacttgggaggcggaggcaggagaatcgcttgaaccccggaggcggagtgagcagcgattgcgccactgcactccagcctgggcaacagaacgagactccatctcaaaaaaaaaaaaaaaagaaaaaaactacactaagtacttacacacaccagtttaatgaatttgaaactgtaatgcaaaaagcttccatattaatttcttgagaaataggcaccaagtttgaacccctaataaattaatggagctatgcaataatactgcctactgacatcacaaaaacgactcccaggcaggcactgagattcctaatgaaagaacataacaccctcatcaagtattactgctaaaaaaatttgcaggtatatctgattgagcctctagatctcaatattaattcagagaaaacacaacggcagacaaaaatgttaaatgacaccacagtgttaagatcagcaacatccagacggtgaaaggtctattaagacaaaccagtttcctaactgagtaaactgcaaagaaacagacaatcttatagagagactcaagacttaacacacaaatgctcatagcagcattgttcacaatggcccaaatgtggcaaacaacctaaatttcatcaactgatggatcaaatgtggcatataataataccccatgtatagggacatacatggaatattatttggcaatgaaaagaaatgaagtgctgacataaataaattacactgtgaataagcttagaaaacattatgctaagtggaagaagccagtcagaaaagacgtattattccatttacatgaaatgttcagaaacagcaaatctatagagaccaaaagtattaattaaaaaaaaaaaatcctgttctaaggctgggcacagtggctcacgcctgtaatctcagcactttgggaggccgaggtgggcagatcatgaggtcaggagatcgagaccatcctggctaacacggtgaaaccccgtctctactaaaaatacaaaaaatgagccaggtgtggtggcaggcacctgtagtcccagctactcgggaggctgaggcaggagaatggcgtgaacccgggaggcggagcttgcagtgagccgaggttgcaccactgcactccagcctgggcgacagagcgagactccgtctcaaaaataaaataaaataaaataaataaataaatcctgttctaatgtctcagcagagtctggccaaaagtagactagtggttgccagaggggctggggcctggtgggagggaggggattagagtgacagctaatgcgtatggggtttctctccggggcagtgggggcagagggggacaaaaaatgttccaaaattagattgtggtgatggttacacagccctatgaatatgatttttaaaaaatcattgatgcacagggacgggcgcacaaggctgtgagttcaacctgcgctgtgaattgtgtaatatgttgactatcgcaataaagctgtttttaaaagacttgtcaattatttgcaatgaatggacctgatgtcgatcttagtcgaaacaagcacactctaatcaaggcaagctgaacattaagtggatatctgatgatataaaggaatgatcattgataattttatgtgtaataatttttttgttgttgttgagtccttatcttttagagatatacatggaaatacatatggatgaaatgctctgatgtctgagatctactttaaaaactggtggagtggatacagggagtgggtgagctatgaagactggctcacatcaaaaccggctcagcgactcactataccatcttctctgctcttgtatgtttcaaattttccacaactaacaagatttaaaacaatcaatctagaggtgaacaaatgcatctataaggagagcagacccatcacagaaaatacataacacacaaggccagtaagtatttgaaaagaggcacaacctccagagtaactaaagaaatgcaaatgcaattggggaaacattttgcacctagtgcgtgacagaggttaaaacctctgatgatgcccagggctcacctggggagcaggtgctcacatcttgtgatggtgcctgtggagagacacaacctctactatcattttattttagtgttttctttttattgagacggagtcttgctcttgttgcccaggctggagtgcaatggcgtgatcttggctcactgcaacctctacttcccgggttcaagcgattctcctgcctcagcctcctgagctgctgggattacaggcacccgccaccatgccaggtcaattttttgtatttttagtagagatggggtttcactatgttggccaggctggtcttgaattccggacctcaggtgatccgcccgcctcagcctcccgaagtgctgggattacaggtgtgagccaccacgcccgaattcctcttgtagggatgtatgcatcagatacacttgcataaatatgcacagaagtatgttcaatgatgctctcgaagcagtatttgtgggggtaaaaacaggaagccacccaacaatgtagccacaaggaaggaggcagatccatgtgtactagacagccttggagccctgtggcatccatttgtcattaaagggtaagatgcaaggttcagagtagtgtgcacaacatgatccctttcaggttaaaatataattaacagtcaacaaacttatggataccatgaataaaagatatcagtccagcttctttaaaaagtcaatactgatgacctctggagactagggatgggttctttggggtggaaggaggatgatggtttacttttcaccatgtgcacttgtgtgtgtttttaaaaatgttttgtagagatgagctctccctgtattgcccaggctggtctcaaactcctgacttcaagtgaacctccttgccttgacctcccaaagcgctgggattattacaggtgtgagtgactgcaccaggccttctgtatgcttttttatcataaggatgtcttccaagtgtccgcctgtacccccccaaaaaatgggcagagaactcaagagggcagttcttcgtggtcaagtggatacaatgttcacctgctaacattacagtaaagaacctccctcctccctgggtacccagtgcaccagcaaggagttcagccttctggggatgatgcagcacatacatgcaagtgcagggccctccctgcctcttttgcacactgacagcatatcacacatggcgtttcacaccatgcttctttgtatttaatgtctatcttgaggagcttctcaatggctatatctacagagtgggaaaaactatttgcaaaccatgtatctggtaaagggttactatctgtctcaacttgggctgttctaacaaaataccacagactgggtagcttaaacaacaggcatttatttctcacagctctggaggctgggaagtccaagatggtggctccagcagattcagtgtctggtgaggggggcttcctggttcacagatggtagcttctagctgtgtcctcacatggcaggaggggcaaaagagctccctcgggcatcttttataagagcactaattctatgcaagagggcagagtcctcaggacctaatcgcttccctaaactgttgaccttagggatgagagttcaatatacgaatttttgggggacacaaacattcaggccacagcagtatccaaactatataagggactcaagtcaacaacaaagaacaaatgacccggtgtatgcaaaaatgctcagtatcaccaaccgttagggaaatgcaaatcaaaaccgcaatgagagagatcacctcatacctgttaggatagctgttattaaaaaacacaagataaagaatgttggcaacaatgtggagaaaagggaaccctagtgaactgttggtgagaatggaaattagtacagcctttatggaaaacagtatggcggttcctcaaaaaattaaaaatagaaccaccatttgatgcagcaatcccacttctgggtatacatataaaaaagagatgaaatcattatcttcaaaagatagctatactcccatgtttactgcagcatttccacaactgccaaactatgaaaacgacctaagtgtctattggtggacggattggtaagaaaatgtggcatgttattttttacaaggaaagaaatcctatcatttgcaataacatggaggaacctggagaacattatgttaatagaaataagccagacacaaaacaaataccacatgatgccacttacatgaggaatcagctgctgagcactgggtgtggcctgtcccctccgcgttggcacactggcggcttccactcagtgagttaacttggtgggctgcccctgacacaggctggccctgctacccacatctgcctgctgaagagctcatatgaccctcactcttgaggggacgttagcatcaaatctctctctctgttaacccccacactgactccaggcccaagcacgtcccacagccatcaggtccccacccaaagggatcccatgggctttgccctgcagacttggcctgaccactcagaggcaggcggggccatgacacagacggtttattcagacctctccacccgccacagttccacatcccagttcagcaggccattctgtgacagttcctactggtgggtctgtctatgacagccccatcctgagttccaagtccatgtcctgactgagtggtgagtgtgctcactcggtgctcaggaagactctcttgcgtgcggtattggtgtaagggtgccagcgccactccacgtctgctgtggcctcctgctccagcgtgcccagacggatcatgtacactgcaggcagggatggcatcagccccggcacagccagcctcccctccccaccccagacacgggattcagcctcaaactcacgcttcagctcaaagcggggcccgacctcagtgagctccacgttgcggtggtctgtcttcttatacacatggtgcctgggagggaacagctgtgggtcaacggcaagcagcacgaggtacacagggtggggatgctttcctggggcatggcccgtggacccaccggaatgatatgtagtcgtcctggtttgcgaaggtgatgacccggtggctgtcatctttgggcacgggaaataggtatcggaggatgtcagagacctggggcacaaggaaagagagggaaacagagtggcaaatgcctggcctggcccgcagccccagcctgaaggcccccagactcacccgcttgcccaggcgggaggagaagccgtgtgtgatgaggtggggcttggcctccgacatggtgcccaggtctgggatgtcatgccgcatgaccacattgcacagcgtgaagtaggcagtaggaccaaagggcaggtggctgacgatgagccccactggcggggaaaggtggctgtcagagaccccgtctgccctcagacggctcccaccccgactccctccctccggccttaccaggtgtgccccgatgctcgtgaacgaccagcagatcggtgacgccgttggctttgcaggctcgcaccagtgcccccacttcatgtcgacctcggttcattcgctgggcgcccgggaacaccagcttcagctcctgggcgtggatggcagtgtacagtcaggactggggctgtgtgtcctgggtgtctctccctcactccctgctcaccagtacctttgcaaacatcttgaggcgggaactggggtctcgggaggtagtgatcataaccttgggatcctcgactcctgcccatcggtattcatcatccacgtggctggtcacacctgtcaggagcacgaggggcaagaacatgacagtcttgggaatgaaatgctaacttcggggcagccaagaccgcctggatgtcgctgtctgccgaagccttcaacaataggaatgctccacatgcacaccgggcaagagggcagcctccaactactctggctgctgagcacaagcgtggctgagaaacagaatcttttgtttaattgtagtttgcttaagctatattagtcacatggggctaagcagctactccattacacaacgaaatccacactctgctaaggccaacggtgacaaactcttttccctcgtaacaaatatctataatgtttgggattcctttcttgtttcttgaataatgcagtgaataaacgtatgggcaccaataatgtgtgagggacactgtctttccccagcaggcactccagtgggggaggtaattaacaagccaggtgcagagtcagtgaggcactcccatgtgtgccatgtaagtgggacagggcacactcagggagagccctgcaatgccatctgtgcagtgacaagggcatgggggacagttccaggagcagtttcctctgatgggatggtgcccggtgtgtctgaggaaggactggagacctgccagctcagtgttggggagggctaccttgtatagttaccttcacctccagcatcatcaaactccagggacccctgtaaggccagagcctctcggcgtaactcagtgggaatcaggcggttttctgcagagggaagagagaggggctgagtgagtcacaagcatggagacctcagctcatccaatacaccacagcttattagcctgcacatgcttgaaataaaaatacctcagccctttctgagcttggataaagcatggatagaggtgacaaaactttctacaggccaacccccataaacagtggttactaggacttcattttctttagtctcatgacttgaggactttctaaaatatcttaatgtactgtattgcttttataatcaggtagaaatctaaacatcgattttttttttttttgagacggagtctcgctctgtcacccaggcagagcagtgcagtggtgccatctcggctcactgcaagctccgcttcctgggttcacgccattctcctgcctcaggctggcgagtagctgggactacaggagcccgccacggcgcccggctaattttttatatttttagtagagacggggtttcaccgtgttagccaggatggtctcgatctcctgacctcgtgatccacccgcttcggcctcccaaagtgctgggattacaggcgtgagccacagcgctcggccttaaaaattacttttgaaaagaaatatagactgttctgtacgtatgatggtggaccagagacctttaagctctcagacagcaaaaccgttggtcacgatgcccacagcgcttcgaaggcatggcttcagcgggccctggaccacaggctgcctaccgcagagcacagcgctccaggtgcgcactcggggccagcactgttccccacggagctcagaggaactcctgcagggaggatgggcagcgcagtctgcagcaccagcgctatccagatagtctttagagagaatttctttttttttttttttttgagacggagtcttgcttttttgcccaggctggagtgcagtggcaggatctcggctcactgcaacctccgcctcccgggttcaagcgattctcctgcctcagcctcctgagtagctgggattacaggcgcgtgccaccacggccggctaatttttgtatgtttagtagagacgagatttcaccatgttggtcaggctcgaactcctgacctcatgatccgcccgcctcggcctcccaaagtgctgggattacagcagtgagccaccgctctaaagagaatttctacaggacaagataaagtctttaaaacttgggacgaacttgacacactgcacacagcgggcaagctgcaaaacccgggtactgcaacgtcagtgacaagtaattaataccatcacacggaagaaacactctcaaaaccaacaggagaacccaatgggcaaggaaaacggccggcaagcatttggaaagacgctcggatattcgaacacaaatgcgtgccggggtggtttaccacgcagacgcccgcggggccgatgccttaccttccagcgcgcgccgcagccgctccttcctctcctgggctgagcgctgcgcctcctcccgggccttgcggtacaggtactcgcggcgcaggcgggcctcgcggcgcagctgtgggaacagcaggcccagtcactcactactcgctcccgagccccggaaccccggagccccggagccgctgagcctccaagtccccagagccacatccccagcacttcacgcgccccggacctccgaaacaggagctcattctcctaccatcttgagtgccgcttccacgtgggtccgggagaatctgtgggctcctccagcgcgacacagtcctcacttccgccctcaaccaagatggtcccttagacgcttcactggtgcctgcagctgtggggaatgccctatgttaagatggcgaatagggcggggacatctcaaggcgattggccattccggcagggcgttctccttgggataaccgatagactggatacagaatgtcacacgtgacttaggaccgcagctaataaatatgtccgcccaggcttctccatcctcgtcctccccccaccaccgccgtgcagaatgcagttttcagatgacgaaccgctaaaacaatcataattagcggctggaaacagttcaactgtaaaaaccgcacaccgactgaaggttgcttgccggctcctttccaaattaactttaaaaccactcttccctcaaccaaaatggtttctgtagagcttcgccttcttccatcgccacaacagtggcgcgacttctaagattcggcagcttccggaaggactcagaaccacctataaccctagccgacagttcagcaggctgatccacttgggggctaattggagaaaccagttgattggttgcttccgtgctgcttctctaagggcgcttgcccttaaagaagctgacccagaggccttggtgctgccggcgtggggatccccagatgggaacgccccttgatggaggatctcgtgtgcctattggctgtcctgccaaactgcggagggtgacaaggaagaaggtggctccagatctggaggtgtgtccatggcggcgcttgacctgcgagcggagctggattcgctggtcctgcagctgcttggggacctggaggagctggaggggaaacgaacggtgttgaacgcccgggtggaggaggtaggcgcctggggcgggcaggagggtacacgggcgtaaactgagtctcaccgctttcctctccctgcagggctggctctcgctcgccaaggctcgctacgcgatgggcgccaagtcggtagggcccctgcagtatgcttcccacatggagccccaggtctgcctccacgccaggtgaggaagcttccatgctgggctgggtgggcgggcgggcgcgttctaggcccgggctgccaaagctccatcctcccttctcgtccttcagcgaggcccaggagggactccagaagttcaaggtggtgagagctggtgtccacgccccagaggaggtggggcctcgcgaagcaggtgagccccctcttccttctgcagaaccccttcccagtgtcaaagacaaaatgcaaattatggagatgatttaaattaggtttttgcgataagagagagcatcccagagcagaagaacagaatgtttttgtagggtggttttgccttagacttttataggaagtagagaaattgttggtgagttgctttacactgggaatagatttacaatcacatacatttcagtcagctgaacagaaaatatttatctgtgtgtctagctagtttcagagggacaaacttctaatcccagttaatcatcctgagacaaagaatggggagttggaacgtctatgtctggtctgttggcatgttcaggtacaatgggtaagatcagtgtcacaggcaaacagggtcatcagtgggtcttacaggagtcacgggaaagagtggacaaacagtctcatctgaatcacaaggggaaaggctgtgttttgtggtaagctgtttcctggaaccccaaagttggaattttccaaccaacagtgttttatagaatcatgagctcagatcaagctcaacattgtcaccaagatgataaaggtcagggagtaagatcccagcctcctccaacctttctttcctcaggtctgcggaggcgcaagggccccactaagaccccagaaccggagtcctctgaggcccctcaggaccccctgaactggtttggaatcctagttcctcacagtctacgtcaggctcaagcaagcttccgggatggtgagtggaccgtgttgtttggctctgtggccctcagaccctctatccacagggaacacttgagcactgctgccatggctggggttagtctgtgaaaggctttgcaggttttcctccatccaaacttccgttgtacacccattattttttccaaaagcatttactggttgttggcagcattcgggttcatgctagctgctggggatacagcagggaacaaaagagacaaacacttttcatgtaatgtttagaagcagacaaaggcaacgtgcaaataagtaggcccttaacataagtcaggctgtgaaaattgttatgaaaaacacataatggagtgggacaggagtgggccaggggaggtctctctgaggaggtgaaggaaaagctttgtgggtgattttggggaacagtgctctagatggaggaaccagccaggacaaaagccctgaagccagatatatctggtatgtgccgaggccggtggcctagagtggagtcaggtgatgtaagccctgatgaagactgtgggacccacagagaggctctgagcagaggatggtgcaactggctgtacagggtcacaggaatgcttgggtgctgggcggggacacagagcagagggaggaagtaggtgtcagggagcagccagtgtgagaagcagatagcgtcactggaggaggaggtaagtggtgggaacctgcacaggttttaagaatagaagccccagaatttgctgacagataagatatgggagtaagggaaggaaaggagtccaggagagcctgcggtctccacccagaacccctgggaggatggagcgaccctcacctgctgtgggcagctgagaggattccagaaggcaggagttggtgtggtctgtgtggtatccaccgacgccctgctggagagtctgagtgggcacttgggcacatgtatctggagtttgggagaggcctgggctggagagagatttgggagtccactgcatagcactggtgtttaaattccaaagtttttgacacaaacactggtttaaagctgagataggatgagatcagcagagggcctggggagtatggacgggaggtgagggagaagaggggagaagccagtcaaggaaactgaggagcaacacctgggggcaggtgtcctggaggccaagaagagaaagtgtttcctggagcgagtgatccaatgtgtggtcagccctgctgctgaacaggaggccgaagacgagagctgcccggaggactgggcagcagctgttccagcagagacatcagcaaaagccatctagaggtggatccagagtgtggactaacagagaaaagaagtggagggagagcaggtgagggcagagagatgctgtaataatgggggaaggaaggaaatgagggcatgaaatggtattactatctgtgaatttttagttcctggtgggtgatataatgggtccaggaagtctaaggaggtgacattttagcaaagacctgaaggaggtgtaaggcctcagaggttctggagcagccaatgcagggccgtacctggaatgttttgggacaagtgtggggggcagagaggcctgaagcctttccaatttctggggatatccagatcctcctgggtcgtgtgttacactacagataccatggtgaccttctctcctttcctccaggcctgcagctggccgcagacatagccagcctccagaaccgcattgactggggtcgaagccagctccggggactccaagagaaactcaagcagctggagcctggggctgcctgacatgcgcgcaaagaggcagggcagcgagcacagctgttctccgacatggctacgtgatctcaggccttcttccttcacaattagctcttgcccctaccccacgccagctaatgccccttctgtgtccctgctctgcatgtttccattttccttaggtgtgaagtttgaagaggcaaacagtaattttgaaagccactactttgaaaccattctaaggcctgagttcccataggacacactcacataggcaggtacacgttagtcaacaattggaactgcctcttggatcactcagctgtgctttcatggctggatgatggaacactgtgcgaagagagatgggggccaggaagtagcgcttcatgcttagtacatcctccaaattgtctttgctggaggagaaaaccgtactcagccaaaagatcaggacaatatgacttgagtccacaaggacacaaacacctgagtagctgggcagcccttggcagggtctaagccaggaagtaaaaatgatctggcctagatatttaagggaactctaggaagaggcctaggtttttaaaatcctgtctctttgtcttaccataagaggctgagcctctcttcatttttttgaagggccacttgtgttttctgttctgggaacttcattcatttttctactgggttgttgatctttgcagtaatttctaggagctgtttatgtttggaggtaattggtcctttgtccatatatatgagatgtaagtcttattttccagtttatctttttgcttattttttttgactttttattgtaaaataaaacatcaaactgcacagaacagttgaatagcttaatgaataactacagtaaaagctatggtaaccactacccaacttttgtgttttttgatcattatttgtacgtacagttgaatgtatccagctgtcacatgattctgaatttgggtttgtaactgataaggcaatcagggaattctccagcattttcaagaacctctgtggtttcagttgaaatgtccagtgagtcatgtccagcttttccaccatcctcccacgtgctgtatgtcggttaatgctgcccttttgttttgctaactcccagtgtaaacctaatgtaatttgggggttttcattctgtttcgtggacattactgtcaatacaccagtaccacattgttttacttcttgaactttaacataatccctgtatggcagattcgcgttgggttgaggggtcgtttattggccctgttgaccttgagttgccagggaaaagactaatgggggaactcaaatggaacccctgtgactgcaggaaaaacgggtatctgcccccaaacctcaccaaaggttgccttttgtaacaaagatcctatccacaaggttccagttagtgagattctgaagccaaagtaaggaaaaaaataagtcaattttgctggggccacaaattcttccaggaggaggtgcgaccccgtggagcacgcccttcgctgctgattgtgggcggacactggggtgggcacgtgcctcccactgctggcttggggctggactcacaggtggccatcctcctatcagggcgaggccatgggctctgcaaatagggttggatgaagacagcaaatctttagcaaagcatccttaacttgctgccctgaccttctgccctaactccagctcttggggagaccgccaggaaaggggattctggcttctgtggggaagtggcttgtcccaccagggctaagtcgagagactgggttcatgcagcgagtctggcacggctgcagtcatacgagtttctacagggacagcaggagctcagtgctgcgcagtggtagttgggaggcgctggcggtgaagctgacgcatgtcacgtatacagacacggtggcgtcacctttcagcagttcccatatggtctagcggttaggattcctggttttcacccaggtggcccgggttcgactcccggtatgggaacaaaagtggcttttttttttttttttgcgggtgtatatttttttctttcaacttgaaaatgttcgccagaagaactttgacttttcgccactagaacgctccaggccagattgggtatttcctcttcacttgaacttggagaaacaggcccagggagatccgggccccatcgctgtgtgttttgatggcagtgaccattttcatcatgacattagctagttgttttgaccatcaatagcttactgagtatattagatgctatatacatcgcagatgtgaatattagaagtagtgaaatgcccgataacattgaaaatattcaaaatgtgttgctgtggaacccccagcagaaggcagatccccactggcctccatcacgctccagcgcacttgctcaggttggcaggagccacctcgggtccgtgagctgcctctgcaaggcagggataggaagtcctaggaagtctactgggagcatagcactctggaaaaatttacctttctctcttgctgctgctttgttttgtccagtagtcagggttcccgttttctcactgggacagtccgggcttgactccactcccccagcagaaaaccaacttcaaacttcaatgatgccttcgtgccagcacacaaacacatgtccggtggaaaggagaacccagctgggtgaggcggcagcttcagtcccagctactaaggaggctgaggctggaggatcgcctgagcccaggaggttgaggctgcagtgagccgaggtcatgccagtaccctccaacctgggctacagagtcagacctcttaactaaaaaagacattgttttttggcttgctcaattaatccagggagattgtatgtaaggctgaggtcatgtcttcagcaattactgccacactcattcattcattcattcatacctttgttttttataattatcactagtaagcataccaatgaaaatttttgttctggcacataaagagcttcaaaatcatcacttccatccttacaacaagaaaaaagctgaacgaactggaaaatcaacaactcttcgattcctcagaaaattgaggtcacgtggcaaaccactcccctgaaaatgagaaggaaaggcaaatacagagctacagcttgccaggcacagaagctgctgctgcagccagcaacctgtaggaaaacttaaagggtaactgactaactgctagagcctgggcatgtaagcataagagagaaaagatgctggggacatagccttaaggggcccccacagtctcatgggttttagctccaggaattctatcttgttcttgggtgaaaatcagagaaaaatctgctggagcttctggcaaggggaggaaagtgtaaccactttgaaatgcacacataacgtcctgtcctctttaacaaaggcttaaagtcagagcaactaccagagcctacccaacccaagggaaggaaaatatccacctccagtctgctttagtcttccaactcacattaaaaaaaagctgagaagcacttgtgagtggcacagcctagggaccactggttcacaacaagactgggccctgatcatgggtttatagaccactccctgctgtccccacatcttactgccacatcacttagggctcctatatattaacaagggattgcagctgaaagaactgcaaggcccagaatttatgtaagaagcagtctctagggaaacccaaaggcaacaggggatgcaaaaacaaggacactagaggaaattttagcctctgacatttacagctacagcaaacaagaaacacagcctccctccttagtcagataaatataaaacttcacactaaaagcctatttacctcagttcctctcaccttatgcatgtttggctttcaacagaaaattacaagatgggagataaaacatttctgcagcagaatgcctccatcagccagttgcctgcctgtggaattttggaagccccatggccttcctttattccattccatctctgtcccttagattccaggctgccatgtttctactgctatcagaatctcaaaacctttgtctcctgcataattcatggggtttcagccaacagacaaaggggccctccacagatctttccttggtaaccccatctctatttctggcttctgctgaggtggtggagtggttccatgagtcacatgtccaatctctttagcaaaatgttatccagccacacccttggtcctctttccagagtacactttctaacagtgagtttcctaatttttgtagtctttgtaatctggacatcccgagagcccctaaatcattaagtgccagctcctttctgcttgactgttctttgctcgatgtaactttttcctctcacagttcctattagcagcaagcaggttgtaccttcaacacttccctcaactaaatatccaagcgtttaatatccaagcttattatttatcatgtctactttccacataacaacagaacacaatttagtcaagttctctaccactttataacaaagatctcttttactcagctgtcaaagaatatgttcctcatttctttctaagacctcaccagaggcacctttaacattaggtttctactaacattctgttcatgacaatatatgtattctctaagagcatcagtcctcaacctttttggcaccagggacaggggctggggggctgggaggattatgggatggcttcaggatgaagctgttccaccttagatcatcaggcattagttagattctcataaggactgcacagcttcgatccccagcatgcacagttcccaatagggttcatgctcctatgagaatctaatgccccgctggtatgacaggaggcggagctcaggcggtaatgctggatcactggccgctcacctcctgctgtgtggcctggttcctaacagccagggacctgtaccagtccttggcctgggggttggggacccctgctaagaggatagaagcttctctacagctcttctcacttccttctgagctttcattagagttactgtccacatctccatcaactgtttccttaatggattctaggctttttctatcacgtgcctcaaacttcttccagcctctccctgattccaaagctccttccacgttttagttatttgttacagaaacatcctacttcctggcaccagtgtctgtattggtttcctaggctgccacagtaatttaacacaaacttcataatttatcctctcacagttatgaaagtcagaagtctggaatccaggtgctggcagacctgtgtgtcctctgaaggctctagggaagaacgcttctctgcttgtcctagcttctggtggttctgattgtccctggcactccttgagttgtagctacatcgctctgatctctggccccatccttcacgtggccttcttctccatatgtatccacgtgtcctctccttctcctgcaagaacagcagtcactggatatagaacctactctaagctgggtgtggtggctcacgcctataatcccagcaatttgggagagcgaggcaggtggatcacctgaggttgggagttggagaccagcctgaccaacatggagaaaccccgtctctaccgaaaatacaaaattacctgggcatggtggcgcatgcctgtaatcccagctacttgggaggctaaggcagaagaatcacttgaacccaggaggcggaggttgctgtgggccgagagagcgctactgcactctagcctgggcaacaaaagtgaaactccatctccaaacaaacaaaacaaaacaaaacaaacagacaaaaaaaaaaaaaaaaaaaaaaaaacacacacagaaaaaagagcctactctaatccagtacaaatcaccttaacttaattacatctgcaagattctattcccaaattaaatcatcttctgaggttgtgggtagacacgatattttttttctttttgatggggagacactgttcaacccaagacagagcacgtggagggacaaactgcaaaaacagtggattcctataacaaagttttaaaaatgctgccttgacccacttttgaggccctggctagaggtcagtttcccttcttgggcacccgattaagttcatacttgcaaccactggactctctcactctgagctaatcaaacccctccccaccccataacacgtgctctctcgggaactgtgagtaaaatgtttcagcgtcactcatgtcttatcttttcaatatcagtcatttcctaatctgaataatgttacctaaataataataaaacctattgaagcagcgggcccagcaagcagggtggtttggtgggctacaatgacggccactaggccgcccttgcttacagactggccccaccaggtggcagcaccagtccggggcacagctacgttttgccgtctaacgggtgtctggtgaatctcattcctaaattgtgaaactttgagtcatccagagtttctcctaaaccaaggtatcaagtgcttcgggcagctcaaattaattggctacttctggttgtcaaaaaactccacagaagcgggcaaggagtgaggagggggtgtggctctcctccaggtgccatggagccggctgagtggctccatgtcaggcaacgcggacacatggctggcaacacaatcactctctacggcccattccaccttacggcgggagaccgcactgccaggacggcccagggcctggtggctcacggggtcggtgcgccagcagcctcttccgggatccaccgcatcccgcgagtccttgatagtatttgtagactgctgtggtgttgtctgccttgatgctgtcgcagtttgtccctcgaaccccgtgcagtacaagggctcacacccacggagaccgctggcacagtgcttaataaaaaatgaaggccgggcgcggtggctcacacctgtaatcccagcactttgggaggccgaggcgggtggatcacgaggtcaggagatcgagaccatcctggccaacatggtgaacccccgtctctactaaaaatacaaaaaattagctgggcgtggtggcgggcgcctatagtcccagttactcgggaggctgaggcaggagaatcgcttgaatcggggaggtggagcttgcagtgagccaagattgcgccactgcactccagcctgggagacaaagcgagactccgtctcaaaaacaaaaaaaacaaaaaaacaaaaacaaaaataaaaaataaaaaataaatcaaaggggagggaacaccttcttcctgccctgtccgagacccccaacaaggaggtcacacagttgattccggaatgagaacccctggactctggcctcgcagagcagtgatggttgggttaggttggtgaaagtagaaatgaagaaatgtgggtgagttcaagagatactgatgtagtggaattagtgtgtctttgcaatgttttggatgtgaggggtgaaagagcaattaaagctgttttccagatttctgcctcatgcaactgtttgtgcctttcactgcagaaactggagactaaactggactggaagtgcgtagttttttcgtttttgttttttggagataggatcttgctatgctttccacgctggacttgaattccaaggctgaaaggataccatcctccacctcagcctcctgagtagctgggactacaggtgtgtgcccctgtacccagcttcatgagtttagttttatacatgttgaattttagctatcttggttaaagatttcaaggtagaatatgtgggtctgtagctcagtggagaggctggttatgttggttatgtgttccatctcgatgttgaagttactgatcctttcagggaggtcttggaatgaagaggaatactgagctaagtgccagagtccctagtgaatgaagaatttaattagggtatttgttagatggcacaacaaagggggttggatagaactttggttgaatggtttggtctcttcacaggaagactgctttctacaagaggatgggttagtaacggtctggaagtggtgatgggtacgaagagctcactgcttcaccctcaagtgaagaaataacacttgagaggatttaggaaaggtagtcttggcaggagagagccaggttttaatttgaggaggtcaaaggaatgctttagactagttaagtatatgaaagtttgtataatggaaaggtttagggactgtcagaagatgaggtctctgcctttctagaaagcatattctcttttccttactatttatgatgcacaaattatttacactacaaaaccaagcttttataaatttaaatctatagatttcacatttttaaggatatataaagtttctatagctttacccattgagtttgggttttgtttcccctacatttctttctttctctttcctttccttcctttttttatctttcatctttctttctctctttcctttctttctccttccttccttccttcctccatttttttgagacagggtctgccctctgtcacttggactagagtgcagtggcacaatctcggctcgctgcaacctctgtcttccgggtttgagtgatcctcctgcctcagcctcctgagtagctgggacaacaagagtgtgataccatgcctggctaatttgtttttgtattttttgtacagatggggttttgccatgttgcccaggctggtctcctactcctgagggtcaagcgatccacctgcctcagtctcccaaagtactgggattacaagcatgagccaccgcacccagcccacattttctgctttttatgtatctgcttttctatttcaggactcatatgaatgagcaaaacatatcttgaacactcatgcaaaagagtgtaagaatctagcagaggctttattggcctctgagactttggatgccaaagagattcaagttgttcttgaggggaagaaagaaactggaagtgagataactctcttcttgatagggatgtattactagtttcattgaagaatggaagcattagtctctctttggcaatgctttcccatccattcttgagttagtataattcaagggtgtgagatactttgtcagtctattgtcatgatgacacctattgcaaattagcaaccttgcagcatgcatatttaaaaaaagaacaatcaggatttagaacagcttatttgagaaatgtcagtcataaagttgaaagaaatgattttatggttggtgactctactagatgcgaataaaaattgtgcccttagctcttgggaagcatttttaatttgcaagctaaaattgttgaaggatatccattatctcttgatattaccatttatcttttataataaaatattatttggttgttggtaaatcataattttatgtacatcaatggaaacttaagatgcagtaattgtgcttcaaattaactgcatataaaatgtttaaatctaagagtagagagttgtaattcagttacaatcagaatttaaatggttataacattttaaaatggacaataaaaaaggcagaccataagaagtaccgtaaaagatgtggagaaactataaccctcatacactgcttgttagaataaaaaattctacagtcactttgaaaaccacatccatttagttataagcatatttcttaattttaatgtgtcatgttttaataaaatatgtcggaataaagactttggattgaaaaaataatactgagtagtggacatgatttggagagttggtacctttgaaacaaatattttatttctatgcaaatacctttctgtccccactctgttacacatgaatccttattttagtcaggaatataatctttccttccctttcacaatagaaacttaattaaattatatataaaagcgatgttttctgaactacttccatcttccatcaccatgacaatataacgggtggctaatctgttatgaatgtgagaacgcatttcattaaaaaaattactaagttgccaaacagggagggtgggaggacacttatttcttaaataaatcctacttcagagagcttgctgtgaatgttctgcttctggaagcaggtatttgactcatccaggaaatcaaggctgagagaagggctggtggctggtgagctgctttgtctgagaaagggagaattgttactgtgttgagacttgtctgcactctccgaatttgttttggcaaagaatgcttgagtgtttacagaggcccagatgttggtcacgggcaaaagacagtgagccattatggggagggaggatccattttaaatcccatgtgaaagggcctattaaaggtgtgaagaggcctcagaagagtataattcaaagtggatctctggatgccttaggagctgtgagaaaacaaaggccaggatggagtgcgttcattcaggttaaagcaattggaggtgaggacacccgtgggcagagaaatactcctgagagagttggttttaaaataaatgctgtgtctggaattggtgggttcttggtcttgctgacttcaagaatgaagccacgggccctcgcggcgagtgttacagtttttaaagatggtgtgtctggagtttgttccttcagatgttcatatgtgtccagagtttcttcctgctggtgggttcatggtcttgctgacttcaggactgaaactgcagaccttcccggtgagtgctacagctcttaaaggcggcgcctctggagttgttctttcttccagtgggttcgtggtctcgcgggcctggcctcagagtgaagctgcataccttagcagtgactgttacagctcataaaggcagcacggacccaaagagcgagcagcagcaagatttagcacaaagagcaaaagaacaaaccttccacagcaaggaaggaaacccaaacgtgttgcccccactggctcgggtggcacagacacagagtgctgattggtgcgtttacaaacctttagctagacagaaaggctctccaagtccccacccaaccagaagcccagcaggcttcacctctcaatggcactggctgcgggactttgcggcacctagccggggcactcttgcagcccagagggagcccgtcctccaatcaagcccagcaggcgcccgacggcggcgcggagtgcagggcagcagaggcgcgcccaacccggaaccgcgccagccctccagcgccctgcgcagcccgggctcccgcccgcgcctgtccctccacacctccccgccagcagagggagcgggctccggccagaccccgagaggggcccccacagcgcagcggtgggctgaagggcttctccagcgtggccagaagggacgccgaggccaaggaggcgccgagagcaagcaagggctgctagcacattgtcacctttcaatgccatataaagattgctggaaattatcttacaactgttatcagtcagataagaactcaaccaccctttgcaaatttgactcttgcaggatcagaaaccataatttggtagctgagggagggtggatggaattagggaagaagaactgtgcctgcctccttcccttactgcatgtggccagactgcgacaggccccagctgattaactctgactttggggctttcttttttccccgagacattgtctcgctctgttgcccaggctggagtgcagcggcgcgatctctgttcactgcaagctccgcctcccgggttcacgccattctcctgcctcagcctccccagcagctgggactacagacgcccgccaccgggcccggctaagtttttgtatttttagtagagacggggtctcacggtattagccaggatggtctcgatctcctgacctcgtgatcctgccttgacctcccaaagtgctgggattacaggcatgagccaccatgcccggccgactttggcgcatttttatcattacgtggggagggacagtctgtttcagtgctttgtcaattaaagcagcactgggttttttatattccttgagaatcatgttttcagcctgggcggaagaacatgtacatatttaattgataagggacagtgggagatgatgttgccttctgattccccttgcattctgctgaaagctttcctatctgattatgttaaaactcaggaatgaccttgtgagagcctcattctttgtccttcctctcatgttggttaactcaggttatagccttgtttttgtttagtgtctctctgtatttctctcctcggtatgctgttgtaccttagtgcaagggaaagactatccctctagcttttttctgtttaggatgtatttccagctgctttctctgtttcttcacaatgtttgatttgtacttttgtaataaactgttctataatttattgtgtctatttctgccttccccacttgcggagttccaggaagcttcttttgaacacctttgcatctctaaagctaaatggagtgctttataggtaggtacctaatacattttaataggtattcaatagatgaaatttcctcattctctcagcatcaggcagagcattagaatagagggatcagactctctgaggagggttaaaaaatgctgcagagaataggagtattaagtgcctttttcatctctgaaaatatcctggagagtattgtagtaaaaagactggtgggccaggcgtggtggctcacacctgtaaccccagcactttgggaggctgaggcggacggatcacttgaggtcaggggttcaagaccagcctggccaacatggtgaagccccatctccactaaaaatatacaaaaattagccaggcagggtggtgtacccctgtaatcccagctactcgggaggctgagaaaggagaatcgcttgaacctgggaggaggaggttgcagtgagctgtgttcgtgccatcgcattctgcactccagcctgggggacagagtgagactccatctcaaaaagactggtggaatgccttcctgtaggggaaagtctgacttctttttaagaaaaagaaaaaaaatataaggcaagattgtgacccaggataagagtatctgtcacacagaaggatctgtcaaatgagtgaaaatttaagatctctagcatgtgaaattctaaggtcttctggattggtttcatagaagaagcactttatccttgctcaaccagttagtgtcatttaggttcaaaatcatatatattgcatacatttattactaatgaaagtctcttagaattcaaccttatgggacacagagttacacgagtcttttgtatatgtatttcttttctctttttttttttttttttttgagatggagtcttgctctctcacccaggctggagtgcaatggtgcaatcttggctcactgcaacctctgcttcccaggttcaagtgattctcctgcctcagcctcctgagtagctgggatttttggtgtgcaccaccacacccggctaattttgtatttttagtaaggatgggggtttcaccatgttggccaagctggtcttgaactcctgacctcatgatccgcccacctcagcctcccaaagtgctgggattacaggtgtgagccaccacgcctggccctgtatatatatttcttaatgctgaaagccttcagacttaactgtaagactagaagaggatgttgatggacttatagtgagtgaagcagaagcagcagcagttaaatcaaactcatcttaaagacctctagttagtaatctcatccatgtcaatttttttttacaccaaatttgcacagttaaaacccacaggttccataaattatgtgatagagaccatgtaattaaagtggatgatcatgtttttttgctttcctttaggaagaaagtagtatttctgggttttgtttactgaacacctaaatggaatttttaaggtgaattgatataccattagcaatcagatgcagacttttttggagttaaaaataatgaaatggagtatttcatgttataaagaaatgaaaaaacctttaatattttccagatcttatgttctctctctctatatatgtgtccaatatatacatatatatattccagatattatatttctctccttagatatatattgtccagtgaatctaccaaatgagcaaattaaaaggagatggttttatgtttcagtagatgggtgtctactgagtagggtctatatttaaataaaaatggttataatgcaaaaaagcatggattatatggattctgagggagatgtatgtatagtgagaacgtctctgtggttgccctttattactgaagaattatatataagtgaacaattttacttaaatgtgcttatcttttatgcttcctcatcttttctgctctgcagaaatgattttagactctaacctcatatattttgctactgttgtcctggagcatgttgacaacctgttgttcttaaaccagagatgcttgttacttctgtgtaactctcttagaaatcataaaccagttgatgaaagaggcagaagtgggataaaatggtagaagaagggagacaaattagagaggaaatgtgagaaactggctgttaaacagaattcccaagaagaaaaaaaggaatctttgtattattttgaaaaaaaactcccacagttatcaaaaaccaccatcaaccttagccaaaaatatgaagtgactgaatgcttatatgaaatttgtgaactttaaagtagtttttatcaattctgtgaagaaagtcattggtagcttgatggggatggtattgaatctataaattaccttgggcagtatgtccattttcaccatattgattcttcctacccagagcatggaatgttcttccatttgtttgtatcctcttttatttcaatgaacagtggtttgtgaatatccaaataaacacagtaagaaatgacaaaggggacattaccaccaaccccaaggaaatacagaaatccatcagagactattgtgaacacctctttgcacacaaagtagaaaacctagaacaaatgggtaaattcctggaaatatacaactccccaagagagaaccaggaagaaactcaaaccctaaacatgctaataatgaattcttaaatgggatcaataataaaaagcctaccaaaagcccaggaccagattgattcacaattgaattctaccaaacatataaggaagagctggtaccattcctactgaaactattccaaaaattgaggagaaggggctcctccctaactcactctatgagaccagtgccatcttgatgcccaaacctggcagagacacaataaaaaagaaaagttcaggccaatatccttgataaacatagatgcaaacatcctcaacaaaatactagccaactgaatccagcaacgcatcagaaagctcattcaccatgataaagtaggctttatccctgggatacaagtttggttcaatatatgcaaatcaataaatgtaattcatccatctaaacagaacaaaaaataaaaaccacatgatcatctcaatagaggtagaaaaggattttgataaaattcagcatcccttcatgttaaaaaccgccaacaaactggcattaaaggaacataactcaaaatcataacagcaatctatgacaaacccacagtcaacatcatactgaacaggcaaaagctggaagcattccccttgagaactggagcaagacaaggatgcccattctcaccactcctattcaatatactaccggaagtcctagccagagcaatcaggcaagagaaaggaacaaaaggtatcctaaaataagaagagatgaagtcaaatttatctctgtttgcagatgatatgattttatacctagaaaactccatagtatctccccaaaagctcctaggtatgataaacaacttcagcagggtttttggatataaaatcaatttacaaaaataataagcatttctatacaccaatagtgttcaagctgagtgccaaatctagaacacaatcacattcataatagccacacacacagaacataaaatacctaggaatacagctaagcagggcccgcagcacctgggatgtggaagcctcagaggagtcaaggcctgggtctctctatgagcagcaaaatgaaaacaacactttagctggtttccagtgcacccataatctccctatagtgcactttagagacaattttaaagtgatttaactcacagaattgtctatataatatttttaaggtatacacttttaaacatgttattcacattatagaaaagtgtataatgagagaaatagttcccataatgtatcaacttctgggctaaaaattctttagataaaatccaatatccattttctatccacgtacccctatgtaaatatatactttactgaggaaccttagaaggaaagtgggaagatggttcatgttcttgaatagaaagaattttctcaagatgtgagctctttctgtatttatcaattttgcctaaaccaaataaaaacaccaaagttttaacgtttaaaaattacacttgctgtcttttactgttatgatgacattaaaatttttttgtaatgcaacgaaaaatgacttgccttcctcgatatcaaaatgtgccattaatttctataagtcatttactaacagctgaaagacataaatgaatggaacagactagaaaatccagaaacacccatatatatgaaataatttagaacttgataatggtgacatttcatattagtagaaaaagatgaattattcataaatggaatgcctgctgtttggagaaaactagctgatttttatgtcacaaaaataggttcctggtggaatatagattaaaaattttaaatatacaaaatgagaaaactaccagaagaaaacacaaatgcctatttatacagatacttttttttttttttttgagaaagagagtctcgccctgtcacccaggctagagtgcagtggcgcgatcttggctcactgtaacctccgcctcccaggttcaagcaatcctcttgcctcagcctcccaagtagctaggattacaggcatgcaccaccatgcccagctaatttttgtatttttagtagaaacggggtttcaccatgttggtcaggctgatctcgaactcctgatccacccgcctcagcctcccaaagtgctgggattacaggcatgagccaccgcgcctggcatacagatacattttcacgttgacaaagaccttcctaaggacttcacgagcaaacattttgaaggttggtttagcaaaataaaaattaaaacaccccatatataagaaaaaaaatcaacaaaacacaacatacttgcaaagtatttacaacatacatgtatatacacatatcagatgagcaatgtattttcacgttcagcaatgaggctccgtctcaaaaaaaccaaaccaaacaaaacagaacaaaaataaacataaatgccatgaaaaccaaaaagactgagaaactatctcagattaagagactaaagaaacaggataactggacacaaaacatcatggactgtgaatccccatctttgattttctttggctacaaaggatattagggagacagctggcacaatctgaataaggtctgtagattagatattaatattagacaaacttgaatttcctcatttgtgaatcataccataataatgtaagataattatttttaggaagcacacactgaaatatttacagaggcatcaggttcaaaacttacaaaatgttcacaaaaaattcattatatatatatatttgtatttatctagaaagagaaaaggaggagaatgaataaagcaaatgtggtaaagtgttaatatctgaggaattacatccaagaattttttgtacaattcttataatttttttctctaaatctgaaattgtaaaaataaagcatttctaaaaagaaaagctgatttaaaaaatattaacaaattataacccactgaatgaaataagccatgaatccatgttgataccagtaaatgagtaaattgaaagtctaatgaggaacagatgtatttccatagtctcaaatttcctcctcacaaaatacaaattaattacaaggtgaaaaaataacatgacagaggagaaacccagcatatgccaccattggtgatcaaggctaacatcaccaataacaaaacaaatcaaaattgtaggtcccatggtaagatgcaatgagatcacaggatactcatcaaaaaatgtatggtccaagtctaatactaaaagaaacatcagagaaacccaactgaggaaatttctacattactggactttgcttttcaaaagagtaaaggtcatgaaggtcaaggaaagactgaggagctgttccagactgaaggagtctaagagacatgacaactaaatgcaatccatgaatttgaatgagatccttttgctgtaaaggacattacagacaagtaataaaacttaaaaagaatctgagggttacataacagaatgtattacctaacaatgtattcatattaactttctgattatgaaagttgcattgtagttagaatgttctgacccgtagcaacactcaccaaagtaatctggggtgatttactctcaaatgtttctgggggaaaatgttctttgtgtaaaacttagaacttttctctaattttaagactgtttccagaaagttaatcaaaaacatcttcgttcatgtaacgcaattccctactatgtgctgtacattgagctggacatggggtccgtgatgcccaagcaagctgctgtcctccagatgttcatgttctggtgacctcaggaaactattaaaatataaggaggtgtgcaactggcattcccaaactctacttgtgggaatgctaactggcacaaccttttggaaggcaatttatcatgcagcaagagtccacaactgcacatgtcctttgatccaatcatttgactcatcagctccagagaaataactagaaatgcaaaaagagactgatggctaaacgtgttgattgaagtgctatttataataatgaaaatttgaagtatccccaattatggaggattggtactagtaagatttactttctaccgggattatgtgttacttttgtaatcagaaaaataaatattatagtcatgcggcatataatgatgttttggtcaatgacagactgcatatacaacagtggtcccatatgattataatgtcatatttttactgtagcttttctgtgtttagatgcacaaatacttgctatatggtctgtagctgagggacaatatgctgtaccacgtgatctgggtgtgcagtaggctacaccgtctaggtttgtctacatacaccctatgatcttctcacaacaatgaaatcacctaatgattcatttctgagaatgtatcccagactgtactgaggagcaccatgggatacaggccatagttctgtgcatgatgtggctggagtcctgaggaaggagagggctaaggactgaattgtgtcccgctccccacccccaatattagatgctgaagttctaatgcccaacctgactgtatttgcagacaaggcctataaggagatggtaaaggttaagtgaggtcataagggtgggccctgatccaataggatttgtgtccttgtaagagatcagagagcttgggtgctacctgcccacgccctgccctgtgggagtacatgcccagctgggtgtccacatgggtagaggggctggtacctgttacccgcccatcccctccaggctgggacaagagccctgtgggcctgggtcctggaaaagggccccccacccacatgctttctgggtgggtcccgtcctgcggagtgctgtgggagctccacgtgcccctgctgatctgcccatctgagcctcggggatcctgggcactgagaactgggcggggggtgggcactgacattggggacagaaaggggctgctaaagggggcactgtctgggcaaggccctgtctggggggtcgccccagcaggtacatccagcagtgggaggagctttggatggggtgagtgccctgtcctgaggggtattgtgagctgaagcgggggacctggaggtgcagggagaggaagtggagtgagtgatgcagtggtcccaaagtatgtctcaaggcctcaagactctggtgaagggacagagaagccagcactggtgagggagcagggagagggagctggatggcccggctctgggctagacacacggtccagctgggctgcgctgtggagccccagtccctaccagggcttgtcctgttctctgaggcacagggactccttgtccttggctctgaccctgtgtcttccacagttgggatgttgagtccatgggcagagtggggcacaaggggactgagatgccaacccagacggatggcaactagaggctgcacctggcacacacgtcccatgcagaaagctaacacgccctttgccaggcatggtggctcacgcctgtaatcccagcactttgggaggccgaggcaggcggatcacaagttcaggagacagagaccatcctggctaacatggtgaaaccccgtctctactaaaaaacacaaaaaattagctgggtgtggtggcgggagcctgtagtcccagctactcgggaggctgaggcaggagaatggcgtgaacccgggaggcggagcttgcagggagccaaggttgcgccactgcactccagcctgggcaacagagcgagactccaactcaaaaaaaaaaaaaaaaaagaaagaaagaaagctaacatgctctttatttggggacgagggacaggaagcactggatggtgcctgcacagtgccagccgctcgctggtagctggccagctgtacgatggtgggataatggacgcggtaggccatgtacttctgggggtcatcactgctgcttgcccaatgcaccaagggatgtcagcctgcccctggtccccggacagccccctgaggaccccaacccatggggcccaaatgcctatccaggctgccccatggggttctgtgctgacagaggctatcctcacaccaagaacaggaggggaaccccacatttcttttcagtgcctggacagtttcattttctgtgtatgggagcaaccctcttctctgtgactggagtcttcgtctccaccacgggatacctccttgtgtgccagggcacaagtcttgtgcccctctgtcctgtgagtttgcctctgttcctgcactctcagtgtttccatcactgggcaggcacccttggccctttgcataggagctgagggagttcttgaagcactgagagggtgcagggggaggggtctgggggaaaggaaggcagggaagagggaaggcatgagggggagggagggactcaaggttttggcctgagtttgggggtgcaacaaaggggctccctgaggccccggaccagctgctcccaacccacatctttcatgaatgtccacaggcctacagtgcgttcacagggaggtcccaggttctgagaggtgacagaattcttcagagctagcactggggtcaggactggggaactccctcatcctatggggctgccccatggacaagttgtggattcggaagggacaaaggacattcggaaaagaggggacctgggggtgcagatcgttggggccagggctctgtataggatgaatgagagcagtggctcccagcccaccccacctgtccacacctgcagtgatggcccaggcctgggtttccacctctgaagcaactgtttcagccaggagcatccttggggtggggatgccttgtggctcagcttcccagagctaaggggagcacccatagcctcctgagtgtagaagccatcccatttggggttattttgtgtcaggacaggataagctcagcttccccctcactagccctacccctaacacctactaaaaacagagcaggacagaggagccctaggttccaagctgggagagaggcagtcaataaaaactcaagccccaacaggaaggactgcctgagatcactgaccacaccttctctagcataacagagaggggccaggaaaaaggcagcccctcaaattggcaaattctacttagaatttgtacaaattcagcttctatttgggtacactctggcactttttccattccaagcttttgggaagagtaaacagtactcccactgtcttcacttcctcctcaccctttgaactctgagatggggggcaggggggaatccgttagaaattgtccaggggtgtacagggccagtatttgctgctcagcagagccagctgctaaatagccagtaattctgctggctggaaaccactcacagctgaaaaacagccaaagagtgaggattttcaccagggaaagctgcaaagcagaatgttggttttgctctttttctcagatagctggttttccagtgtccctctcaggcatcctagagcctataccattctctttgggctcaaatggcagctctgcacccgagcccagctacacccaggagcctgtgtctatcagatgctggcctgctggccccggcccactgcagggctggttctcccaccaccattttgctcagactgccttttcttttttcttttcttttcttttctttttttgagacagagtctcgctctgtcacccaggctggagtgcagtggcgcgatcttggctcactgcaacctctgcctcccaggttcaagggattcttgtgcctcagcctcccgagtagttgggactacaggtgcccgccaccacgcccagctaattttttgaatttttagtagagacagggtttcaccgggatttcaccgtgttagccaggattttctcgatctcctgacctcgtgttctgcctgcctcgcctcccaaagcgctgggactacaggtgtgagccaccgcacccggcctcagactgcctttccttcagcctccatgacctcctgacagccaagccctgggcttcctgctccccctgtgcagtggaccaggtgtagtctctcctccctcagctccaagcacaccctgttctgtcccctcctgcctttcctctgaagtcccctcaatgggctctggtaaggctgtgagcttgcatttcacagaatgctgaccaccctttacttcttttcctccccgcagagtgcacctgagctaatcttctccattctggcagcttcagtgggtctgggggttctgtccggaagggccactcacctaggcccccgcagccagcagtagctgcatgcaccatgcctggccctgcagactggcaaagtataggggcacaaaggagtccaccatgacctggttcacagaggcgctactcttgctcagctgctacagctgtcaggtttcatcccactgggctgagtcccagagccagctgaccagggcagtgctcctttcttctttcctcctgcaggacctttggggtctagtccaagcacccttattcttatctgctgctcctcagttcccagctgaattaactccaaggcctccccattctccagggcaacaaagttatgccaaaaaaccaaaacctccctggggccacccagtgttcaaggtccccttctatggtctcatgactgcctctcagcccctgagcaggcaactctgtccctccaatcatccctgccacaggaacacccatcacagggcccctacctcctggtggctgccgagtgactggggtgacctcagccctgccctccccatctctggactctgcccaaggaactctcatggacaccccctgacctggggctcagtgggctgccagcacctgggagcctgtgaggctgagacccagcaggctgcacgtggcctgagggccccactctctggctggcagaccctgaaagtgggatcacactgtggggggtccctcagggtttccatgaagaaggagcaccccgtccctgggggaatgcaagcagagtgtggaaaggagtgtgggggcctccagggccttcctgaccccacccccaggttctgaacgctggtgtatggggccactagggcacggggaacagccaccctgctgtaggatttagatgtttagatatacgataacaccgtcccagtcagcacccacaacacccaccctgaggcccacccaaaagccacagcccatctgccccaatgggggtgcaggtgggcagagcctcttctgtcctgttcatcctgagccctgagctcctcgcaggatgggatcagatatcaaacctggaacaacaattggatgaaccaaagaaggggagagagcgccctaggatcctctaggtggagagaacccttggccactgctgcttggctcatggcagggggagggagggtgggcctgggcctgcctggcactttaagagggcagttctgcccaccttgaatgcccctcctccagccaccaggggagggatccccattgcccagcaacaaaaggcccttggtgtgtacagtgtcacccaggcaacagggaggcacatccttctctgggtcagagcaactggagctgccccattaactgcacccagctgaccacacccttcactgccccagccctgatgggcgcctggcaccacagtgtagatggatgtgctcctgactatgcacctggcaccacagactttgccgcccctgtaagatggactacgtggcttgcaacacaggtgactgcactcctcaggcctggccactgcgggctcagccaaccacctgctggacgagtggttctagaactgctatggccactgccaccaggccttcgcagatcaccagcagtcagactgccagcagtcagagtggtagtggcccgagagccagcaactggcagcccagacccaggcacaggtgtggtatgggactccacgtcagggtgagtgagcacctgcgggattccacggctggaagtcggagctgcagcgtgaggtggaggtgctggcaaagagtcagacctgctgctggtccagaagcagcggctggagcacctcctggacaccactgcccagcccttctctattgccacaaacaacctgcagtgctgcacgtgccgccagcaccctgaccttgtgagctaccacatggagatggagttgctgagggtgccacagccttggatcccaggacatgcaggcacagagaggagggacgcaggcagttcatgtggacaagccaggtgactgctgcaggcatgcaggagcccaggcctctgcaccctggacccctgagtcctgaaatctggcaccttagtcacaggaggcagctttgtcccaagggaccctagacatccaagcagctgtctctcctctgggtgcctgtcctcctccagtccatttgagttcaggcacatttcagcctgacccttagccctggggggctgagtcacaaggcacccccaccccagatagcagaaatataattccagaaaaaaggcgtgatatcttctgaatgactccaggggctggaaatagaaacccgggagtatgagaagcaagagtcaaatctgattcaaaagttggaaaagggctgggggcggtggctcacgcctgtaatcccagcactttgggaggccaaagcgggcagatcacgaggtcaggagatcgacaccatcctggctcacacggtgaaactccgtctctactaaaaataaaaaaaaattagccaggcgtggtggcgggcgcttgtagtcccagctactccggaggctgaggcaggagaatggcatgaacccaggagatggagcttgcagtgagccaagatggcgccaccacactccagcctgggcgacagagcgagactccatctcaaaaaaaaaaaaaaaaaagttggaaaaggctttcaattctgcaaggtatccagccctccttcagagcctctaggggtgggtgggttgcctgttacatggtttctctaccttcttaccttttgcaaattatcttctcctgcctaaaatacccttttacttttgacccaactttctgcttcaactcttttgcttgttcttattttaaaaactcattttaggactcatttctgggcaactcccactaagcaccttcctctcactcccaactctatgccgtttccagagtgctctgattctgtctgtgttcaccaccaccatgatcatcaccaccaccaccactgtcaccaccatcatcatcatcaccagtgtcaccacacaaccatcaccatcatcaccaataccaccaccaccaacaacaaccatcattgccaccatcatcactaccatcaccacctccactatcactaccaacaccatcagtaccaccatcataaccaccatcattttcacagcaatttattacgattattattgagccctttttatgtgtctgtcactgagatgagtgcttttatatgcattatatcacaactaccctataaggtaaatactatctccatgctctatcttccctactctgaacaggatagagagtagtctcagtctattaactgagacttagataaatagattaagttccttaagggatgtgttgtgaataagtgaaggagctcaaatttgaactcaggtctatctgacaccttatcatgtggctttgtgattgcctgttcttacttggtcctttccaactctgctaagaacaacctggtgaaagctaaggcacaaaggaggaactctacaaacctcaaaaacattttactgctgactgaatatgctgaatgattgagaagagggtgtcatctgcccatactgtaagggaaggcaatattgagaagagggaggagtgtgatgattcccaaactgaaaggactcaagccctagtgagcttccaatggccaggccagggacaaaccagtgacaagatggcaaacggcacaggcaatggcctaaacctccaggagtttctggaaacagccacttcccttcctttgttactctgtcatttctagtttgtcccttcacagaaataagagacactttagcagtagaatttggaagaagcctcagaccatgtcctttaggatggaagggtgtggtcaaagaacagaagatgacatcagaggaaagatgatgctggttggagttgaggaaccagcaggaaaggtcaggagaggaaggggagcccaaccccagtgcaagggtctgtttgggttcagatgatggtagcatagagcacagacttgggagtcttacgggttgggagtttaaaccaggctctgccacataaaacatgcttttttttttttttgagatgcagtcttgctctgtcaccaggctttagtgcagtggcacgatcacagctcactgcaacttccaactccctggttcaagtgattctcccgcctcagcctcccgagtagttgggattacaggcaggtgccaccatgcccagctaatttttgtgtttttagtagagatggggtttcaccatgttggccaggatggtcttgatctcctgacctcgtgatctgcccacctcagcctcccaaagtgctgggattacaggtgtgaaccaccgtgcccagcctaaaacatgccattcttttacttctctgaatctcagccccctcacctttaatacagaattgtgttacctccatctcacagaatgccaatgggagggtcagatgagttaatatatgtaaacccctttgctcagtacatggc

SEQ ID NO: 1370 - protein, 821 aa, Homo sapiens
MAASISEASDAMDPTGPGDVAELPAAVATLLGALLLAAATLAVSPLLLVTILRNQRLRQEPHYLLPANILLSDLAYILLHMLISSSSLGGWELGRMACGILTDAVFAACTSTILSFTAIVLHTYLAVIHPLRYLSFMSHGAAWKAVALIWLVACCFPTFLIWLSKWQDAQLEEQGASYILPPSMGTQPGCGLLVIVTYTSILCVLFLCTALIANCFWRIYAEAKTSVAGGETQLRLHERDPSDPGGRRSKAFLPPGQLSSSSGTFRPQLRVGLAHLPIQGDEDVSSRLDGVLGCLPRLCRLPLTVMLPVPELSPQAAAPCAMFWLQRCVCSCGGSGGGGDGCDSDNDGDGGGGDGGGSGDSGGHGDGGHGGSDSNGDGGGSNDDGGGDGSDSDNDGDGDGDSDDGDGGDSGNGGDNDDAGDSGDGGSFGDVDYDSHGGGSDGGGGGSDGGGDSGGGSDGGGGDSDGGGGSDGGGDSRGGSDGGGVMMMVAMVVIVVMMCDADDDNGRGNDDSDGGDGSDGGGGGSDSDDGDSGHSRGGGRDGGGGNGGSGDSGGHGGSDSNGNGGGSRDGDGGDSDDGGDSGFGDGGDDSDGGDSNSGGGDNSDGGNDGGGGGDSDGGDCGGGGGSDGGGGRDGGDGGAGPLQTQCPSGEAVLWRWCTPAVRRRLGCRKHLPYSLCPPCTQILGDAPGLALARQGSLRDGRQVGRAPAVCFPHGAPGLPPRQRGPGGTPEVQGGESWCPRPRGGGASRSRLECSGAILAHCNLCLPGSRDSCASASRVVGTTASRVVGITGRCHHAQLIFVFLVEMGFHHVGQDGLDLLTS

SEQ ID NO: 1371 - DNA, 1393 bp, Homo sapiens
  source
  (1)..(1393)
  CDS (201)..(1193)
aaatgtttaattggcaattaattgaaaaattctgtgtatcagcgaacatgatacagcccacagcctgcgggtctgcgcccctggattaacatgctgccctgccaggaggacacgacctgcagccccatcctaactctggccaccccatcctgcaggcatgccggctgccgctccaggactcccctgtccccaggaccaagatgacgcccaacagcactggcgaggtgcccagccccattcccaagggggctttggggctctccctggccctggcaagcctcatcatcaccgcgaacctgctcctagccctgggcatcgcctgggaccgccgcctgcgcagcccacctgctggctgcttcttcctgagcctactgctggctgggctgctcacgggtctggcattgcccacattgccagggctgtggaaccagagtcgccggggttactggtcctgcctcctcgtctacttggctcccaacttctccttcctctccctgcttgccaacctcttgctggtgcacggggagcgctacatggcagtcctgaggccactccagccccctgggagcattcggctggccctgctcctcacctgggctggtcccctgctctttgccagtctgcccgctctggggtggaaccactggacccctggtgccaactgcagctcccaggctatcttcccagccccctacctgtacctcgaagtctatgggctcctgctgcccgccgtgggtgctgctgccttcctctctgtccgcgtgctggccactgcccaccgccagctgcaggacatctgccggctggagcgggcagtgtgccgcgatgagccctccgccctggcccgggcccttacctggaggcaggcaagggcacaggctggagccatgctgctcttcgggctgtgctgggggccctacgtggccacactgctcctctcagtcctggcctatgagcagcgcccgccactggggcctgggacactgttgtccctcctctccctaggaagtgccagtgcagcggcagtgcccgtagccatggggctgggcgatcagcgctacacagccccctggagggcagccgcccaaaggtgcctgcaggggctgtggggaagagcctcccgggacagtcccggccccagcattgcctaccacccaagcagccaaagcagtgtcgacctggacttgaactaaaggaagggcctctgctgactcctaccagagcatccgtccagctcagccatccagcctgtctctaccgggccccacttctctggatcagagaccctgcctctgtttgaccccgcactgactgaataaagctcctctggccgtttatgattatctcattccatatctcagggcgaggcaggaggaaatggctcaacacacca

SEQ ID NO: 1372 - protein, 330 aa, Homo sapiens
MTPNSTGEVPSPIPKGALGLSLALASLIITANLLLALGIAWDRRLRSPPAGCFFLSLLLAGLLTGLALPTLPGLWNQSRRGYWSCLLVYLAPNFSFLSLLANLLLVHGERYMAVLRPLQPPGSIRLALLLTWAGPLLFASLPALGWNHWTPGANCSSQAIFPAPYLYLEVYGLLLPAVGAAAFLSVRVLATAHRQLQDICRLERAVCRDEPSALARALTWRQARAQAGAMLLFGLCWGPYVATLLLSVLAYEQRPPLGPGTLLSLLSLGSASAAAVPVAMGLGDQRYTAPWRAAAQRCLQGLWGRASRDSPGPSIAYHPSSQSSVDLDLN

SEQ ID NO: 1373 - DNA, 949 bp, Homo sapiens
  source
  (1)..(949)
  CDS (201)..(749)
tagccttgtcatatagtttgaagtttggtagcatgcttcctccagctttgttctttctgcttagaaatgccttggctatttgggttcctttttggttccatatgaattttaaaatactttttctaattataggaaaaatgtattgatagtttaataggaataaaattgaatctataaatttggagagtatacccatttttatgatattgagtcttactatctatgaacatggaatgttttttgcatcatctctgatttctttgagcagtgttttgtggttttccttgtacagatctttcaccttcctggtcagctgtcttcttaggtattttattctttttgtggcaatcatgaatgggactgcattcctgatttggctctcagcttggctgttgtttgtgtacaggaatgctagtaatttttgcacattgattttatttcctgggactttgttgaagttgtttattagcttaagaagcttttgggctaaaactgttgggttttctagatataggaccatgttgtctgcaaacagggatagtttgacttactcttttcccgtttggatgccctttatttctttctctttcctaattcctctggctaggacttccaatgctattttgaataggagtggggagacagggcatccttgtcttgtgctggttttcaaggggaatgcttccaggtttttcccattcagtgttatgttggctgtgggttttcatagatggctcttattattttgaagtatgttcattcaatacttagtttattgagagtttttaacatgaagggatattaaattttatcaaaagccttttctgcgtcttttgagataatcatgtggtttttgtctttagttctgattatttggcaaatcacatttattgatttgtgtatgttgaaccaaccttgcatcccagtgataaagcctacctgattgagg

SEQ ID NO: 1374 - protein, 182 aa, Homo sapiens [sequence omitted]

SEQ ID NO: 1375 - DNA, 916 bp, Homo sapiens
  source
  (1)..(916)
  CDS (201)..(716)
ccttctgagtcttctaaaaaaagtaaattattctaggacaacaaaggcatatttgaaagggtgacatgcagaacatgaactgacatcactggacaaaacatttgagtctattctgctcttgcgtttaccacaacaataatttccaccatttagtgaccatttaccatgtgccagaaactgtgcctaagtgctttaagaggatgatgtcatttaatttaataagaactgagtttggtgctgctattatttcctttattcaagtggttaaactaaggcttgaagcaattaacttgcccaaagtttcccagctagattccagaatatatgaggccagatctctcactatcaacaaccaagttactatttctacgttgcctcgcctcccacttcaccccaggaacctactgtgcgccaggcattgtcctagagaagagctcgtttggtggcaggttttgaccatagatttccatggtctgcttgaaaaatttttgtccaatctgattgacacctccctcttcctctgcttcctttctttcttcttttttttttttgagacagagtcttgctctctgcccaggctggagtgcagtggtgcaatctcggctcactgcaagctccgcctcccgggttcacgccattctcctgcctcagcctcccgagtagctgggactacaggagcccaccgccacgcccggctaatttttttgtatttttagtagagatggggtttcaccgtgttagccaggatggtctcgatttcctgacctcgtgatcctcccgcctcggcctcccaaagtgctgggattacaggcgtgagccaccacgtccggcccctttctttcttctagaggaagaaagtcccaaatacctggtggttgccatatctcctagcctatgtggtcaacatttaattaca

SEQ ID NO: 1376 - protein, 171 aa, Homo sapiens
MMSFNLIRTEFGAAIISFIQVVKLRLEAINLPKVSQLDSRIYEARSLTINNQVTISTLPRLPLHPRNLLCARHCPREELVWWQVLTIDFHGLLEKFLSNLIDTSLFLCFLSFFFFFFETESCSLPRLECSGAISAHCKLRLPGSRHSPASASRVAGTTGAHRHARLIFLYF

SEQ ID NO: 1377 - DNA, 943 bp, Homo sapiens
  source
  (1)..(943)
  CDS (201)..(743)
agtatagctgtgtggcttgcaggtggaaccagactctgtttctgaagtggctaatacctccttttgatacatagaatgtctaaccaaccagaatatgataccaagaacttatattttatatatctactgctttctcacttgagccacagagaaatgttatgaggtagggaaggtgggtgtgaaccaattccattttacagatgaggaaactgaggttcacattaagtggatggttacattactgtttagtgtcagacctaacacttcaacccaggttttttacttcaaaccctgtccttccccaaccccacccacaaagttatactgtaaaacaaatgagtggtgctgacatattgagaaaacttaggactatttttctgctcatggtaaacagatcacatctaaaacagacacatatcgccagaggcggtttgcttggtaacatggtcattgttattcctcagtaccacaacctcaatgtgacaatggaaaggtgctttcttgtaccttcagttctgactttgatgcctcctcccttttcagtgagctctgcccatctctgtgacaacttcacagaattcagctgcaaaacaaattaccgctgcatcccaaagtgggccgtgtgcaatggtgtagatgactgcagggacaacagtgatgagcaaggctgtggtaggaggggccacaggggagtggagggagggacaagaaagtgcacatgtcaagtgccatttattagatgagagatgagagtgtatttcccatgtcatcttttctttgtttacctctgtaaaaaaatggttgattcttctaataacatgttacatttttgtagcattttgcagggttaccaggggtatttaatttgtagcactttaagtcatgctgtcattgaggaagacgttattaagatgttagaaacttgtgtaatttcttccaaatg

SEQ ID NO: 1378 - protein, 180 aa, Homo sapiens [sequence omitted]

SEQ ID NO: 1379 - DNA, 880 bp, Homo sapiens
  source
  (1)..(880)
  CDS (201)..(680)
atctggcagaagaaatttctaagcagcaaagtattcaaggagtgacttgggtgctgttaaaggcattcagttttataagagaagaagagcataaaagtttggaaaatttgcagcctgacaatgtgatagaaaagaaaatccaattttctgaggagaaattcaactggctgcagaaatttgcataagtaacaaggagccaaatgttaatccccaagacaatggggaaaatgtctccagggcatgtcagaggccatcatggcagcccctctcatcataggcccagagccctaggaggaacaaatggtttcatgggccaggcccagggtccctgtgctgtttgcagcctagggacttggtgtcctgtgtcccagtcgctccagctgtggctgaagggggtcaacatagagctcaggctgtggcttcagaaggtacaagccccaagccttggcagcttccatgtggtgttgagcctgtgtgtgcacagaagtcaacaactggggtttgggaacctccacctagatttcagaggttgtatggaaacacctggatgcccaagcagatgtttgctgcaggggtggggccctcatggagaacctctgatagaggagtgcagaagggaaatgtgggcttggagctcccacacagagtccctactggggcaccacctagtggagctgtgacaagagggccaccatcttccttaccccagaatggtagatccactaactgcttgcactgtatgcctgaaaaagccatggacactcaatgccagcctgtgaaagcagctgggaggaagctgtaccctgcaaagccacaggagccgagctgcccaagaccatgggaacctacgtcttgcatcagcatgtcccggatgtgagac

SEQ ID NO: 1380 - protein, 159 aa, Homo sapiens [sequence omitted]

SEQ ID NO: 1381 - DNA, 856 bp, Homo sapiens
  source
  (1)..(856)
  CDS (201)..(656)
tcatacaaactctctcccaacattcagaaatactcttccccatcgaatcctctaaaaagtgcttcctcctcttgttattgtcacaccatagaccaggcccacagctatccagacaggtctcatgatgtagacagaagcctccaacctgtgctccatgctatttggaattatttcaaattttttcatcatacttaaccaccatgaatttgcttcatacctcagctaactataacaagatcattaacagccttttttttgttttttttccggtgcagtctcactctgtcgtccaggctggagtgcagtggcatgatctcggctcaaagcaatctctgcctcccagcaatctccgcctcccaggttcaagcgattctcctgcctcagcctcccgagtagctgggattacaggcatgcaccgccacacctggctaatttttgtatttttagtagagaccgggtttcactatgttggccaggagggtctcgatctcttgacctcatggtctgccctcctcagcctcccaaagtgctgggattacaggcgtgagccaccgtgcccggccgccattttgtttatttatttattatttttttacgtaagactgccaacaccttcaattttcctctcaaaatatgatttctttaagattttctagatgtatagtcatcactaaatgcttaagaagtcatgaaataaaagggcaagtagcttgactgtcatgaattttcttccacaaatgttgacatagtatatacaaaattagcagtaagtcattgtctattacttatattatgcttcttggattagttttcaagagaaaaaacaggagcagacatttctcatgaggagtgcaca

SEQ ID NO: 1382 - protein, 151 aa, Homo sapiens [sequence omitted]

SEQ ID NO: 1383 - DNA, 3826 bp, Homo sapiens
  source
  (1)..(3826)
  CDS (201)..(334)
  CDS (2878)..(2995)
  CDS (3081)..(3626)
  modified_base (3370)..(3370): a, t, c, g, unknown or other
  modified_base (3568)..(3568): a, t, c, g, unknown or other
  modified_base (3776)..(3826): a, t, c, g, unknown or other
cccggggaggagtgcaatgtggggtgctcctccccgtccctggggtcccctcaaatctgcagggtcagcaaggccaacctggagccacaggccaggctgggccttccagtcctgtggtgagtgactgggatggggctggtgaggggtgagggtgggcgccctggggcagccagctaaggccctgcaggaagtgggaggcgatgggagaaccgagtttcctcctctctctggagagagggacttctgtctccccaaagggacccccagggcttcctggcttcgggagcaatgctggagctgaggaagagaaggtgagtgacagacacatggccaggtgtgtctcccatcaccctcagccctgaagcctgtgggactctgaggggcctgctctgctccaggcccccagccaccaggccccggggtccctgctcagtgagggccccccacagaccctgtgcccagggcattctctgtgtcttggcctttctcccccatccacgtgactcctcctgtgttccccgaccacctgctcccttctctaggggccactcaggtctcactggactgattgggtcccctgggggagcagggagagaatggggatcagggtcttcctggccctcagggctcccctgaacagaaagggagaggtgagtacagggcctggtcctggagggtggggtgaggggtggggagtgggaggatggggttaaaactcagctgtgggtgagggagctactttttaaaattgtatatagagatggggtctcactacgttgcccaggatggtctctaactccagggctcgagcaattctcccaccttggcttcccaaagtgctgggattacagcatgagccactgcgctgggatgacttctattttctaaaagcaactctactgggagatttatgctgaggaaagtatgtggttatcagactcagtgcccatggtggatgacttctttatttatttttttctttgtagagaagggatctcactttgtcacccaggctggagtgcagtggcatgaccacagctcactgtagcctcgacttcccgggctcaagtgatccccccaactcagctcccccaagtagctgagaatacaggcatgggctaccacaactgtctaattttttatttatttatttattttttttttggagacagggttttgctctgtcacgcaggctggagtgtagagacatgatcttggctcactgcaacttctgtctcccagattcaagcatctctcgcctcagccttgggagtagctggggactacaggtatgtgtgggtgagtctgggtgtgggtgggtgagtgcaggtgtgtctaggtgtaggtgggtgagtatcggtgtgtgtctgtgtgtaggtgggtgagtatgggtgtgtgcgggtgtgtgtgtaggtgggtgagtatgggtgtgcaggtgtgtgtgtgtgtatgtgtttacattgtggtatgtgtctgttgggtgccgccgttagggatttggaagagtgaggaccataaacctgtaaacatttctacatgcctgctccacaacaagtgtaccaagcatggtcaaaagtaactaaaccaagtaaacaaattagacattaattaaacttaatgctgggcaggaaagaagtattcaaggccaggtaaaatgaagaaatataaccaaataaatgaaattttaaaattagtagaatgagacagaaatatttttaaaagtttttaatttctggtgaatatcagtatataaaactaagaattatatggctgtcaattgactaaaaacagtacttaagatttcagctagtgaaatagccatatatgatcttgtaattccatttttctgtctcaagaatgacttgtttaaataattttttttgaattgttacattgtcatcttgaaagagcttcacaaaacttacatgagaatctggattgtcataagaggtctgagtttttaatggtatgttcgtatttctgttatgtacattgatgtcaaacattcatttcctgagctgttctccagaacacaatttgacttataatgaacactcaataaatggttggttggataatcaaatcaacaccttagtttcatcaattttcatttcatataaaagtgactgatcttctatactcatcaatgaaacagagagagatgagggagggatagcagtggagactaagaggatgacaagcagacctcattctgcagtggatatcctacactctccacttctcaatgcttggaaacacttgccatactaaaaaaattggtatttcctaggcagaaaatgggagttaaagaaagtccatatttctatactacaataacttacactataatacatggacgacatacatttctaagctattcacttcatagaaaatgcagatacatttaggtgagcaagatgcaggagaagggttaataatcaggctgagtgtgattgtgagattcagtctaatatcttgatacaattcttgtgtaattgtatcagttgacatatctgttcaaatgcaaggcgggagagttttgcaggagctcctgaaacttcctgcatgatgttaggagacaggttggtccatgtgattaggccagatgtgtttgcttaattgtggcttaggaaagttaagtttctgacctctcacagaaactgggagatagggacgctaaattttataacatttctgtttaatatatatttaataatacataataaagtctttaaaatgtcaattttgtcttttttctagtttgcaatattttgttttcaccgccccattgtttttagtacatatgttttgtgtatttaaaaaaatgtgtggaggcgccctggctcgccccgcgccagaggctcgcgcactcagcaggttgggctgcggcggcggcggctggggaagccgaagcgccgcgcgtgagagatcccagatacgtctgcggttccggctccgccaccctccgcctttctcccgcaggtcttggagccgggtgaggaagaagggaacggccctagccttgggaagccaaagcacacccctggctcctgccgacaccgccctccttcccttcccagccgcggcgctcgctcggtgctcggctactctgccgggacggcgcgcggctgcagatctgtggagagtcctgctgccctccagccgggctcctccaccggcccttgcagggcgcagagagctcggcgcgacccttccgctcgcctttttcgtcagccggctggagcagcatcggtccgggaggtctctgggctgaggcggcgacagtctctctagttccaccatgtccgcgggcgagacttcgggaatccgctgaggaaattcaagctggtgttcctgggggagcaaactntgcaaagacatctttgatcaccagattcaggtatgacagttttgacaacacctatcaggcaataattggcattgactttttatcaaaaactatgtacttggaggatggaacaatcgggcttcggctgtgggatacggcgggtcaggaacgtctccgtagcctcattcccaggtacatccgtgattctgctgcagctgnagtagtttacgatatcacaaatgttaactcattccagcagactaccaaagtggattgactgatgtcagaaccagaaggagggagtgatgttatcatcacgctgtaggcaataaacagatcttgctgacaagaggcaagtgtcaattgaggccggagagcagaaagccaccagggagacatgttacctttattgaaactggggcaaacnnnnnnnnnnnnnnnnnnnnnnnnnnnnnnnnnnnnnnnnnnnnnnnnnnn

SEQ ID NO: 1384 - protein, 265 aa, Homo sapiens
  MOD_RES (181)..(181): Variable amino acid
  MOD_RES (247)..(247): Variable amino acid
MGEPSFLLSLERGTSVSPKGPPGLPGFGSNAGAEEEKVSDRHMARLGCGGGGWGSRSAARERSQIRLRFRLRHPPPFSRRSWSRPRRSLGARLLCRDGARLQICGESCCPPAGLLHRPLQGAESSARPFRSPFSSAGWSSIGPGGLWAEAATVSLVPPCPRARLRESAEEIQAGVPGGANXAKTSLITRFRYDSFDNTYQAIIGIDFLSKTMYLEDGTIGLRLWDTAGQERLRSLIPRYIRDSAAAXVVYDITNVNSFQQTTKVD

SEQ ID NO: 1385 - DNA, 886 bp, Homo sapiens
  source
  (1)..(886)
  CDS (201)..(686)
gtacctttctcctctaagtaaagaagccatagatgactccccgagacttttagcaaaactcttggccttaaaactatgctaccatatattcttagaagtcaaaggatgcaacacagagaatacatttttctatgaagattaatacaagtgatattagtggatataaccattaattgtttggactcagccttatcttacaaatgcaaggtcatttatctagatcagtacttaaaaacataaaatttaataaaatgcaatataaaagttggtttaattttgatatgtgctttataggagtgaagctgaaaatatttaaccatatcactcaatatacagtttcttatatatgttactataaaaatattcatcttttttttttttttttgagacaaagtcttactctgtcactcaggctggagtgcagtggcgcgatcttggctggctgcaacctctgcctcgcaagttcaagccattctcgtgcctcagcctcccgagtagctgggattacaggcatgcaccgccatgcccggctaatttttgtatttttagtagaaatggggtttcaccatgttggccaggctggtctccaactcctaacctcaggtgatccacccacctcggcctcccaaagtgctgggattacaggcatgagccaccgcacccagccccatccttttttatggtaggttaatcagttcctgcggttgagagcagacatagttcattatgatcaccttcctatttttgtcctgattacattctttgttgtgtttgttattcgtaaattaaacaagtggtcccacgctaacatttttttgtcattctcttttatagtgttatattccctttgaccattagagagcagacaggcttccccagggaaagt

SEQ ID NO: 1386 - protein, 161 aa, Homo sapiens [sequence omitted]

SEQ ID NO: 1387 - DNA, 943 bp, Homo sapiens
  source
  (1)..(943)
  CDS (201)..(743)
ccctccccgctacctctgtcatttgttccttatctgtagggtaaccataatcaaattggggttgttgttagtcattcatgagataagatgtgtaaagcccttagcatgagttattacaggtctgtccagaatcccatactcaaaccctgggggccagatgtgattcagaattctgaatctctcagatttagaaaggtaatatggttcacatgccgtgcattatgcagtgccctcaacagagtccgaggttacacccaataacccaacacatcactatttctgcagtaagttgtataaatattcacactgagtgggacatgagttttagcaccaaacatacaaaaaagcttttgattttcatgctctggggaattgctggtatcgcatctagaaggttgcgaacctgtgttactatcttcagctcctctagcttggaaaccatcatttttcttggagcagcccattcagctggggatgcaggaggagcaggttggacctggggtgaggcctgtctggcagcacggaggctggcaattgtgattgcctcagcagagcctctgaggctcatctgtctgaatcggagcagaaccctcacggcaccccacccactgcagacccatggcagctccaaccctacagactcttctacgcttagtgggaacatactgattcccagctgtttgcttcacttggcacatggttctcattccagagggaatggctgggtgaacagcaagcactgaggcaaagaggctttcttgaaaaggataaaagtggatgaagtttccagtttgcaggaaagacacagctaatagattaggcagactttaacaagccaagagccaaatgcatgtgaatgtgcttggccaggagttgcagtttgcggctccctggactagagaaccagccctgccacatctttaacagaaagttcttctcctgc

SEQ ID NO: 1388 - protein, 180 aa, Homo sapiens [sequence omitted]

SEQ ID NO: 1389 - DNA, 973 bp, Homo sapiens
  source
  (1)..(973)
  CDS (201)..(773)
gcagaatatcagcatatttgcagcactgtgcaggggagatcatacccttattgaggggtccatgcttaccaaacaactttttaattatcactcatggatttgcctatagaagttgccaatctactgattcaaatatacagacttcttggcccttatatttttctttttctttctttctttcttttttttttctttttgagatggagttttgctcttgttgcccaggcaagagtgcagtggcgcaatcttggcttacagcaacctccgcctcctgggttaagcgattctcctgcctcagccttccaagtagctgggataccaggcatgtaccaccacacctggctaatttttttgtatttttagtagagacggggtttgtccatgttggtcaggctggtctcaaactcccgacctcaggtgatctgcccgactcagcctcccaaagtgctgggattacaggcataagccaccatgccaggctctttttttttttttttttttttttttctgagacaaggtcttgctctgtcgcccaggctggaatatcgtggtgcaatcttggctcactgcaacctctgcttcccagctcaagcgatcctccagccttagcctctggagtagctaggaacacagatgtgagccactatgcctggctcatttttgtgtgtgtgtgtgtatttttcatggagatggggtttcaccatgttgcccaggctgttctccaactcctgagctcagagcgatccatcaaccttggcctcgcaaagtgctaggattacaggcgtgagccactgtgcctggcccaattttttttttttatttaaatgaattacttcagcatttccagttataaagcagcctcttaagaattctgcttctcaggtgaacagacaactcaagtgtctgaacccgcagggctgagctgccaactcctggctgtgtaactcctcccagataatgcccctccctgagg

SEQ ID NO: 1390 - protein, 190 aa, Homo sapiens [sequence omitted]

SEQ ID NO: 1391 - DNA, 1057 bp, Homo sapiens
  source
  (1)..(1057)
  CDS (201)..(857)
cattgtgaggctttcatttccacctgctgctctgagcttccacccgggaccttcctttagcattctggcagtgtgagtctgctggtaataaattatctcagcttttatattttggaaaatgtctttatttcaccttccttgaaaaggcgaaggtataatttatatacagtgaaatggagaaatcttaaatgtgaagttaaatgaattttgacaaatgcatatatctcaaatccacacctcatcaagatatagaacactcatatcatcccagaaagtccctttgtgtccctttccaatcaatctcaactcccagaggcaaccactgttcgagatttttttttttttttttgagatggagtttgagatgggcaacttttgttgcccaagctggagtgcaatggtgcaatctcggcacaccacaacctccgcctcccaggttcaagccattctcctgcctcagcctcccgagtagctgggattacaggcatgcgccaccatgcctggccaatttagtatttttagtagagatggggtttctccatgttggtcaggctggtctccaactccagacctcaggtgatctgcccgcctcagcctcccaaagtgctgggattacaggcgtgagccaccacgcctggtccattgttcatgatttctatcataatatattagttttgcatttttttaaaaaacagggttttgctctgtcacctaggctggagtacagtggcttgatcctgtctcactgcagccttgacctcccaggctcaagtgatcctcccacctcaggctcccaagtagctgggaccacaggtgcacaccgccacacttggctaattttttttttttttttttgagacagagtttcgctcttgttgcccaggctggaatgcaacggcatgatcttggctcactgcaacctccgcctgtcaggtacaagtgattctcctatctcagcctcccaagtagctcagattacaggcatgtgccaccactcctggctaaattttttgtatttagtagagatggggtttcaccgtgttagtcaggctggttt

SEQ ID NO: 1392 - protein, 218 aa, Homo sapiens
MNFDKCIYLKSTPHQDIEHSYHPRKSLCVPFQSISTPRGNHCSRFFFFFLRWSLRWATFVAQAGVQWCNLGTPQPPPPRFKPFSCLSLPSSWDYRHAPPCLANLVFLVEMGFLHVGQAGLQLQTSGDLPASASQSAGITGVSHHAWSIVHDFYHNILVLHFFKKQGFALSPRLEYSGLILSHCSLDLPGSSDPPTSGSQVAGTTGAHRHTWLIFFFFF

SEQ ID NO: 1393 - DNA, 822900 bp, Homo sapiens
  source
  (1)..(822900)
  CDS (201)..(1068)
  CDS (140545)..(140693)
  CDS (261786)..(261845)
  CDS (273663)..(273702)
  CDS (347633)..(347711)
  CDS (482589)..(482596)
  CDS (534176)..(534210)
  CDS (822485)..(822700)
  modified_base (4848)..(4947): a, t, c, g, unknown or other
  modified_base (4966)..(4966): a, t, c, g, unknown or other
  modified_base (17785)..(17884): a, t, c, g, unknown or other
  modified_base (61159)..(61258): a, t, c, g, unknown or other
  modified_base (67605)..(67704): a, t, c, g, unknown or other
  modified_base (74625)..(74724): a, t, c, g, unknown or other
  modified_base (85854)..(85953): a, t, c, g, unknown or other
  modified_base (367573)..(367573): a, t, c, g, unknown or other
  modified_base (367588)..(367588): a, t, c, g, unknown or other
  modified_base (367595)..(367595): a, t, c, g, unknown or other
  modified_base (367613)..(367614): a, t, c, g, unknown or other
  modified_base (367985)..(367985): a, t, c, g, unknown or other
  modified_base (367993)..(367993): a, t, c, g, unknown or other
  modified_base (367995)..(367996): a, t, c, g, unknown or other
  modified_base (367998)..(367998): a, t, c, g, unknown or other
  modified_base (370273)..(370277): a, t, c, g, unknown or other
  modified_base (370279)..(370279): a, t, c, g, unknown or other
  modified_base (370281)..(370282): a, t, c, g, unknown or other
  modified_base (370285)..(370287): a, t, c, g, unknown or other
  modified_base (370289)..(370291): a, t, c, g, unknown or other
  modified_base (385643)..(385742): a, t, c, g, unknown or other
  modified_base (409961)..(410060): a, t, c, g, unknown or other
  modified_base (410096)..(410096): a, t, c, g, unknown or other
  modified_base (417384)..(417483): a, t, c, g, unknown or other
  modified_base (724960)..(725059): a, t, c, g, unknown or other
  modified_base (726106)..(726205): a, t, c, g, unknown or other
  modified_base (727470)..(727569): a, t, c, g, unknown or other
  modified_base (728849)..(728948): a, t, c, g, unknown or other
  modified_base (730296)..(730395): a, t, c, g, unknown or other
  modified_base (731863)..(731962): a, t, c, g, unknown or other
  modified_base (734124)..(734223): a, t, c, g, unknown or other
  modified_base (734441)..(734441): a, t, c, g, unknown or other
  modified_base (735752)..(735851): a, t, c, g, unknown or other
  modified_base (738576)..(738675): a, t, c, g, unknown or other
  modified_base (740924)..(741023): a, t, c, g, unknown or other
  modified_base (744360)..(744459): a, t, c, g, unknown or other
  modified_base (748430)..(748529): a, t, c, g, unknown or other
  modified_base (754323)..(754422): a, t, c, g, unknown or other
  modified_base (758664)..(758763): a, t, c, g, unknown or other
  modified_base (766093)..(766192): a, t, c, g, unknown or other
  modified_base (774408)..(774507): a, t, c, g, unknown or other
gaaatggaacctaatttttaaatatagcttgagtcagatctaaaggagacatggctgaccattttctgcaggactgacaaggagaacatctagaggggaacttggtaggaggaatgaaatctgatttgcagcagccggtctttcttttgagaaaattatcagactcattgataagggaaattaaatattgaccaaggacaatgtctttatttctcagtaacttatcaacaaatgactctagcctgtggaaagagaatcataattctacggaccttttaaatccgccaggaaccctgaatatctatcttttttgcttgacatgtctcatgacttttgcagccttggtgggcagcatttattcactaatttccctgctgaaaatgcagaacagaactgttgtgtccatgcttgtggcttcctggtctgtggatgatctcatgagcgtcctgtcggtgaccatcttcatgtttttgcagtggccaaacgaggtccccggttacttccaatttctgtgcaccacctctgccttaatgtatttatgccagggcctctctagcaacttgaaggcgactctcctagtctcttacaacttttatacgatgcacagaggtgtggggagccagacagcctccagaagatcgggccaggtgctcggcgtggtgctgaccgtgtgggcagccagtctgctgctctcggcgctcccgctgtgcggctggggcgccttcgtgcgcacgccctggggctgcctggtggactgctccagctcctacgtactattcctctctatcgtgtacgctttggccttcggactcctcgtgggcctctcagtcccactcactcaccgattgctgtgttcggaggagccgccgagactccactccaactaccaggaaatttcccgtggagcttcaattcctgggacccctcctactgcggggagagtggtttccctgtccccagaggatgctccaggcccgagtctgcggcgctctgggggatgctctccgagctccgacaccgtgttcggaccgggtgcgcccgctgccgctggggctgaagcctgcaggcgtgagaaccgggggactctctatggcaccaggagcttcaccgtgagcgtagcgcagaagcgcttcgctttgatcctagcgcttacaaaagtcgtcctttggctgcccatgatggtaaaagtgcagttgctcacaaagcgcgagtgtgtgtgccagacagtgtaaatgagtgttgggaccggcgtcgccggtttggggagtcaccaagagacacacagtgaagtccgcttccaagtgtatctcgctgggttttagacatgcacttagaagaaggcagttcgggacagggctagttggctgcgaaacctttactactaaatgcttctcctttcaaaagtcaggggcatggggatcgctttccgtcgcgagcgacttagttttccatatcggtggtggccaaggatattgtctcacacagcaaaatcagagagtattcagaaaaggaaagagggaattaaaaggttttttccccacaaccttctgtcatccctttctcgccgttccattcccgcctagagaggacgacgcccatctccagcagggcgggatagaggggaggagagatcagttgtggagggagaagacagggaacaaaacaggcttttgttcctccttccaggaggaagccgattaagaggtggcagagtggcgccccactgtgacgagcgcgcatgggcggaggtgagggtccagggaggcgacaaaggccattcggagaatcagatgcgggtttcacggacgcctgtttcctagctagcgtcccccacgttgtagactgtgcctttctggtggagtcttgaataggcagcgggcgcagatccggcactcaaaagctgaaacccctcccaaccctgggggtgtgccccgccgttcccaggagcccatcaccaaggacagggagccagctccgtagcagaggtccccgctgtccatcaggagaaggaactggaaagggaactgaggcagcgtgcgtggagaaaaggcttgagaagtacaaagtataattttaggttaggtctgaagttctcttgcccttgcagatgcacatggtggtccagaacgtcgtggggtttcagagccttcccttggagacattcagctttctacttaccctgctggccaccactgtaaccccagtgtttgtcttgtccaaacgctggacccacttgccctgtggctgcatcatcaactgcaggcagaacgcatatgcagtggcgtccgatgggaaaaaaagtaagtcctcaacactgcagtgattggcagcaatatgcattaggtgactttcagaaaagtggtctattaacaaagttgcctcagtaggggatggagagtccaaggataaatgtcagtggtaaatagtgagaagaaattataacatgaaacaatcactacaacagtttgggggtagattttaaattcagctggttttgaaaaaccccatgaagtgcctgtggtactgaataattattttaggtagaaaaaaaaaagggaagactaggattcattcagcacaccatgtcaacaaaggcacttagatgatacattcaccatagttcttagtccagaatagaaaatatattcccctcccaagtctagaatgagatgcagcattgctataagaagcttgcatttgaaaaaggattattaaccctctgaaaggagttgaaaactcattacattataacattattatgcaatggaacagtaaagaaaggcatttttgttgttttactgctagtattcttccagggttttggaaagttttcagagtaaggaatcagagtgcttgaaaacagttccaaaacaaattgtaagtgtaggcctctctctgtctcacacacacacacacacacacacacacacacacacacacacacgccctggtccaaacataaaaacaaacaaaaccctcagtttaaaaaaaaaagacacaagtgacagtttgttactgtgtgttcatgtatggatctagccaagttatttacttaaagaagattctgtggtctgaagagtacacctagaatgagagtggaaagcagggtcccttccagaactccctacagtgtaattgttcccatatgctaagacaagaaaagtgttgaggaatgagctgtatattttgactctgccaggaagaaaaaggagattattgtattattctagacaaaatataggatgttctatcacttaattaatctgagaatgcattagtgtatgctgcattaactgtcctattaattgtcctttgctcagagtatgcaagtatattattctttaacagagatgaaggttaaatttaaacagtccatctcaggctattttagggttgcaaaatctagaggatatcaaagtatactctgccatcaattcaacgacaaagttattttatataattagccatgaactggccatttttcctatgtcatagtgatggcatttaatatttagaatgtctagatatttttcaaattaccagaaaattttttattgttaagaatgccattaagttttattagtagtagatggcagatgcatttgtctttaaaataaccttagaacttataataatgatgtgtctctaaagattaatatccagaacaacagtgacagagaaaattaataataaacccttatgggccacttataaaaacatataacataaaggaaacaattcacaaacctcaaaactctaacattctaataaatcttagcattttgccactaaactagtgaacgagcccggtcttacaacatctaaaattgtgagaaggatggtctagtgccagtgaaaatgaaaagtcataatgaattggttgaaggcagtcatttttaagaagtggggaccacccatctcagagctgaaaacaaagcaaacaacagacttattcttgtaaatgacctatgaaatattctactttctgtactgcacagacagaagagtcttacggcaggctagcagaatcaacagtcacactcatatcacaggtttgaaattaaaaatatgtctttcgagatcaaaataatatttttttctaaaattaccattgcttttatttgtgtttattttaaaattccaaagaaagacttgaaatatgaaggcttatgaaaaagaagcatggcttcacaaataaaacattgtgagaaactttagcttaagatgcttatagttcaaatgactccattccctcttatgatccaggctgtgatatcagaaaattctgataataacaatgatgtgtttctactgtctgagaagccaccatcaattttcctattgatagtgtaacacaacaaaattttaaaaccccaaaggtagcacatgcttaggtgggccaggtggttgatcagctagagtatcttaattctttgatggttcgagttttatgtttaaactttttgtccataacaaactaagattccctctctttacatcctttatcagtcagtgaacttcagaagcaagagagagaaaatattttttcctaacatatttatcataggttaatgttgaagatgtaaatataattatacatctcaacttcactaaatgggaactgagagaagtgcaaccagaaaatgaatgtgagcagtggaaaataatttgcagaaataataatcctctcctgtttccaacaagaatctgtactactagtgtctcaaagtgtttttttgttgttgttgttgttttgttttagttttgttttgcttctcaaatgattttaacatagaggtctcaggcagtaacacacactgtttggatatggctttcagactcattttnnnnnnnnnnnnnnnnnnnnnnnnnnnnnnnnnnnnnnnnnnnnnnnnnnnnnnnnnnnnnnnnnnnnnnnnnnnnnnnnnnnnnnnnnnnnnnnnnnnntatggctttcagactcatnttgtttgcctgacatgacgttttttaaattaaacagctaaatgtcaaacaaatgtcaaacacattgtataaaaaacagatttttggtctttttttttttttgacaaaatgatagtatctggtaagtgacattactccgaaaaatgatttgtttttataagtggatgtaattactcacatctaaaattgtaattggcaagatgtgactaaaagcagaagactagagctaattcatattttatcaaggattttggaagaataaagattttgcttttaagaacaaaaattatatttatttttaagatgtttagtataaatttcaaaagattctagacaatattctgatggcttttaagtttcttgcaaattattaatcagtgaaagatctctatctttcacagacacacacacgaaatacaaaaaacagtttttaaaaaatctcaactatgtatttttttagtgatataaaagtaggagtcaggaactgtagcactgtcaaggccttcctcctataaataaatcaatattataaagataccatttttttgaaatcatatgttattcagctagcatcattgagtcaaggctaacctaacaaaccattcctatcacaccaagcatgattcctacaggttgcttcattcattcattaattcactcactcaataaataaatatttattagggaaaaagtcactatgtgtctagcactgtgctgcatgttcagtaaggaacagaaattcccaacccatgacccatgagctgaatttggttcaaagatctggtgtttaaccaatttttattgttacttaaaactaattttaattatggaccgaaattttaagatcaggatattttacatcaagtctatgaacgtggtttgtctgaaaaattagaattattgacaacacaacccctaatctccccacaactggctggagctgagaatcctccttagatggaggaagaactttcccatttgcctttgttaataattaaagcataggagatatacctaatgtaaatgacgagttaatgggtgcagcacaccaacatggcacatgtatacatatgtaacaaatctgcacgttgtgcacatgtaccctagaacttaaagtataataataataaaaaataataataataattaatgttacctaactggccccatagacactttttattttatatttttggttcattttttaaaaagacctaatctttaccctcaaagaacttaaaaatgattagttttgactctgattctcatattttcttcaacctaattttgattattaactatgttgttttaatttgtttttatagggattcgcccccttacaaccagcctctcatcttacattgtcaactttatgatactgttataacctattatctcaagttcaggtacattagttacttcaggcagaatttgccatttaagtgataagtcactaacaagaaatgtttccattgattacacttcataattactgtatttcctctgacttaaaaacagcacattgtgtaattctgcttccattaacataattctttcatgggtctgattagcaagaaaacaatttcaaataaagacaactccaattctgaaaacagctagctttaaattcatatcgttttacctgtaagcaatcttcagtagctttcgtctgtcaccccccgttttctccagtgtaaaatagaatcaatacgttttttattatgtagggttgttgtgtgttaaatgagataatcgatgtgcaaaatggcctcagaatgttctatcacatcatggtctcttgataattctcctttcttttcatagcctacctcacactgccccttgtcccttgtgacatggaggtgaagtctcctttaacacattctgcacactccttcaaaaacattactaatttttgctttatatatttgagattacaatgtgcaactaataaaattatagtcatagacatcaattttatcatgttatatcacaaaattgggattttatgacagcatttgttttcttaatggccttgaaatgacaatttgtcactttatatcttttttggagaacaatagaaacccatcaataatttaaacatccttttagttccttcacctttcacattcttaaagcaagttaaacagtataacttaattttacttgactatgttactagaaaaggtcagtaaaaatataaatgagacagtatataaaatatgaacatctgtttctacttctattttttctttgaatcaaacttgttcttgtttgtgttctggctcaaacaacaatgaatgatactaataaattctatttttcagtcaacagaattggtttataaatcttagattctgagaaacatttcagtaatagaatcagcatatgaatgacactcgggtatattgcaaaatggatcaaattttacttatcttttccatagaaagattatagcttttcatacatttttttctatcgaagatagctaaatgtctcagtataaaacacagagctatcaaagtagaaaatatgtttgaaacaaaccatgttttgacagatgaaagcaaaaacattaaattatatcttgtctaccaccttgatataacttcattcttaatatataaaacttatctagcatttaatgacattcaacataaaaattgtatcactttctgtcactttcttgctttttattctaagattttgcatcactccaccaactaatagtactataattattatttcatcatatttcacctgatttaaatcataaaaagttttatgcattcctgctaaactcttcttgtaataatcagctttatagacattgtaaagtgcttcaatttacaaaaaatattaatccatctaatttttaccagttcttttcacatttatttgtatcagaaatgtacatgttattttttaaaatttaaaagctgttttgcagtatagtctaatttttaatgtatgcacttatagacatataaatgacaaaaaattatataccaaaatattttaagaagttatatttattggtggtattcttagctgaataactcacataatattaaggctacttaataattaatttctagcaaaataaaatttataaataatatctcttatcccaaaatataaggaaatgtgcaaaatcattggtagactaagaaaagctaaaacaatgtatttgagaatttcctaatgtatggctaagtttttgttatgtaaggcttctttagagactgaaagagtttttaagattgtatgtatttaaagaccatcattttgtaaatgagaaaaattaggcacagggtggaaagataattttctgaggcataatttctttgcataactgacaaaaagtaaatgaagatagttttaaaatgtataataatcaagttgaatgcgctttctatttttatttgctatatatatacaatgttgtctttatctaccttactagccataaactgttgtttttatttttactcagtcaagagaaaaggctttgaattcaatctatcattccaaaaaagttatgggatttataaaatagcacatgaagattactatgatgatgatgaaaattccatattctatcacaacctgatgaactctgagtgtgaaactacaaaagaccctcagagagacaaccgtaacatcttcaatgctataaaagtagaaatcagcaccacgccctctctggacagctccacacaaagaggcatcaacaaatgcacaaatactgatattacagaagctaaacaggattccaacaacaaaaaggatgcgttttctgacaaaacaggaggtgatattaactatgaagaaactaccttttctgaagggccagaaagaagactgtctcatgaagagagtcagaaaccagatctttcagactgggagtggtgtaggagtaaatcagaaagaacccctcgtcaggtacagtaaaagttgttcttgctgttaaattgaaagtgatactaaatatgatagtcatgaaaaacattatcagttgtttgttttattcaatcaagcccaacattaacttcacttgcctcaattaatttccatgctatttaattttatttcaaggtctcttttgaaggactttttaattcttttaatcagtttaaaatctatacattttataataggaagagttaaacaggctctttaagaagggtagggaattcttttttaacctcaagtaacctgcataaattcagattagattcgcagaactcatggtccaaattaatttaatttgtatattttatttttccctcctccattccaaaggtataccttaagtctccaagggaagttttattttttcatgtaaaggcaaatatttatacaactagcagtgagaagtgttgttctgttgaaagtatattaggcagcttgcctatcagtcttactagaactaatccctccagtacccagcagaaaaaaaatattacagaatacattctcgtgagcatttgcaagcccttacgaatgttccatctccttaaatatggaagaatcattttataatattttataaaactaaaagaatttgcacatgaatttctcatcctttcctagatctcagccttccaaaaatggtgagggatccttcttattcattgaaatggcagtgtgatattgatatgagattttttctttccccaagctctcatatgtgataatcaagttgcccttgctttccacactattgatttcctaggaaaaaggagtctttttttctacatgagttaatggaaatcagaatctacatgcacctaatctctggaatcaaaagcattattttagaaataaatacactgctaggagtaatgtactcattgatcaaaagtatgatcatataacaccaactataaatatgagcagaataatttgagattttctttattctcattgattaaataaaactactagtctcctgataccattgttttaaaagtgagttgaatagtaaaataaggtgtacaaaatatattatacaaagagacaattgtgcatatgtttagagtttagaaatcaaaggaaaatatcactaaatatttgtcataaattaaatagtacagtaaaaggtggaggccaaagaacacaacgctccatatgtttaggaaaaatgtgtttccctagctaagaggggaattccaacactttcatcgccaatttgctcctgaataatgtaaacctcttagtgttgcacttagaaattgttaagttatattcataatgaagcgcatatatgtgtgtgtgtgtccatcccaataacttgtaactaccttctgtgctagtcacctatatcatcctcgtgattaccccttacagattacagctatcttgaatcttactcatattttttgttgtattcttctatcacaaatgtatgtacttctaacatactatattgtttagctttgctaattttgagccttctaaagatggtatcatgctatatatagtcttctggggcctgcttttgttcatttaacatgactaagctcaattttcttatttatttcatcaaaaccatggaaattattatctaaaataccacaacttaacatcctcatttaaaagccttggttatagtttggaaagtagggtcaaataactataactagaaacgtgaaagaatcagacactgcttgcacataagtacattgtcctgggagaatgatgaagaacaacttacccacaatcttctttaaatcgaaaattaaaatgatttatgtaaagtataaaactttgatcaatccaggtatctttcagctataaatattgacttgttaaatatagatatttaaacaactgtgatgatcaagtctttcaggaaacttctctgaaatggtcgctatgaaaaataatgattagtggtaaaagatggataatacaatattctggaaaggtaaaactttttatttccagggactaattaaaattaaataaaatactatcataaattttaaaacaacaggaagaaatcctaaaccacagactgacattttttgtataaccttcccttagtaaaagtacctgtggtctttaaggttagccttaaacacaaatacaaaattttaaattaaaaaggttctttttttttgaaagtcaaagttgaatagtgacctcttttttattattattattatactttaagttttaaggtacatgtgcacattgtgcaggttagttacatatgtatacatgtgccatgctggtgcgctgcacccactaactcgtcatctagcattaggtatatctcccagtgctatccctcttccctccccccaccccacaacagtccccagagtgtgatgttccccttcctgtgtccatgtgatctcattgttcaattcccacctatgagtgagaatatgcagtgtttggttttttgttcttgagatagtttactgagaacgatgatttccaatttcatccatgtccctacaaaggacatgaactcatcattttttatggctgcatagtattccatggtgtatatgtgccacattttcttaatccagtctatcattgttgggcatttgggttggttccaagtctttgctattgtgaataatgccacaataaacatacctgtgcatgtgtctttatagcagcatgatttatagtcctttgggtatatacccagtaatgggatggctgggtcaaatggtatttctagttctagatccctgaggaatcgccacactgacttccacaatggttgaactagtttacagtcccaccaacagtgtaaaagtgttcctatttctccacatcctctccagcacctgttgtttcctgactttttaatgattgccattctaactggtgtgagatggtatctcatcgtggttttgatttgcatttctctgatggccagtgatgatgagcattttttcatgtgtcttttggctgcataaatgtcttcttttgagaagtgtctgttcatgtccttcgcccactttttgatggggttgtttgtttttttcttgtaaatttgtttacaaaattctacaaaacattctaaatcacaaagtttaaaatgttcacattgtaatttaaaatgctagcaaaaacacatttaggactgaaaaccttatgaggacttttcctaagactaaaacaacttttaattcttacccttttcttcagcagcaaatattacatggaagtgaatgatgacttagaaaggactttcatttttatctttttcttcccagtgccgttttttgctctcaaagcaatgttaacatatgtatcgtatatagtgatgcattaaactgtgtggtagacacagcagttactctataaaaacactacttcttttgattgttttatggttgtactttcaaacacttaggctcaatttatcagtttgtatctaatggtactacatttaatagtaggtgttctcaggatattttaaaagcagatttgattttaaacatatttagtgagctctcttttatttctacaatatgcttttttttaattaaagtttatgttaacaattttcagaatattttcttggaagtcctggtaggagtgagaatatcatcaaattaaggttaaggtgtagaaattatggcaatacaatggcttcagtagatttaaatgtgatcccataaaatttacaagaattgaaggtattcataagactgaaattcaatttaaacatggccacacaattacttctttttgaacccctaataagtagaaatctaagcagtttaccattttgaaagttcagaagaaatagtaagaaacgtcagagttttttagttagaaagtcttaatgtgatagccaccagtatgactctttctgaaatgaaatgataattttctagaaccccacattttgtcatctatgaataaagaaaattggacttataaaataattggctggcttgtgggtgatcactctattttctcttttaataccaagttcataaaattaccctggattccattttctttccttttaatgttttgttttagagttccagaaactcactcatttatttttgtgaatcaaaaacatagatatcctgaaacttttaatctatttacaatcctatcattataggatctgtaaggtgcaaggtcctccattttgccagtagggtgttttaaaaacagattctgaaatattccctctcaaatgagagacaaagcagagggaggtaattgtgtttaaatttactacataaccacttagcttaaaggataaataaggccaacaagaactaattttaaagtcgcctgagaatcgaggaaattttattttcattttaaggaaaatgttttagctctctaaaaagagttttctaaagttatgttgtgtcagttgttaacagagtttagtagcagcgttggtttctatagtatttttaaaatattattatttatttaagtaattttcataggaaactacagaatccaaaagccagctagactattttgagctctttagatcagagcttctcaagttttaatgtacatacgagtcaaatgggtatcttattaaaatgcagattttgattgattaggtatgagatgggatccaagattctccattcctaataagcttccagatgatttctgtacaaaccaaggtcccacctcagacctataatcaaaatcccccagtgggctaatatgcacattaaaaattttaaagtgctgctttagattctaatggctagagaatgcgcatgagtttgaagtgcagggcaaaattaattctttctatttaatatacgacccataaagtataaggctggaagaaaatactcaatacgggtatctttttcctcttcctaaaaactgtgcatcttttcttttcactttaaaaaataaactatttaaaaaacgagaacagtgtattgctgttttctgttatattattagcttaaaatgaagatgcctaaacttgtctctgagtaatttctgacattttaactgaaatgaccatactagaaaaaatccacttaaaacctatttatagcctccacccagtcatcttaacaaaaataatcatctggaatatactttatttttgactacatccatttgtttgaagtgcttagtttattactagctgttcagaaaattgaaaatttgctacactgcctagttttttaaaagtacaaactttattgtttttataattattaaactaacttataattattgtagaaaatctagaaattgccgataagcaaagaaaaaactcacttccacctacccagagttaaccactgtttacattttgttgtataaaatatctggctgttttctatgcatatatttttacttttgacaaaaacatacaaaccaaaaaaagtcctgctgcatgtactgcatgcgctctgcttttctccacttcacagcataactttaacctcaatttaattgtttcagccctttgtgtcattatctggtatagtttagagtggctatttgaagtgtggctgaaaattcatccatgaatataaatttgttctcaagtatataaaatcttggaagttgaacctaagggaattttattctaaactacttcagatatttcatagtacattttgtgatcttcacagcatgcatcatttgctgcaatgagtaaaatagctctaactgctcacgttctacaaattgaagggaattagcattggatcaaagcttgtgtggaatcatataatttatctgttagctaagaattctgttaacattctcataaaagtctcctggcttaagaaacctaaaagattgtgtactgaaatgacccagctgtggcttaaatctcttcttggttactctctacttgaactcaagtgactaggaactcactacattttttaaactttttattgtgaactaatacatgacctacaaaacagttgcaaaaaaatagtacagagtttcaatatatcttaattcagtttccactaatgtaaagttacactgtacaatgcaattatcaagaaattaataactaatctctaaattttatttcagctttaccaattgttctctttctggttctggatctaatccctgatgataaatcgtacttgtttttatgtctccttacctccaatttgtaacagcttctcagtctttctttgtttcgcaggacgtttactcttttgaagactactggccaattttgttttttatttttggaatacccctcaattagtaattgtcttatttttcaattgacagaattaaagacaagaatatcacaaaagtgatgttcgtcttttctagtgcatcatctcaaaaggtacatgatgttgatacatcttatgatggtgatgtgaactttgatcccttcataaaattggtgtctgccagatttctctatgtaaagtttctatttttcccccttgtaatttttaagtgtcttgtggagagacattttgaggttatgaagatattatgcttcatatcacaacttgccaactaactttagcatgcactgatgaatcttacctgcaacaattattatgcgatggtaattttctatttctacgattcttcttttggtttcattctttgtatattatgaataatgtggtgataaacatttttatacatgattcctgatgcacataaacacattttatttatttttttgtttttttatttcaataggtttttagggaacaggtggtatttggttacatgaataagtcctttagtggtgatttctgagattttggtgcacccatcacccgagtagtgtacactgtacccaatgtgcagtcttttagccctagctagcccaaccctttcccctgagtgtccaaagtccaatgtatcattcttacacctttgcatcctcatggcttaactcacacatatgaatgagaacgtatgatgtttgatttttcattcctgagttgcttcacttagaataatagtctctaattccatgcaggttgctgtgaatgccattattttgttcctttttatggctgagtagtattccatgtatatatatatatatatactacaatttctttatcaactcgttgattgttgggcttttgggccagttccatatttttgagattacaaattctgctgtgataaacatgcatgtgcaagtatctttttcatataatgactccttttcctctgggtagataccttctagtgagattgctggatcaaatggtatatcacttttagttctgcaaggaatctccacactgttttctatagtggttgtactagtttacattaccaccaacagtgtaaaagtgttccctttttaccacatccctgtcaacatctatttttttttttattttataatcatggccattcttgcaaatgtgaggtggcattgcattgtgatttagatttgcatttccctgatcattagtggtgttgagcatttttctatatgcttctggccatttgtatatcctcttttgagaattgtctattcaaatccttagcccactttttggtaggattgtttgttttttccttgatgacctatttgagttctttgtagattctagatatcactcttttgtctgatgtatagattataaagatttttttcccatgctgtggcttgtctgttaactctgctgattatttccttcactgtgcagaagttttttagcttacttaagtcccatctatttatctttatttttgttgcatttgcttttgggttcttggtcattaagactttgcctaacccaatgtctagaagggttttgccaattttatcctatagaatatttatggcttcaggtcttagatttaagtcttgatccatcttgagttgatttttgtgtaagatgaaagatgaggatccagtttctttcttctacatgtggtttgccaattatcccagcaccatttgttgaatagggtatcttttccccactttatgtttttgttttctttgtcaaagatgagttgactataagtatttggttttatttctgggttccctattctgttccattcgtctatgtgcctatttttataccagtaccatgctattttgatgactatggccttgtaatatagtttgaattttggaaatgtaatgcctccagatttgttctctttgcttagtcttgctttggctatgtgggctcttttttggttatacaagaattttaggattgtttttctagttctgtgaaggaatgatggtggtgttttgatgagaattgcattgaatttgtagatttcctttggcagtatggtcattttcacaaaattgattctacccatacatgagcatgggatgtgcttccatttgcttgtgtcatctatgatctctttcagcagtgtttggtagcttttcttgtctttcacctctcagtattttattgtctttgcagctgttgtgaaaggggttgagttctaggtttgattctcagcttggtttctgttggtgtatagcagagctactgatttgtgaacattaatttgtatcctgaaactttgcagaatttatttaccagttctaggagctttttagatgagtcgttagggttttccaggatcatcgcaaacagcaacagtttgacttcctctgtgccaatttgcccttttttcctttctcttgtctgattgcttgcctaggacttctatgttgaacagaagtgatgaaagtgggcatccttgtcttgttccacgtctcaggggtatgctttttacttttccctgttcagtataatgttggctgtggatttgtcatagatggcttttattaccttaggatatgtcccttctatgctgattttgctgagggttnnnnnnnnnnnnnnnnnnnnnnnnnnnnnnnnnnnnnnnnnnnnnnnnnnnnnnnnnnnnnnnnnnnnnnnnnnnnnnnnnnnnnnnnnnnnnnnnnnnngtattgagacgtgaggtactattctattaatcatgctatttgttgcctgaataacttggtttttttcattgttattgttatataggtcctatgagatttatgcttttagggggttctgttttggtgtattttgaggattggtttcaatagttagagctccttttagcagttcttgtagtgctggcttggtagtggcaaattctctcagcatttgtttgtctgaaaaaaactgtgtctttccttcatttatgaggcttaatttcactggatacaaaattattggatgatgattgttttgtttaaggaggctaaaagtaggaccccaatcccttctaggttgtaggatttctgctgagaaatctgctgttaatcttataggttttcctttatatgttacctgatgcttttgcctcacatctcttaagattatttcctttatcttgactttcggtaacctgatgactatgttcctaggagatgatctttttgcagtgaatttcccaggtattctttgactttcttgtatttggatgtccagatgtctagcaagactggggaggttttcctggattattccctcaaatatgtttttcaaactttcagatttctctttttcctcaggaacacgatttgttcttaggtttggatgtttaacacagtcccaaacttcttgtaggctttgtacatttttaaaaattcttttttctgtatctttgatggatttggttaattcaaaagcctgtctttgagctctgaagtattttcttctgcttgttcaattctattgctgagaccttccagtgcattttgcatttctctgagtgtgtccttcatttccagaagttgtgattgttttttatttatgctttctatttcactgaagaattttcctttcgtatcctgtatcatgtttttgatttcttgaagttggacttcacctttctttggtgcctccttgattagcttaataattgaccttctcaattgtttttctggaaattccgaaattttgtcttggtttggatctactgctggtgagctggtatgatcttttcagggtgttaaagaaacttgttctgtcatattactagaattgtttttctggttccttctcatttgggcagactatgtcagagggaagatctggaattcaagggctgctgttcaggttcttttgtcccacgggatgatcccttgatgtggtgttctccttcttcccctaggaatggggcttccagaggccaaactgtagtgattgtttttgctcttctgggtctagccacccagcagagctactggatttcagtctggtactggggagtgtctgcaaagagtcctgtgatgtgatcatcttcagatcttgcagacacggataccagcaactgctctggtggaagtagcaggggcatgaagtggactctgtgagggcctttggttgtgtttttgttcagtgtgctggttttgtgttgattggccttcggccaggaagtgacactttcaagagtgcatcagctgcagccctatagggaggatgtaaacttgccctagggacacctggttaagtattcaggtttctcaggtggtgagcagggccatagagctcccaagaggttattgcttttgccttcgactaccaaggcagatagagaaagaccaccaggtggtagcagggataggcatgtctgagctcagcctctccttgggcagggcttgctgtagctgctgtgggggatgggggtgtggttccctgtccaatggagttatattcccaaggagaggattatggctacctatgctgagtcacacaggtcaccaggaaagtgggggaaagtcaacagtcacaggcctcacccctctcccaaatgcagcccacagtcctagaggcccatctcactcccactgtgccccactaacagccttgcgtctatttccaggcagccagtgaccaggctgagaacttgcctcagaccacaggcctccctgctgagaatgcaagctgactcacaggtttttggggtctcagggagcctgcagtggtgatccaattccttcagtgggtctgtggattcttttggctttcttggtatgttcctgcagtagttcttggagcaaaagttcatgatgtgagtctccacatgctgctctgtccatctgagtgggagctgcaagctagtcctgcctcctatctgccatcttcacaaggtcttatttctaccattctttctatatttagcataggaattctactgtaaggaaaagctatctcttctccttcgtttacctatttatttatttatatcagtatggattcacagatatttattttaacttatagatcataaactatgctatcatttattttgttaccccaactatcctatatttggccattgggagctctttcatgttggtatctctatctatccaacatgacataatcattttttagcattttctgactttctgacagcatgagatatcccagcatcattgtgtattttccttaacctggccccagaatcaagagtttttccaaggagctctggttcctttaattggaaaatagtatttagaagccaaaatctgggtgctagatacactcattgctactgaggtgtcttgcttctaggccctaacctacagagctaggaaatatatatatatatatgtgtgtgtgtgtgtgtgtgtgtgtgtatacacatgacatatacacacatgaacatatatatacacatatgcttatgtgtttatctatatttctatattaatcaccccatattaataattttaaaacaagtttatactgatacctccaattccaatcaactactacagagttcattcaagcctttctcttttcttatttacttcctttcctgacagtgaaaaaacaggcttttatccacaaatacgtttacttttttgcccagttctgatatacacataaagaaattttagaattgctaacccacacccctgtaggaaaaaatattaagagtataataattgcaaatggttattacctttagcttacaggttacagtcaaaacattatcttccaaagttacttaggtcagttctttgcatttccatttttccattcccttcattttatattacatttttcattatttatatttgactatgtgaagcatgatcaggttttcaagcatcagaactatataaaacatgatgtggtttggctgtgtctccacccaaatctcattttgaattgtagctcccataattcccatgtgttatgggagggacccagtgggagatccttgaatcatgaggggtggtttcccccatactcttcttgtggtagagaataagtcccacaatatctgacagttttataaggggaaactcctttcacttgattttcattctctcttgcctgccacgatctaagacatcccttttcctgtctgtcatgattgtgaggccttcccagccatgtggaactgtgaatccataaaacttttctttctttataaattacccagtctcaggtatgtctttatcagcaacgtgagaacgggctaatacaaaaggcatatgcgcttcattcatttttcttccctgattttatttttctcattctttccaccttgttcctacataccttctgtaagtaaccactcatatagtttatggtttaacgttcctgtatttctttttgcaaaattgggtagatacatgtttgtcttcttatatcccctcttttcttacacgtagataattcatgctttacttttttccttaacaataaatactggacatctctacatattagttcatagacatcttcctcatggctgtgtaataacccagtgtgaatataccatagtcaatttaactactctgtagcttgtttccaatattttgcaataaaatcagtactgcaatgagtaactaaccttgtatgtatgtatttgcacattgttggaggtgtagcttcaggataaattcttagaattagagtttctcggtcaaataaaaaatgtagttttgctaggaattgccaaatacccctctagaaggttataccagtttctactcccaccagcaatgtgtgaaagaggatcttttttcctaccacttcagtaacagtgtatattatcacacttttaaactttttccagtgtgataggagagaaatgatttctcagggttgttttaaattatacttatctaattgtgagcaagcttgaatagtttttatatatttaaggaacttctatctttttctctattataaattgttattattttttccaatttttatagagatttctttttcttcatcttctaatttttaagagttctttacatattagaaatattagttcttcatccattatatcctatgttacaaatatttttcagcatttatcagataccttttgatttttgtttatagtatttttttaccatgcacaattttttgtttataataaaaattatcaatctttttattaattgcatttgaatttttttaataatagttagaaatccagtttaaaatggaattcacccatgcttttttctaagtacttgtatggcttaattatttctattttgatcccaggtccatttggattttatttttgtggtagatgtaagatagggtataattgtatattttttccaaatggttgcttattattattaaaaagtattatttatttaaaggtcaatcattacccacagtgagttatcgtctttatcttatacatttctatatctacttggatctatttctaggctttctacttttttttttttttttttttggagggagccttgctctgtcacccaagctggagtgcaatggtgcagtttcagctaactgcagcctttgcttcccaggttcaagtgattttcctgcttcaccctcctgagtagctgggactccaggcccaggccaccatgcccagctaattttttgtttttttagtagagcacgggatttgcaccgtgttagccaggatggtctcgctctcctgacctcatgatccacccaccttggcctcccaaagtgctgggattacctgcgtgagccaccacacctggccatattcactcttttttgtcttcagtataaatgaggttttctctatcattataccctctcactggctattgtttgtgtgtattaaaggtattgatttatgcccgtaaattttatatctgccacattactgaattcttttatcgtttaaatttattttatcattatcaaaaatttataagtataatatcatatcatctgcaaatagaaattgctttactacttctttattaattcttatgcctctgtttaatttctcttgtctgattatattggctaacactcctaaaacattgttgaatagtggaggaggtggtaagcattcttgccttcttcctgattttagtggaaaggtttctgatgttttcctattaagaaagatgacagctctcactactttgtgaggcagataatttaaatttctgctgctgctgctgatgatgatgatgatgatagctagtatttattgaatacttgctatgtttcacatgaggttctaagtactttacaaaaaattgctcacttagtattcacaaaaactctgtgtggtttgtactgttactcaattttacagatgaaaaaactgaagcacagagaagttaagcctaaggtctatcagagcctgtgaacaaacttcagttatctgattccagagacagtccatatgttcactaccatacactgtttcggagagataattttgatagttagcaatcctttcctacactgagtttaaatctattcccctcacagaggcagattagtatcacctaggggatctttaaatatgtcacaatctcacccatagaagttatgatttaattggtctggagtgagatttgggtattattctctaaaactctgtgtgtggatatttgaaaaatatataacagagaacttatatttagagtatgtaacttataaagaacaccaatagtacaacaagaaaacaatagacaacccaatagtatgtgggcaaaagatttaaactgatacttcatgtaaaaggaaatccaaataatcatggccatgtgtaaaggtatatctcaattaaaataacagtgagtgaccaccacacacccacacaaatagctccaattaaatattctgaaaatttcaacagttaatgagaatatggaaaaacttaaatgtatataaactgttggtacgataaattgttaaaaacactttgtaaaacaggttagaaatatttccaaaagttaaatatatccatgccttatgcttcagcaatgacactcttggttacacatcctagaattgcactgtccaatacattaaccactagtcacatgtggttgtttacatctaaataaattaaacattttttaaatttaaaacttcattcctcaggtgcactaaccacagctcaagtactcagtaaccagatgtggctggtgactactgtactgagcagcacccatatggaacaggaccatcttgcagttctattggatagtgccacctaaatcatatttacatgctggcagctcttttttttttcatagagttagcatttaggaatggaccaaaagtccatcaacattagaatacattgttgaattatttttacaatagaataccacatgcggaattgtatttttcatgaagccagtgaagctgaaactttgggcaactcgcttgtgctgatctcttccaaggctgggaggatccctatcaatgtgttcatgggaaaatatgttttcataaagttagcaaaaaagaagatttctatacttttttaaagaacaaagctatatatgctttcaagccccttgaaatctggttctacctctaactaaaaaagaacagaacaaaactaaagctaacaaaacatgaatgagttttgcaaacatgacagaaatgtagcataaaaagcgctgacaccctcaagccctttttgcccatgctactgcctagcataaagcatcccatattgtacatttgtcatctgttgtttggacccaattatgtcttatctctgttaaatttcatcctgcttcctttaatttactctttcttaatttcaatagcctttcctaatgctgtaaaaaatgctttcagatgctgctcctaagatctggcttctatactatgataccaaaatttgtgtcacctatgaacttaataagttatccttcatgtttctatccaaaccattgattgtggatcaagacagggccaaagacagaagccctgctatacactactagaaacaagtcctctcattcatttttatttatttaaaaacactgttaatattttgggttcatatagttattaatttacttagttgcccttgcaatcaatatgtttttcctccctcttgttcacaaagattccattaggaaattacaaaatgctttaatggaatactaacataaaattttcaaatgcatttctttcatctgccattagtttattcagtaaatatttttcatagaagcactgtggatataaagatataagcctcctgctttcaagttccacacaggcatgtatgtgaagaagattttcaaacaattagctgtacttcagtgagaaaaaaagtgtacaggatatagacaacgcacttacagaccacagaaggtggagtggtaagtccagcaacattgaggaagaaaggaattgatccacaaagacttagttgtagagaaatcataccgtgttttgggtcttacagctttttttttcttggctttcaaactctgtcctttcatcttagaaagatggatcttagaaactttcatggatctttgaaactttcatggatctttgaaactttctaggaattgatgtaaatatcacttgtctactttgttgaattcactgctttctattctatatttatttatttatttatttatttatttatttgagacagggtctcactctgccatctaggctggagtgcagtggtatgatcatagctcaccatagcctccaactcctggactcaaaagatcccctgccttagcctcgtaagtattgagattacaggtgtgagccatggtgcctggcctgcttcccattttaaaaactgaaaatatttgcacagttttaatgttcccatttgctttaaggacatcagcaacaaccatattcatacagcaacttttcatggtaactttcagtataattattttcagagagaaatttgcacttctgcagtagcaaggatctctcattatttttattttaaatttgtctttcttaatattcacaaatactttcttagtgctttaagattcatttacaaaggatacagaaacaagtttggagctgaggatatcagcttcttctttgccatcccttgacttgatggcattagctgcaagaagtgggcctattccttattttgaccttttgatttaaacataggtttccaaagacctactttgttgctttagtatttttgcaagccacagattattacatttatttagacttcctaacatcaaacttcccatcttttgcaatgagtaatttgttgcataggtctccctcaggccggatctgatctgcactaattttaaagatgaaattttcctttatcccttaactgcatcacttatgattatacagccaaaattgcagtcttgacactcacatgtaggtttttttttcctgtttttccccccagtttgccttctgaaagttgaaatgtatctagcctactaagttcagcatttttcttctggatatcacatactctaggaattaatagttgtttttctccttaggtatccaactcttctactttcactaattatttctctcttattgataagaattatattctaagaaactgttccttcttgcttcctgtactctctgtgagatgaagctgtcagcaaggcaaggcaaaaatatgccatctgatttgctttatagtttaatagatcccagcagaatcatttgaaaacattgccttgctactgggcaaacacagattctctccaccttcaaaaataatctctattcaagagccaccttttctataccttaagctgtgatttagaaatatttatttagttcagtggcactatctgcaaagccagaaaagtgtcaacacaaaaagcaaattaataccacttgctaacaattattagcaatgtataagagtcaccaattttaagcagttataggaattaaaagagaaaattttcagaaaatagctcacagtgttttgcatttcatcctttaagataaagataaaatttgaaacagctttcttctctcatgaatcatacaacactaagtggtaaaaccaggactcaaacgcattcgtcatcctgtgatacaacaaaaaattctataatattttagtgtaaaagtctagtgtgtgtccattcattttggaacaaatattactctagataaaatgatatttaatatcctttgttttaatcactaattatcatgtgttttcactttagtagtggctagtctcttatgaaatgttgcaggtagagcacgggctttggaaacaggcaggcctgagctttaaatcgccttcaaatatttcaagattatgactcttattaactgcgtataacttaattctgtaaccttaggagggtggctttacaacttttgattcattgcaataaaaatgaagcagaaattactcagagatgatgtcatgtaattcaatagaacatagtacagtggtatcaggggaggctctgggatttctacatagagagagcatcagaatgacaatattgtggaaggagtgtctagagaaattatcttaaagttctttgcatataaagctccttggttttcattagagagcatgtttattgaagtggctttgagaacacagtgaagaatattgaaaaggatactaagaccctcttcggttacccattgacacaaccactacatattatatgaaatattacttaaggcaaataatataatttctgatccttagtaagcttataaaactactatgaggattcaatattatgataatttgtaaataatttcaaataagggccgggcgcggtggctcacccctgtaatcccagcactttgggaggccgaggcgggtggatcacgaggtcaggagattgagaccatcctggctaacacggtgaaaccccgtctctactaaaaatacagaaaattagccgggcgcagtggcgggcgcctatagtcccagctactcgggaggctgaggcaggagaatggcgtgaacccgggaggcggagcttgcagtgagccgagatcgcgccaccgcactccagcctgggcaacagagtgagactccgtctcaaaataataataataataataatttcaaatacaattattgacacacgtatatgataatagtacagaagtactattgagagaacctccagatatgcatgtatttcatagagtaggggctctataatatgctgttaactgaatgaataaatttcagtgaaagcaactgtgtttttcaagctggagtgtggaggtgatttaggtgtttgtaacagagttgtttccttgctctttggtaaagaaactcaaaggatatcaaagacttcctaataatagtgcaccaaagatacctcaggccatgccttcaacttctaacagttttaaatgactaaatggaccatcagtctctagagcagaggaaagttgctaacaggcctgaaaacgctgagggaattttgattccaatgtgaagacttaagttccacactgaatttaaagttctacctggaactctaggttcaaagtaggatacagagtgattagaaagaaggattacaagcttagactaaggagaaaggtgatatttactacaccaagtgatgactgacaatttttgaacatttttggggaaagaaaggttataactggccatctttatgtgaaaaatattaatttataatagcatttattcgttttctagtattacataaagtttaacttttatatgagagttgcagtattttttacaaaagtatgaagaaaaagttattgtaacatgaatctttgacaagatattcacattacaggtgtaagctctgacttgtctttaatgaacctgacctctggagaagtacttactataggaaaatatcataaatccagccagtggttctcaacctcctccagacgttaaaacttaaaaaaaaatactaataccaaagcccaacttccgaataaccaaatgaggatcccagcaggttgggactagcatttagtgtttcttaaattaatgattccaatgaacatcttagactgaataacactagtttgccttttataaatcaaagttataacataatgagggaaaaagtgttccaattttaattagagtccttctcttatgtttattggagttacattcagctctgtgaataggatgagacgtcattttgtacgttaatttgagcaaatggtgaaaattaagcagagttgacttgatccaatcttcctgctgtttgccaagtcatcaaggggtaataatcatgagcatccatgaacaaatggtattggtttctctgagttagttcctacattgatgaaatgagtcatggccatttttaattatttaagatccaagagcacatatggaaatagttgggtttttgaacttgtcatttcagccaaatttcaattttagtaattattctgcttacctcatttccccatgatattatagggttgttgttgtttctttctttctttttaaattgtactcaaagcttcctgttctcagctgtgtaaattgaaaaaccacaatggtttcaattcagatgcaaatagaaataaccattctgaatgatctattttatagtttaggataaaagaccattaaaataagcaagaaaaatatcagagatagagaaaattgacacaatttactaaaagcaactttcttctccagtgaaactttttttgtttcagaaagtcaagatattgtcattttaaaaccttgaagaaagcctggaccacaagaggaaaggcggtttccctaatcattaccttaattgttatttgtgtagtacttagcagtgtgtaacaaactttcacatgcattgactaatttcaccctctttctagatagtcagggaagatgttttcttcctctttgactgacagttgaactgagattaatatcccaatggtgtgttgataaatgtttaacaactgcaactggcattgtggggaaaatgtgtatgtgtataagtgtgtatatatataagcttatatgacctttactgatataaagaatgtgtagcacataatttacaaataatattaacatagatattactttgtattgtaatttccatacaactacctgattctcacagaatactttggttgatttttacaaaaatcttataaccattgccaacctgtagttacaactgacaatataaatgttggttaacatttatatatactaatgagtaagataaaaattaaataactaaggtatatgctaaactcacttgtcaatgagtaattttttattgaattacacaatagttttcaaatatacaatttcctgtgcatctcttcccaagtctgcattcaatgatgtcacagtgctagctttaaatcagccatggtgggagtatttatagcatgcaagtcagaaaatgcgacaaattaggactcgtgatgtgcagcaacacaatattatatagtattttcaacatatagatacaatagatggaaataatctcaagaacatgagtaataacaaaatatattagaataattgggagtgatgagttttgagtatttattgcctttgtttttcatataattcagtttaagtttatataatttatttttaataatcagcttgcaagatttctaaaaattgcatgagccagtttgagccaactctagcacactcctgacataatccattctttaagaaaatacagcataaaatgcattcaaaaacaaccaaagtctgatcatataagccataatccctccaagctggctgtcctcaactgctctttccctctctgccctctcttagactggtcttttctgacccttcttaaaatttgattcttgctctgttttttcatttatgagcctgtcctttaccagacacctcacctgagagttggtttaggtgtctggtcttcccaatttgactctcaactttccccaattaataggagttggatttgcttccatttcaaattcaagctctaattcagcaacacttacttctctccttcctctcaccatatccaaaagacacaataatcagtgggaaagactcaaacacccaagttacaaggctggcattattatacattttaaactcaaggtcataccttctgactcaattttagtgctcttaaaaacaacaacaacaacaatgacaaaaaatatatatataatataataaaaataaaaaccctttctttaaaataaggagataacagaaaagaccatctattttttttaacctctactccctcactactccagtctgatagtctgatagaaatgattcatgaagagctaaagtgttaaaaagacaaagggaagagcaataggaactcgcacctacaaagttcttacatacataataaagtctgatcttgatatttatattcctaaaaatattttgttgatatcaagctttatttgtaattgtgttttatagaatcatattttgtttacatttagatatattataatttagatttaaactccctaaaaatgataccctaccaaattatataatgattaatttaaactgtctaaaaatgacaccctaccaatgccctcatactaagtcacaacaaatttagatttgtggagactttgaagcaaaagaagagtaacgaagtcatctaactacagacagaaacattttaagcctcccattgctacaagttaaaattcataaatcaaaagaaaatgtattttaaacagatatatttataatcaagaatactgttgctttagtaatgtcttaaacaaaaatgaaaatttcttaataatggaaataaaaaacatgtgaactctactattcctcaacaattaattaggtgcttgaatttgtttcttaagtgtctgtgacctgtcttgtaaaatgagaattgttagttgatcccacactaaacaaacatttcctaatttaaaaatgggagttgatccgaatgaaaaatttatgtaattttatatgatttataagttaaaattcagctaggcaacgttaaaaaaaatctgtttggaacaaaatgttccaatgagaatctcagaattcagaccacctcagtgctttttagacttaggttcaaaactagacacacattagcatatttataattcttgattgctggttcctctatctgagcctaaggaatcaggaaaaatattgaatagtcaagaaattatacactttcaaatattaaatattttgaatcccttggctgtgtttttctataaagaaatcacatttggtttgtttgtttatttgtttgtttgagacagggtctccctctgtcacccaggctggagtacaggagtacagtggcacagtcatagctcactgaagcctccaacttttgggctcgaggatcctcctacctcagcctcctgagcagctggaactacaggcacacaccaccatgcctggctaaagtttagtttagtttattttcgtagaaacagggtcttactatgttgcccaagctgggctccaactcctaggctcaagcaatcctcctgccctggcctcccaaagtgctagggttacaggcatgggctaaagcccaaaaagtaacttataaatgatttcctgctttcctactatttttaaaattatatatatatatacttatatatatataattttacatatattgtgtttttagaatcatattttgtttacatttagatatatatatatcaaggtttaaaaaacattacctttaactggtagagtgtatatgttctttaaggtattcatggttttagtcttgctctagaaattacgataaaacttgattttaaaggtatttcccaaaatctgccttcttaacttgctgctcacattctaagaataagtcagttcttcttagaagtattatttattgctttttttggtcagtatctcaatcttcatatctgttctggttttttagcaagttggtatcccagcactcactattctttctaaaatcttctgatatttaaaaatccttcctcattatagttttttacctacatgaactatagacttgctgatttaagacaatatatttctgccttgtaatctgtaagaaggcaattatttgttttataaataaagaagggaggagttaactacaataataaatagtagatggaagctactaacagttggaatgctattagaagatcattacaatagccattctaacacatgtgaagtgatatctcactgtgattttgatgtgcatttttctgatgactagtgatgttgagcatctcatcacatatctgttggccatttgtatgtcttctttggactaatatctattcaaccccagagcatatttttaaaagttggttattaattgttgctttttctatgcattgagttgtatgagttccttatatattctgaaaattaacctgttatctgatattaacctcttatctgatatatggtttacaaatattttcttctattctgtaggttaccttttcatgctattgattgtttcctttgctggacaaaagctttttagtttcatgtatttccacttgtctgtttttcgttttgttgcccatgcttttggcattacatccatgaaatcattgccaatagtaacatcataaagttttttccctatattttcttctgatagttttacagtttcaggacttatgtttaagcacttaaaccattttgagcaagggtccactttcattcttttgcatgtggatgtgcaattttcccagcaccaattattgagaatatgatactttccccattgtttattcttggtgcccttcttaaagattagttgattatataaatgtgggtttacttctaggctctctattctgttccatttgtccatatgtctgtctttatgccagtactatatcgtttaaattactatagccttgtaatgtattttgaaaatcaggaaatgtgatgcctccagttttgctcttccttcttaaaattgttttggctatttggtgttttttgtgattccatatgaatcttagaactatttcttctctttctgtaaaagatgtgattgggttttttggtagggattgcattgagtctctacattgctttgagtaatatagacattttaacaatattaagttccaacacaaacatggaatatcttctcatttgtttatattctttaattttttgtcagtggtttatagagttcagtatattagtctttcatctccttagttaagtctattcctaagtattttattatttttgatgctattgtaaacaggattgtttgcctaatttcctttcaaatagctcattgttagtatatagaaacacagctaatttttgtatgttgattttgtatcctgctgtattactgagtcatttattaattataatagttctttggtagagtctttagggttttctatatataagatcatgccatctgcaagcatggataactttaactttttctttctcacctacatgcctttttttcctgcctaattactcaggccaggatttctctactatgctgaataaaagtagcgagagtgggcatccttgccttgttcctggtcttaaagaaaacacttttaaaagctcttcactattgagtgtaatgttagctatgataatctcatgtatggcttttcatgttaaggtaatttccctctatttctagtctgttgagagtttttaacatgaaaggatgttgaattttaacaaatgcttttttgcatctattaagatcatgtggttcttatcttttattctgtcagtgtggtgtattaccttaattgatttttatatgttgaaccatacttgccttccagggataaattgcagctggtcatgggtgtctgatcctcttagtaagttgttgaacttggtttgtcagtattttcttgaggatttttgcatctatggtcatcaaggatattggcctgtagttttcttttcttctgatatttttgtctggctttggtatcaggcaacactggcctcataaaatcagattgaaagtgttccatcttcctcaattctttagaggagattgagaagaattggcattaattcgtttttggatgtttgttcaaattcactattgaagccatttggttctaggcttttctttggtaggaagtttttgattactatttcaatccctccactgggtataggtctgttcagattttctgtttcttcatgactcaaccttggtaggttgtatgtttctgagaatttatctatctcttccaggtaatccaatttattggtgtatagttgctcatagtagttttttacaatctttttattaatagtttggttccatcagttgtaatgtctcctgttttatttctaattttatttatttgggccttccctctttttttttaatctactagtggtttgtctattttgtttatactttcaaaaaataaactcttacttttgtccatttttgtcacatttttattctatttcatttagttttgttctaatctttattatttccttctttctgctaactttggccttagtttgttcttctttttcagcttcttgagacgtaaagttaggttgattatttgagagtttcctgctttttaaatataggcattgactgctataaacttctctcttagtacctcttttgctgcatcccctaagttcaggtatgttggggtttttttgtttgggtttttttgtttgtttgtttgttttcatttgtcttaagagactttctaattttccttttgatttcttccttgacccattagttgttcaaggtgtgtttagttgtcacattttgcaaattttccagtttttcttcagctactgatttctagttttattctattgtgattggaaaagaggagaaggtatattctgctgctctttggtgaaatgttttgtatagatctgttagattaatttgttctatactgttgttcagatcctgtttccttattgatttttttcaaatgttatattattaaaagtgagatattgaagtctctcacaattatcatattatttatttcttttatcagttatgttacattttgcattgtatatttaagtgctctgatgttggatgtgtatacattcatagttgttatatctttttggtgagttgatcattttatctttgtataatatccttctttgtctcatgacagtttttgacttaaagtctattttgtccaatataagtatagccagtctttcttttggttaaaatttgcagcatgattttttccatccctacacttttggcctatatgtgtccttaaatctaaacttaataagtttattaagtttattaataataataagttatgtaaacttaataagttgtcaaacttaagaagtttacataaattgatccaatataagttggatcttgttttttttcatccattcagctacattatgtcttttgattgaggagtttaatccctttatatttagagtaattaatgtacttccttttgatgggcgagtacttactatagccatgtttttttactaccttgtagttgttttgttcatctttttttccttgctgtattcttctgtattttgttttgtatttattgctatactttgatttccttctctttttttatggctcttctgtatgtactttctttgtggttaccaagaagcttgtataaaacaactcatagtcataacagtttattctaagctttaaacaacttaacttcagttgcatacaaaagctacacttttacttctccccccacaaaccccccacacacgttatgttcttgatgtcatgatttatatctttttatattgtgtatcaattaacacattttatggttataattatttcagtacttttgacttttttatattatgattaaaagtttacccactaccattacagtattatagtatttgtctttatatttacccttaccagcaagttttatactttcatatattttattattgctgtttagcttccttttgtttcaacttgaagaacttcctttagcatttcttgttaggcaggtctggtaatgatgaactccctcagattttatttgtgaaggaaagtctttatctctcctttatttttgagatcatttttatcaggtatagtattcttagcaggggtcttttctttcagcactttgaatttattctcatctaccttctctggcatgcaatgtttctgctgataaatctgttgataaccccacggagatttccttgtatggaatgagtcacttttctcttgctgctttcaaattctctctttgtcttcaaattttgtcagttcaattatgtgtctcactgtgaatttctttgggtttactctatttgaatttgtggaacatccttgatctgggtgttcatttccttccctagatttgggaagttttcattcattatttctttgaataagctttctgtctctttatctctatttctccttcttcttacactcccataatgtgtatattagtccactcaatggcatcctataagtcccttaagctttcttcattcttttttctctttgcttttctaactagataatttccagtgacctgtcttgaatttcactaatcctgtcttctgtttgatctagtctgctgttgaacttctctagttaatttttcatttcagttatttactcttcatctctatgatctgtttcacattttcttatattttctatctctttgttgaaattctccttttgtttatatgctttgttctcctgaactcactgagcacctttacaagcatctatttgaattttctatcaggtaaatcatatctctgtttcattagggttggtttctggaagattatcgtgttgctttgtttggaacatattttcctgtttctttattctcgactctttgtgtttatgtccgcactcccagtcttcatggattgaccttgtacaggagaggatcctcaccagtcagaccagccagagattccaggggcccctcaaatcctcatgctagataaaactgtgacctttgttctcactgatcatcaggcatctagaacatgctaggtcttatcagagttctgagacagataagacagatgtcaatgcctctggcagccctcagcacaatcagagttttggaagtatggtccaattcttttcttccctcacaagagaaaatctggagctaaggatttttcctacccaaacactttgcattgagcaagggagtggggctgtggcatgtgttaacttactatttcaaaccacagtttctggtctcattagctcccaggtagctataatatgccagatttcattaatcctctaaggcaggcaagacaggattcagtgctttgggaaccctccaaaaatattagagcattggattcattgtcctattctttcttacccttcccatagagacactgggagctcttttgtttgtttctgcttgtttcccttgtgctgagctgggctgcttcatgtgttagcttgccatttcaaaccacagtcattattctcagtagccccaggtggctgtagtgttcctggttccatcagctctccaaggcaagtgagacagaagccagtatctcaggtggcctccaaaaaaaattcaaatgctgaatgtatggtcttgtcctttcttccctcctcagagaaaagctgggagctaggatctcccccagttgtatggcaccatgaccatgccaggggtagggcccttggcaagagggtgtccttgtctctcttgctggttttcatgtagttggttttacacttgctccaggatgcaggagacttgtaactagtttctggatttctcacaaagtaaattagtttgtattttattatagaatcattgtttccattgaggaaagatggatccagggcttctattctaccatcttgctgacattactgattgaattttcaaatctttatatctccaagagcctagtatagtgcctagtgtgaaattaatactccataagaatgaacgaatgaatgaatggatgaatgccctggggttcaaccactttctcccatattttcctacaagtgatttacctttttatggagctttgaggaaatccatttgctcttcctcctcacctggattaactcccactcccattcctgaggaagtgcttttatgcaagatgaagtggttctttgtgtgtgtgtgtgtgtgtgtgtgtgtgtgtgtttttcatatgtgtgaaatgttaccataaccctggttcttctgacagtagtcaatttatcagaaagaattctcctttctagtgtctgtggtatgaatgataaagttcagtgttaggatggtcaacctccagcacatacagatagactggggtcaagttaagggcaatagagtcaggtggaatagagttagggaacgctgagtaatggattatagcctgcctgcctctgttcctgcctgtcagctccacaggcattgctgggaaggaggcaaggactatgctttctgaatgctgtttctaaggtaccagaaaattactcctaaattagccctcaggtaaaagcacaattggaggctcaagtatatagaaactaagaaaaatacagaaatagtagctaagagaacagtggaaagctggggagaaagagagacagagacagaggaaaaaagatgtagagaaattgaattctcctaacacacttaggaaaagcaaaaggaaaattggattccaaattggcacttttcccacaaactacagtccataagggtgtgtgtgtgtgtgtatatatatgtgtatatatatatgaatactgctgtttactcatcaatttacagtgtatttttcacaactaatttatagatgaaaaaacagtaaatgtaaaagcactataaatgtaaggtaacatagatcagtggatttttctaaataactcattaactaaagcatacttttccaaaataacctgaaaaacaagtgtttttaaaagtattttattagaatctatatagttcacatatcaatatgctttcctgcaattcaaaataggcaaaaatgattatttctttattttaaatatctctgcacattgaggcaagttataaaaatcaatgtccccacacattaaaaaaataagctatgcttagacttgtttttcttgctgtttgtcttattattttttcagtttttttaaggtcatgccatagaggttcacaagacgtgtattgtttaataatagaaacagcataggtagagtaaaaatgtttccagttttgatttgttttgtttttcctgagggtagattttttagcactctggagagtgcccggagcttgcttgatataatgataataatgtactctctaataagaaaccctggttctttagatgtgatctcatttatttttcaccattcccatgagatggaagaaggcacagatttttgaagcttaattaagacaaccagagatagtagatgattgaactggggaaataatttaggctcactgactcatactctaccaaaattgaaggagacatgggatctgacctatacttggctccagacaggtttgagcttatgtcaggctcactgcatttcaacctcagacaccgtgagaagaatatgagtatgcttctgacatggcctatattattcactcaacaaacattcattgagcccaaggctgggtctgaaacattcagtgccaaataagaccaagcccttgttctcaagtaactcagagatcagaaggaacaggagggcacagataatgacagtacctcaagaaaattgagttctacagtttgtgcaaaagtgttacaggcacgggtaattttgccaaaaagagaagtgaagtcattacagctttcactgtgagccttgaaaggaataatagttcaccctgcagaaaaggtgggaggaagagagtgtgctcaacacccataagcataaaatgtccaggaacttttcgcatttcttttcagtataaaatgtatattcaaaaattgtcatgataggtattgttttatatatattcagttaatggttttaaatgttaacatatgttgtagcataatcctgagattctctcggctatttcccttaatagggaaaaaaaaaggagaaaaatatactttagctccttcttccaaaaaagaaaagctgaatttatcccagttgaataggagggaaatacatacattattataaaatttttaaaatattggctcttctattcagatatatttaaccttattattgggaattgttttataagaaaaaattataacattattttttagctatccaaatcttaacatcagctatatgagaattcaatcgcagtggttttgcttccttttttgtccttaatcttttgttttcttcagcatgtcttttacaggagtagcttgtccatagaacacagtctccctaaggcaggttctaggtgaaatcaaagagtagaaggtgatatctcctgaggggatgacacatgttgcttgaaggaattggtttgcactacaaagggcttcctgtgcagtaaggagatgaatacaagctcaaccttgaaactctgatcttctgtttttaaatgtctgtaccaacagccttttcttatgacaacagagtcacactatgagacagtgccacccaggtttctcaacagagtatgcccttgacatcaggtatgaatctctggtgggaattcgtcaggctgagcctgtactgttgcaaacaaaggtagacagacattcttgcgtctttagaaatgatgtgtagctctttgcaattgtgtaagttataattgcaggtctttggagtcagaaccaggtacttcaaaactggtattgtctagtcctgattcacaactattgttagacctctttttgactctcaattcccttaactaaaaaggaggatgaaaacactcacttcaccagatattaaggtaaaacaagataaaagtatgaaatatccttcaaatattagatatttttattcattaaatatgtatttaataatgtattcattcaactaatatttgtcacaagccattagtcattccccttacctgtacctgaagagtcagagagttatagaaatttgtgtcatgcctgtaatcccagcactttgggaggccaaggcaggcagatcacgaggtcagaagatcgagaccatcctggctaacagggtgaaacccccgtctctactaaaaatacaaaaaatagctgggcgtggtggcaggcacctgtagtcccagctactagggaggctgaggcaggcgaatggtgtgaacccggaaggtggagcttgcaatgagccaagatggcgccactgcactccagcctgggcgacagagcaagactccttataaaaaaaaaaaaaaaagaaagaaagaaagaaagaaatttgtgaaagttattgcattggagatctttggatgtgtgactgtcccttatacagctcctaagagtgaagttcatgtgtagatgtgattgtataataaaaacgaacaaaccaaaaagagtttccttaaaatcacacagctggtaaaaagcctaatcaacatcctacccagagtgtcagactccagtattcactttcaactctttttgccctgctcactccccagaagacaaggcagtaattcacaaagaggacaatgattggtttattggaattttacaaaacatttgtacccaagggtgttgttcctgtagtaagagtgcctcttctgattttcaagcttcttattgttcacaaccggtacaaaaaatatgaaagcccgctctaaattttccatctccaaagaattcgcagggattggggatgaaagccaggtgaaataatctccaattccatcatcctgccctacagcagacatagcacaaatttctttttagcaaattagctgaaaatctagtcatctctagctaaaaatatctaaacaccaagcacaaacagatccaagttcaacacataagctcagctatgcactcacacttttatcctttaggaaacacactcatatcctttgagaaatagtatttctgaagcacagacacacatactatcacacgcaaaagatattcatcaaaggctttatttatatatccatttggagaaagtccataggagaatttgccaggaatgaagatgaagaggaggcagcaatgattcgtattttgccctcttctgcccaagagaaatattgataactattctatagttgtgccatagccaaaaacagtggtcatcctgatgttagaattccaatgacaagccctaaattagctctaacctggcacagagtaattctacaaaagggcacaaaaaccccagaactttggatggcttccttgttgctgggtagattttggactctagctctggctctgggactgattaattgtgtaacagtgagcaggctctttgcctgtgttttctcatctgaaaaatgaggcatttgagaaaaacaggaagattggagctaaatagcctcaggtctttttcagccctaaaaatgctatagtttgtaattctttcatacattgcacagccccaagttccactttgaaaagcttctgtctccagagtattagagttttccccatcccagtcatatcaacacaacttttaggcttccatggttactatataattgtctcagttggtatttctcactgatgttgtttagaacagctgtagaggtatgtaccttgattattggtgcagttactgatgaggcaaataaccttggtcttgaataattctttttatgcttgaggtgttcctaattgctatatgtaattaaagagcctgaacatatagaagctatgagaaagtgagtttagtttactgaaaataagatctcacccgaggctttatgtaaacgcctggggctttttaatcttcacagttttctaaatgtcctttaagtttcagcactctgagtgcaaagtacattgtctcaatgcagtatcttgtatgtaaatttctctcatcttgtcttagttggctcaggctgttataacaaaataccataaataagcttataaatagcttatttcctccgaatagcttaaaaacaacaaaaacttatttctcacagttctggaggctggaaagtccaagatcaaggcactggcaaagtcggtgtctggtaaaggtctgctttttagttcagagacaaccgtcttctcactgtgtcgtcgcatggtagagaaagggcaaacaagctcccttgggctgttttacaagggcactaatcctactcatgagggctctaccctcatgacctaatcatctcttaaaatgtcccccaataccataatttgggggattaaagatcaacatacaaattttggggggacacaaacatccagaccatagcatctcctcaaatatcaaggaatgactatagtacctctgttttccaagcatatgcccatgaactctaaacactgaaaaatttgccacacaaagtataaatcagaactttgtcatggaagtgtccataaatgacttgaaaagagtctgcaagtgtccacatatgactgtatcaagtcaacaggcattttttttaactacttcgatatggcaagcagtgtgccccatattcactgtgaaggactcgcacaaagtaagaaatagaaatactgcttccttcctaagaaataaatctatagaatcaggtgcccccaatctcagccaaacctaacttgaatcatttcctttaatggaactgcccatgatttcaaagaagcagagatgatatgttaagtctgagatggcataaatttggcctgctcagtggaatgtctcgcccccattcctgtttccccagcttctgcctgccccagttctcccacagctgggtcaactcatttaatcttctacagatccagcctcactatttattttcagagcaatttgagttttagcaggatataaataagtagcctcaagcccaatgcctccatttatctaggcttattatagcaccccttttcctgcaggctggccccagcaatggacacaggcactatgtcctaggctgccctcacttcattctcaacgagagccattctgtattgtttccagatcccaccaccctcatcccaaccctaatcctgccccactaatttcagtccgcattgaaaacagaccaagtcatcaaaaatcagttccctgaaggagcaattttttgaatgactaattcactgaatgtaataaattttctagtgtgccaacaattttgttgaaacatttattttgagtatattaaattaatttgagtatattaaattaaaacaatattgaagacacactttgtttagatatgattaagaatgtattcttcttgagtatatgaaatatgaatattctcatgaacctattcttcaggaacatactcatactcataagaaaactaaatgactcgtgattttcagcatttataaatttgagcattatttaaaatacagctgagtaaaatatattaattgaagatattcaaaaggactatttttcaatatgatattttgataattgaaaaatttgatcaagtggtcatttgacatttgaccctttagtgaattagctttctgcaaattgacttgtcaatgggatctcgagccatctgagtgctgtgttcatacttctatacttaccagcagccttcctggatttctgagtgtttccccacaccatccaccttggttgagctctgctacatctgacccctggtgttgactggagaatgccattccctgaagtagctgggtcttacttatgtgactgaaacaccattgctagatgccttgccctacccaaatggtgccacatagctctaagacccaactcctcttccaatctcctgctcagcatcactggtgaatcttgagctatgacagaaccaacagcctgtgctcttctactttcaaaacccagattttaaatgtcttctagtctctcataatcatgcaaaggggataagaaaacttgaaaactctcagagatatgtattaagattgactcactatgtagaaaaaaatcttctctggcttttaaccaactatctctattagaaaaaaccttatcatttagggtatgatagaagtagctgggcaagaaagtggatcatttttagcatctatttgacgcatctgggttaagaataatattttcccttacttccttataaagacaaatatgtattcctaaacaatttatgctaggaagtaataacatattttttttaatagtgcacatcaccaaattcaattttggatattatgacttatcaacaaggctttcctggtctttcataaacagacttcaaataattacctttatttcttcaaatagacctacataagttgttagagtagttccaccaaacatcctaaagtcttttttaccttgcagatcctcatcctcaccacagatataatgactttatattaaatatcttaaaccaattagagatttctggtatggtatgaaacatttcaaaataattatcagttataaaaaaactaaatcctaaaaacttgacgactaacagagctgtattaatttgtaaatacagccattaaaatagtaaaaccttatttttcttggcactcaagaaaaatgctagtttaaaaagcttgatttctcagataaaaatattgtagcaattgttgaactgccacatgtataaggtatagttatcagaaaagcaagtatatgaggagcaacgagaacacatcagttctttgggttattttctgttagattgtgacaatgtgaatggaacggatgagatcatgtgaatagcaacaggtgctggggtccagtgaatacaccatgatggtctacagtgaccttctccaagggtatccatgttttattcagtataagtattttaacctggaaaaaaatatttcaattgcatccatcatgatggcatgcttaactgccttttggaggctttatttataataatggttttctaaaactgactacacgttagaattatctaatgatgtcctgtttcatatagactaattaagttaaaaaattctgagtgtggagacctgatctttgtattttttaaattttctccaagagattctgatgagaacctaggttggaaaacactggttttgagcataatatctgctggattcaaaaaataaaatagctataggaattttctttcagctctttctgctaatggagcctggtcattggctttaatgttcctccttttaaaaccccatatctgacattggcttagctcaaaagatactgagcttgaatttgcttgggatttatttggacacctggtctaatagcaagtggttaagctagtaggttttcatttaaaaaaaactctatatgaataatttaattcttaaatgcttttatagagttggatattggcagtttgaatttaattgatttcaaggacaaaatttgaccttgaaataatttatagggctgggtacagtgactcttgcctctaatcccaacactttgggaggctgaggcagaaagatccacataaataatttagtgcaatcatataaatgtaggaatagtgtagaggcagttccgttgcaaaatatggtttgtgcctttctcgttaactttattttgttgtcttccttatttctgttaaatgactgggacaacagtggggattaggagagatggacatcaattcaaatagtagagaaacctttacaccaaacaataattttttgattttgagggtttctgctgtgcgatacaatgcatgcagttaactttctggaagcacagtgaaagcataaaagctagttccagtccactgcacaccattgatacttgccagtttagccaatggaaaattctctctctctctctctctctctctctctctctctctctctctctgtctctctcacacacacacacacaaattttgtcagaggtgttaatgaataagagctagcaaatgtaaactgtgtaccaaaacaaaatatatatatattcacttaccatatgagcctaattatttgattctctagacaatagaagatcattctgggttttgttgggggagttgtttatttttatttgtttgcttgcttgtttctaccaaaagatgaacagaaaacacacatacacatatatatccccaaatttatcctgtgtttaaatcttatattttaagaaaaaatacacagaacttacactatctgacttcaaaactcgctataaagacacagtaattatgacagttcatgactggcataaagatagacatatagatattataaatgaaacagaattaaagttcttacatttatgggcaattggtttttcacaaagatgccaaacaattgaataggcaaagtttagacttttcaacaaatggtgctgggacacttggatatcaatattcaaaaaatgaaaacaaaaacttaggccctttcctcatactatacacaaaaattaactcaaaatgggtcaaagatttaactgcaagaactaacaaaacttatagaagaaaatttaggaaaaaattactgtgaccctgcattaggaaaagagttcttagatatgacaccaaaagcacaatccataaaataataaattggtaaagtttaacatcaaagtaaataaataagagtttaacatcaaagtaaataaataaataagtacatttaatttataaaagaaagtaaacaaataactttgtgctccaaaagacatcattaagaaaatgaatagataagccataaactggaaaaaaaaaaaacctttgcaagtgatatatctgataaaggacttttttttttttttttttttttgagacggagtctcgctctgtcgcccaggtcggactgcggactgcagtggcgcaatctcggctcactgcaagctccgcttcccgggttcacgccattctcctgcctcagcctcccgagtagctgggactacaggcgcccgccaccgcgcccggctaattttttgtatttttagtagagacggggtttcaccttgttagccaggatggtcttgatctcctgacctcatgatccacccgcctcggcctcccaaagtgctgggattacaggcgtgagccaccgcgcccggccgataaaggacttttatatccagaatatataaagaactcttacaaaccagacaacctaatttagccagtttttaaaatggagaaaagatttaaacagatatttgatcaaagatataagtggctaataatcacataaaaagatcctcaaaatcattagacaaacagaaattaaaaccacaatgagataccactacacacccacaaaaatggctacaatcaaaaaggtacagcaataagtgttggtgaggttaaaaaatgaaacgtgcattgctggtgggaatgtaaaattctaaatttctgtacagactattgcacaacctgtttggaaaacaaagttgtacaaattaattggaaaatagttgagctgtttccttaaaaattaaacataaacttataacacaagccaggaattccactcctagcattctaccaaaaaaaattaaaaacatgtgtccctacaaaggcagctacatgaatggttacaacagcattgttcataacagccaaagattgtaagtaatccaaatgttcctcaagtagagaatggattaaaaatgtgttatatagttccggtgtggtggcttacacctgtaatcccagcactttgggagcccaaggtgggcagatcacttgaggccaggagttcaaaaccagcctggccaacatggtgaaacactgtctctactaaaaatgcgaaataataataataataagccaggtgtggtggtgcacacatgtaatcccagctactccagtggctgaggcacaaggatcactggaacccgggaagcagaggttgcagtgagacaaaatcatgccactgcactccattttgcatggcagaggggactccatctcaaaaaaaaaaaaaggggggggggatatatcaatataatgagatcctgttaagcaatataaagaaatgaactcctgatacatcctaccacatgaaaaacttcaaaaacagtatgcaaagtaagagaagccagacccaaaaaactacatattgtgtgatttcttttatataaatgtccataaaatttaaatatatataaccagaggcatgtcagtgattatcagggctgggaagctggagctaggaattaactaaaaatgggcatgaagcaatttctgtgggatataatggaactgttctaaaactggattgtggtgatggtttcacaactctataaatttactaaatatcattgaactgcactctttacaatgagttagtttagtggaatgcaaattatattacgaagaagttgtttgtaaaaataattgcagagtgggccgggcacagtggctcacacctgtaatcccagtactttgggaggcagagacgaagggatcacgtgaggtcaggagttcaagaccagcctggccagatggtgaaacaccgtctccactacaaatacaaaaattagctaggcatggtggcgcacgcctgtagtcccagccactcaggaagctgaggcaggagaatcatttgaacccacgaggtggaggttgcagtgagccaagatcacaccactgcactccagcctgggtgacagaatgagactcagtaataataataataataataataataataataataataattacagagcagatcaagatcttctagcccaaagttcactgttcaatattagcttacaaagacatgctttataaatttaaggacaaaacatcctttgcctaaaatcccttttatttaatattcttgttgaaaggccacactatcaaatattcactaagtcataacacatttctattcgatttactttaaaattatgttccactggcaattcacgtctttttactttataaatacctgctatgattttctactatcctctaccccatgtattttattgcttgttatcctcttttttttttttttttaattcagggctaccagtgctaacactaatagctaatatttttgaagtatacagtcttctaaatactttacacatttgttttatttcattatttcaccttattttatttaattctcaaaataattctatgaagtggtcattattgttatctttttattatgtaaaggcaactgaggcacagagaagttgctcaagggcatccatctgtaaaatggtaaggccaagatatgactcctctacccaacctcttaaccactgagctgcactgcctctcaggagcagtgcaagagagggagtgtttttgcattttatcttccatgttataatagacatgtatatttttagataaagctctccaaaacagaaatgcccagtgaacactgctgctttcctcccgtttctctaagacaaaacatgaaatatgtgaacacattatatgaatttgttttccattcctccaaaatatttgtttggtgttggtaactggaaaaaattataaattcacatactatatgaatacatatacatgtacacacttacacatttatttgacttcattgtagaactttgacattaatcccaataactaatctctttatacatattgtttcatcctgacatcaacctgaacagggaaaattgacttatataagcacacagctactacagatgtctttttagaaactgattattgatatatagcagagaaacttaaaatctctttaactaacttgaagtcctgaccatatgacttctttacaaacaatgagatgagtaccctgagagatgctgcttccagcaactaaagattgaattaaatcattaacaaatacatgataaaaacaggaatacattgtatacattttgtattaagtagggtttcctagagaaacaatagataaatgatagctagctagctagatagactgagtaatagattcattatagaatttggctcacatcattatggaggctgagaagtcccacaaatttctatttagaagatgaagaagctggaaagccagtggtataattcagttcaagtcagaaggcctgagaaccaggggagctgatggtgtgagttccagtctaaggccaaaggccctgaaagcaggagcatggatgttagagagcagggaaagatggatgttccagctaaaacagggagcaaatttgtgttttctatggctttttgttctatttaggccctcagtggattggatgatgcccaccagcattggtgagagcaatattgtttgctgggtctgctgactgaaatgctcatctcttctagaaacaccctcacagaccacccacaccccccaaaaaataatgtgttaccagctgtctgaggatcccttagtccagtcaagttgacatataaaatgatatactttccataatcagggacatgaatatctgtctattttcaacataattcatctgttaaaatgtttgataagactgactgcaactagggaatatgagaaaacataattttattcatgataaatttcagtattaggattcattcagcatgttaaaagtttacattctggaacatacagtcctctggtaaaaataatgttttagcttcaatttgacaaaatagcctacaggtattttggacaggaatttatagggagttaataccaacaaaaatgccctgtgataggctatgatgatggtactgaatagagttcaatagaggaaatagaggaaaaaaactctcttaaaaagattacagtcatttgaattaatacaacatgtacaaaatgtaatgttttggcatggaactattgaagacaaagtgtcctcaaatcatttgttaaatttttgaaggtaatgtttcctatttaacccaaataaaattggatattgacccagtgtgcctctagtaggaaaaggagagtaaagtgaaagaaaatgaaagaaagggaagcaagtgatattaaaaagtggctcttgggtaaacactttaattagcatttcatattgaatatttcttaaggagcatatgaaatgtgaattttcaggaacaaacctctgccaaaagctgccatataactaattctaaatacttatctttgctcaaactgtaccacattatatagcttggaaggctagccagaggaaacaaggctaagtaactgtaatagcagtctgttagaaaggttggatgtgttattggaaatgccagtaggtttgcttagcccatttcaagtgtttctctgaggaccaaaggctgcctcactaatgatggtatcagaaaagcataaggcaagccagcagtcaactgcttttcaatcctcccttggttcataagatttgccatgatttcttctaatatatatatatgccctttggacccatattataacccaaataaatttggcatgccaatgttcctcttctttgctttttgaaaatcagaatattaatttttatgcattttgactaaccctagtttgagtctaaaacatccctctatttctggatattgtgagggactagagagccctcaccttcagctacctaccatttggggacccttggggaatattaggacttttgggctgagtgtgttcactcatgcctgtaatcgcagcactttaggaggccaaggtgggcggatcacttgagtccaggagttcgataccaacctggccaacatggcgaaccccatctttacaaaaatacaaaaattatctgggtgtcatggagcacacctgtaatctcggctactcagaaggctcaggcacaagaatcgcttgaacccaggaggcagaagttgcagtgagccaagattgtgccgctgcactccagcctgggcaacagaaaacagaaagagactctgtctcaaaaaaaaaaaaaaaagaaaagaaaagaaaagaaagaaagaaaatagaaggaaaaaaagacttttgttggtcacttcagatatatgattgagctctcgaacagctcataaattttttaaactggtcaggaaaacaaactctaagcacccaaaagatattttctgtggctgtttttgttgttttgtttgtttgtttattttttcccttttttgttagacacaaaacttaaaattgattttcccattttgctttcatccattaattgaacaaacatttgttaagtgcctactatatgtcagacctgtatcaggcactgtgaatacagcaatgaacaatcatttactctattcatggtaggttagctttacctaaaatctcacacatcatactggtgcagaagatttgaggtatagatgcctgaataaaggagtcctgagaggagtagaagacagagaattctagatgcaacccatgtatgttcttgtctaagtcatttaagtacaagaaggtagaaaacagggtgagttgtatctcttgttctaatcatgtctgttcctaaaatatacaagcaccatatttccttgaacaaaaacatctgatgactagttctgacagatacaaacaaacataacaagagaggattttataaaattgaaactgtcagataaaacacaggctatttaattaaagtacttggcaatccgtgatgaaagctcctgggttcctttcaaaatcttccaagtgcttttcgatgtaaatttcatcagccactgtcccagtatgggcccctggtagtaaagaatgtgtatgttcatctttgcattgattccattttagtagcctgattgcttatcttgtgttccctgctcttccagggatcaatgagcttttcagttcttatcctacctgatatctaagcagcatttgacactgttctactccatccttgacttccatgacatgacacattcctgacaatcctcctacctctttggcccactttttctcagcctcctttattgtctcctttatctctgcccattctttaaatgtccatgttccttaataccctcttctcatttcacacaaactcctgattcaattttatttcaaatatatacccaaatatttactgaaatatatattccagaaaaaatatctcctgagcaccatgccctagacccaatctcctgctactgaatttctaaaattggacatccaatttcacctcaattttagctttacaacactgaatttattatcttctcctgaacccactatcccatcctcccaaacttgcttctcttctgtgtttcctgtctctgaaaataataccatcatcattcagttgcccaagccacgtacttggtctacattcttaactcctctttctctgccgcaactcacatcaaagcagtgaccaaatcctacaacctaaatatgtcttgatataccaatatctcattatagccactatttctcatctatcctcatcaccattctctctccatgacctccatactggtcctctggcctttaggtttgaaccccttgctctggtttgaaaataatggtgtccccttcaaaattcatgttgaaacttaatccccaatacaacaatagcagtaacctttggaaggtgagatattggtatatctactttatgaccttgcagcggcatggcaagggagacaggatcttacaggattttacaaattgtgtttacaaggaattggaattgggagcataggtaaggtctgctgatcacagaaaaactggtttttaacattccttttagttttggagggcggaagggagagagggagcgaggacacagggaagtttacaacaaaattttcactgttaatagctttcttgggaagaaaacacacacacaaattctgatgttaggaatattttaagcatatatcttcaatattattcatccaggaccaaagtaagtcctgatgcaggaaaggagtgagtttcacagctttctgagcccctacttgacccaggaagcccagctggaacctcctctcagtctcccctctagacaggacaccccaactgctgttgggaactggacggcagtcgttctggctactttctgctgatgaggggcgaagaaggggccctgcagttgtggtgtcttccagaggggaactttttaggctagtcagagaccagtatgtcgatccaggggtccttggtagatgccgtgagttgagctcatttgaggttccatttgtaagaccatttgtaccttgatggcctcgatcctgaggaaacaaatttgacaaggaggttaaaaatgcaaggcccaaaaacgagtaggatggctgtcgcagggcctagaaaggggaggagccgaggtatccattggttaaacatattcaagcgccctgagtgttcaagctccttttttctactttctatttgttctcttatttctttgaccttttcagtaatgattcctgactggttaacaaaatagcaacattcttttcctaagaagaggcaagttcctccttttttagctgttaataagtctagggctctccggttttgaaggactactgcagctagagaattaagctggctttgtagggtcactagggagttggcaattcattccatgtcatcatttaattttagtgataatttataataaattggtggtggaggttatgcctccaattccagtcccaagcctgcccagtattccgactcctacaataaaagggacaataagggctcacgtgtggcgagattggggtataaggagactttgtaactcctgttcagtatatatggacatgggaggtgctagaaaggagagaaagcattgttctttcagagtgccatttaggcatcaataggctgtgttattatagatgaaaaaaatgcctgaagttagacaagtgaaacctgaggtcttgcactagtctctgctgaccatttgttttttgtattcctagcattcggttattgcaaggactgttacattttcttactaaaccttgagcttttaaatgtctaacaatatcctgtaatcctttgagagctttaggccttaaggtatattgcctttaataaggaaaagtggtggggtcttttagcttgatttggactggatgggcattctttgcctttccaaattgtcgttttaaggcccatacctcaaagttgattccttctttaattagggacaacaaataggtaatttgttccccatattcctgtagataatggccccagctttggctaatatgtccctccctaataagggtgtgggacttttgggcataacaagaaaggcatgtgaaaagaacaaagtctcctaatggcagctgaggaggcaagagaaatacctggttacaggctgtcttaagattcctcggatagtaatggactttgaggacagtcgttcagggcaggagattaaaactgagaagaccacaccagtgtccaggaggaagtccacttcctggacctcaacagtcaaccttacctgggactctgtgtgggtgatggcatgagctggcacttgccccaggcacattcagtcctgttgctgaatcatctggttgggtgcctctggtccagagggccttcatcctctggagcagtgcaccttccaaaccttcctttcaaaccttcttggcatattggacatgggcgaggggacagtttgttttttgttggacaatttttcttaaagtgtccttgcaaactgcactgataacaagccctactaagcgattggcctcctcttctcttggttccctctgagccaccaaggtctgcctgtctgagggccatgtctaaggctgcagcctttatcttatcttgcttgtcccttttggcctgttcctcttggtccctgttatagaataccaaggttgccaggtttaataatgtctccaaattttgttctgggcctaaagcagactatgccagacactgattgggtgataaatttatcctttaaaataagttgaccttctacagaatatggagttagggaggtgtgctttcttagggcctcccttagcctttctagaaaagcggaggggtttttctctttttcctgtgtaattgtggatagcattgaatagttgataggctttttcctagtcttcctcaacccttctaaaatgcaagttagcaaatgcctgcggctccaatctccatgatctgagtcagtatcccaataagggtctacagtgggggctgcctgttgccctgtggggaatttttccctctcctccggggtcattcgatcatttacctggctaaagtaccacagatccccaaattgccgggctacagctaaagctgcttctttttcagtaggacttaaggtctgatcaagaagcaacatgatatctctccatgttagatcaaaggactgccccaatccttgcaggacatctatatagttataaggatcatttgagaatttccctaaatctgcctttatttgttttaaatctgagagtgagaagggggcatgcacgtgaatgggcccaaattctcctccttgtaagggacatagtcccttgtaagggagatagtttgggtgcctggctcacggagtttacgttctctttccggtgtgcctttaacacttcggtgggaccggatggaggagagtcagttggggaggagagtggggttgagggaagaggccctgagtgtggaggcaactgtgggcctctgtcatttgggcaaagcttgcaggcttggcacagggcagtattgtcacgaagggcaaagaaaacctgtacataagggactttactaaatttacctttctgtttacagaaaagatctagctgtagaagggtgttataattaatactttcctcagagggtcaagtttctccattttgtaaggaatactgtggcaaggcagtggtacagaagaaaatcagccgcttcttttttaaggtttcagggtcgaatttgtcccatcttaagggagtgtccagttttgaaggcatggtgcccatttggaattttaaacacagggattcccacacccgtggttagtcttgggactcgtcttccctatggcatcccccgagggtcaggtccagttgtgctcaaggctcatggctgcttttcctgagccctccatgtaccggatttaaccatgcttaccagcgggatggaaacttcccttgcccctgctgtgcgcccattgaccactaaatggggcacaaggactgttggatttattgtgatccttctgccaatgcattctacctgttccagggtggcaaggcccgggtctggggcaccactgatgcttgcatgctaaggcccaatttacgtgggcctggccataaaactgtccttcaaggaggaatctctgaattagcaacaggaggcttagtaagcataaaggggtggtagatgtcttctaggccagggctgagagaacagctgctgtactctagccttctgtccccacttgccatcaaaggagtaagcccctctcttaaggcagtaccagtatcctgtgtcccaactgactatattttcttccttccaataccaactattgaatggttgaaatagcaattcaacggctctaagagctgtacccatgcaccacagattgtacttgagaggccctaaggaaggggaaaacctatgtgggaagcaatggaggaaatgccttaaggtttttactattcacatgaaaattacaggcctgtctttaaattgtcctgatgtaggggaccataccctatggtggggaactggccctttaaaatagccatcaaacgatgatacctgcctaaaccctggaaggtaccatgaagagggatcctctgggcactaccccaaaaatttaagacttctaaatagggaatcttgatcctgcctagtgggaataaccttgcttgcaagatgagaaaagaagtctagccagtggacattgggacccaggagacaggggtcagaagatgtggtggtctcacgctcagtaacccttgcagggggagcctctggcggggccatggtctcaaccaggaaatctggaagactagaatgtctactgataactcccgggtgtacttcgggaccaccacagaaagtgaaagagtaggaactgggtccaaactaaccaacgttcccagccctggagggtcgggggttgttagacagcccttttccagacagcctgacacccgtgtctttagtccggcggccgcgctaatcgcctttaagtggctgacaggtgcccagtttagcctctgaattctaaggaaagacaggacagaatagcaagcgaaagaggtctaatcgtactcaccatgtgaggatcgagatgcctttcctggagatcctcctggctggctcgccaaaatgtaactccaaaggttcttgccttagccatgccaaagatttggtggggcggccgcccatggtgagagagagacatggatcagaccaagagaaaaaaagctgtaagttttattgagcagagtgacagtacaaagcttccacagcatggaaggtgtcccaagtgggtagccagtgttagatttttcaattacattttaaactctttaaggagggaaatacgtgcagtgggaagatgttaccagagcaagaaacaaagacaattaacatgtctcagatcttgaggagaaccggaattgtaacttaagtttatctactttatgaccttgcagtggcatggcaaaggagacaggatctcacaggacttaacaaactgtgtttacaaggaattggaattggaagcatagataaggtctgctgatcacagaaaaactggcttttaacattccttttagtttcgggggggggaagggagagagggagagaggacacagggaagcttacaacaaaattttcactgtttatagctttcttggggaagaaaacagaggcacaaattctgatgttaggaatattttcagcatatatcttcaatattattcatccaagaccaaaataagtcctgatgcaggaaaggagtgagtttcacagctttctgagcccctacttgacccaggaagctcagctggaaccnnnnnnnnnnnnnnnnnnnnnnnnnnnnnnnnnnnnnnnnnnnnnnnnnnnnnnnnnnnnnnnnnnnnnnnnnnnnnnnnnnnnnnnnnnnnnnnnnnnnaaatgaactaaataaggaaccagggaccaatcctggagaaacacacatatgtgacttttcaggcaaagagttcaaaatagctgtgttgaggaaactcaaggaattcaagataatacagagaaggaattcagaattataccagctaaatttaacaaggagattgaaataattaaaagaaatcaagcagaaattctggagccaaaaaatgcaactggcggccaggcacagtggctcacgcctgtaatcccagcattttgggagaccgaggtgggcagattacttgaggccaggagtttgaaaccagcctggccagcacggtgaaaccccatctccactaaaaatacaaaaaattagccaggcatggtggtatgtgcctgtaatcccagctacctgggaggctgaggcatgagaatcgcttgaatccggtaggcggaggttgcagtgagccaagattgcaccactgtactccagcctgggtgatagagtgagactccatctcaaaaaaaaaaaaaaaaaaaatgcaattggcatactgaatactgcaccagagtcctttaatagcagaattagtcaagcagaagaaaaaattagtgagcttgaagacaggctatttgaaaatacacagtcagaggagataacagaaaaaagaatacaaaatgattaagcatggctacaggagctagaaaacagcctcaaaagggaaaatctaagagttattgggcttaaagaagaggtagagaaagagacggggtagaaactttattcaaagggatataacagagaacttcccaaacctagagaaagatataagtatccaagtacaagaaggttacagaacgccaagcaaatttaacccaaaaaagactacctcaaggcatttaataattaaacaccaaaaggtcacagataaagaaaggatcctgaaagcagcaagaggctgaggatagcggtcacacctgtaatcccagtactttgagggaccaaggcaagggatcacttgagcccagtttttgttttatttccaacgtttattttagcttcaggggtatgtatgcccaatatgcaggtttgttacataggtaaacatttgccatggtggtttactgcacagttcatcccatcacccaagtattgcccagaatccactagctattctgcctaattcactccctcctcccacccaccatcctccaataggccccagtgtatgttgtttcccccttgtgtccatgtattcttatcatttagctctcacttataagtgagaacatgtggtatgtgtttttccgttcctgcattactttgctaaggataatggcctccagttccatccatgtccctgcaaaggacatgatctcattcttttttgtggctgcatagtataccatggtgtatatgtacattttctttatccagtctatcactgatgggcacttaactggattccatgtctttgttattgtaagtagtgctgcaatgaacatacatgtgcatgtgtctttataacagaacgattcctattccttacggtgcatacccagtaataggattgctgtgtcaaatggtatttctgtttgtaggtctttaaggaatcaccacactgtcttcaataatggttgaactaatatacactcccaccaatagtgtaaaagcattcctttttctccacaacctcaccagcatgttattttttgaatttttaataatagcaattctgactagcgtgagatggtatctcattgtggttttgatttgcatttctctaatcagtgatgttgagctttttttttatatgtttgttggctgcatgtatgtcttcttttgagaagtgtctgttcatgtcctttgcccgctttttaaaagagttattcttttttcttgtaaatttaagtttcttatagatgctggatattagacctttgtcagatgcatagattacagaaattttctcccattctgtaggctgtctgtttactctgttgagagtttcctttgctgtgcagaagctctttagtttaattagatctcatttgtcaatttttgcttttgtcacgactgtttttgacatcttcatcatgaaatctttgcccatgcctatgtcccgaatggtatgaccaggttttctttcagggttttatagttttaaggtttacatttaagtctttaatctatcttgatttttgtatatggtataagaaaggaatccagtttcaattttctgcatacagttagccagttcttccagtaccatttatttaataggaaatcctttctccacagtctgtttcggtcagatttgttgaagatcagatgattgtaggtgtatggtcttatttttggtttctctatctattccattggtctttgtgtcagtttttgtaccagtaccatgctgttttggatactgtagccctgtagtatagtttgaagtcaggtactgtgatgcctccagctttgttctttttgcttagaattgccttggctatttatgctcttcgtttgttccataggaattttaaaatactttttttctaattctgtgaagaatgtaatggcagtttaataataaaagcattgaatctataaattgctttgggcagtattagcgttttaaagatactaattcttcccatccatgagcatggaatgtttttccatctgtttatgtcatctctgatttctctgggcagtggtttgtagttctccttgaagaggtccttacttcccttgttagctgtattcttaggtattttattctttttgtgttaattatgaatggaagttcactcatgatttagctcttggatcgcccactcttggtgtataggaatgttggcaatttttgcaaattaattctgtgtcctgagactttgctcaagttgtttatcagcttaagaagcttttggagcccaggagtttgagaacaagctggataacacagtgagaccccatctctacaaaaaataaataaaacaaaagcagcaagagaaaagagacaaataacatacagtggagctgcaatatatctggcagcagacttttcagtggaaagcttacaggccaggagagaggggcatgacatatttcaagtgctgaaggcaaaaaacttttaccataaaatagtatatccagtgaaaatatccttcaaacatgaaggagaaacaaagacattcccagacaaacaaaagctgaggcatttcatcaacactagacctttcctgcaagaaatgctaaaggaagtacttcaatcagaaagaaaatgatattaatcaataataagtaatcacctgaaggtacaaaactcactgttaatagtaaatacatagaaaaacacagaatattataacactgtaactatggtgtgtaaactacccctaccctaagtagaagagtaaatgattaaccaatcaaaaatagtaactacaaccacttttcaaggcatagtcagtacaataagatataaacagaaacaacaaaatgattaaaagtgggggtacaaagttaaggcatagagttcttattagttttctgtttgcttgtttccttgcttatgcaaatagtgctgttattgtgttaaaataatgggttataatatttgcaagcctcatgataaccttaaacacaaaaaataaaaagcaaaaaactaaatcagaggaaataatcttcactagaggaagacaaaaaggaaggaaagaaggaatagaagaccacaaaacaaccagaaaacaaataacaaaagggcaggagtaagtccatacttaccaataataacattgaatgtaaatggactaaactctccaatcaaaagacacagactggcagaatggatgaaaaaacaagactgattgatctgttgcctacaagaaacacactttacctataaagacacacataggctaaaaacaaaggatggagaaagatactccacgtcaatggaaaccaaaacaaaaaaaaacaggagttgctatacttatatcagacacaatggatttccagaaaaaactgcaagaagacacaaagaaagtcactatataatgataatgaggtcaattcagcaagaggatataataatattaaatatatatgaactcaacactggaacacatagatatataaagcaaatattattaaaggtaaagaaagagatacaccatagtaccataatagctagagacttcaacatcccacattcagcactgggcagatcttccagacagaaaatcaacaaagaaacatcagacttaatctgcactatagatcaaatggatctaatagatatttacagaacatttcatccaggagctataaaatacacattctttggatcattctcaataactgtccatatttaggtcacaaaacaagtcataaaatattcaaaaattctgaagtaatatcaagcatattctttgaccacaatgaaataaaactaaaaattagtaacaggaattttggaacgtgtacaaatacatagaaattaaaaaatatgctcctgaatgaccagtaggttaaagaaaaaattaaggaaatgtaaaaatttcttgaaacaaatgataatggaaacacaacatatcaaaacctatgtgatacactaaaagcagtataaagagggaattttatagctgtaagtgaataaatcaaaaaagaggaaaaggctgggtgcagtggctcatgcctataatcccagcactttggtaggccgaggcggggggatcactggagaccaggagatcgagatcagcctgccaacatggtgaaaccccatctctactaaaaagtaatacaaaaattagccaggcatgtacctgtagtcccagctacttgagaggctgaggcatgagatacgcctgtactcaggaggcggaggttgcagtgaaccaagatcatgccactgcactccagcctgggagatacagcgaaactcttgtctcaaaaaaaaaaaaaaaaaaaggaaaagaaaaataaactaacaatgaaactcaaccaaacccaaaattggtagaaacaaataataaagaaaaactaaaggaaatggaaaattcccatacacataccacctaccaagattgaaccaagaagaaatcaaaaagctgaatagaccagtaacaagtaatgagactgaagctgtaataacaagtctcccagtaaagcaaagcctgacactcaatggcctcactgctgaattctactaaacatttaaagaactaataccaaccctaccccacctattccaggaaatagaggaggagggaatacttccaaactaattctacaaggccaatatttccgtgataccaaaaccagacaaagacacatcaaaaaagaaaactacaggacaatatctatgattaatattaatgcaaaaatcctcaaaaaaatactagcaaattgaattcaacaacacattagaaagattatcaaaaaaaaaaaaagagagattatcatggccaagcgggatttatccctgggatgcaaggatggttcaacataggcaaaccaatcagtgtaatacattatatcaaccaaatgaagaacaaaaaaaaatgatcatttcaattgtgcagaaaaagcatttgataaaattcaacatcccttcgtgctaaaaaccctcaaaaactgggtatagaaggagcataccccaacatgataaaaaatcatatgacagacccatagctagtatcaactgaatggagaaaactgaaaacctttcctctaatatctggaacataacaaggatatccactttcaccaccattatttgacatagtactggaatcctagctagtacaatcaaacaagagaatgatataaacaccatccaaatttggaaggaagaaatcaaattatcctgtttgcagatgataagatctcaataaaatactggtaacccgaatccagcagcacatcaaaaagcttatccaccatgatcaagtgggcttcatccctgggatgcagggctggttcaatatatgcaaatcaataaatgtaatccagcatataaacagaaccaaagacaaaaaccatatgatttctcaacagatgcagaaaaggcctttgacaaaattcaacaacccttcatgctaaaaactctcaataaattaggtatcaatgggacgtatctctaaataataagagctatccatgacaaacccatagccaatatcatactgaatgggcaaaaactggaagcattccttttgaaaactggcacaagacagggatgccctctctccccactcctattcaatatagtgctggaagttctgaccagggcaatcaggcaggagaaggaaataaagggtattcaattaggaaaacaggaagtcaaattgtcctgtttgcagagnnnnnnnnnnnnnnnnnnnnnnnnnnnnnnnnnnnnnnnnnnnnnnnnnnnnnnnnnnnnnnnnnnnnnnnnnnnnnnnnnnnnnnnnnnnnnnnnnnnnactttttacactcgtcatttaaatattatcttatacaaatttgaacaatatgtaatattatagcaaagaaaaacacatccggaaacactagcactattatgttttagtgttcatgtttgaatgtttaataaactttaaaagtttagatttctcattagaattctcattggctaactgggttgctcagttagattcagatacaatcagattcagagttctcagtcaccttaagcccatcagcatattagcccagataggtacagatgaattcagatcaataagattatgttctgggattccagttctggtaagcagattttctcttttctactgaaaacatgtagcctggacaccttcttgagacttcaaggagaatgcctgttgggaatggagccattgctaaggaaatattgctgaggaacaagaggaagcaactatgttctagtcacattgtatgaaccattggatcaatcttctgaaactgtacctccttttggacttttcagttacatgaatcaataagttctctgtatggttcaatccagtttgagttggtgttttaggtacttgcaaccagttatgctgaccaatataccgagctactggcagttccatttttacggaactctaaactccatgagggagatggtaaggatctgttcttgtatgtagtctcagttctttcatgaaaccactacttctataatgtgaaatgtcatatggatagaccactgggcttggtgacagaggaagtagagttcggtcttggttctgacatgtttttgaccgttaattcagtaattcatttaatctcagtttatctataaagtgaagaagtaggcctttagtttgtttacatatctgcgttatctatctagctatcaaagagctctttttcagaagaaatcttatgtagaactcaacaaataaaccatgtacaattgtgagttataagaaaggcaattttttttctcattcctgtgtccttagcataaccataaacctggtgaaatgtatatactcagcaagtagttgctgaatgaaggaataaaagcaaagttcctctgttggagagatgacatggaagctgggtccccactggcttggccttcccctcaccaccttacccacccttgaggtcccactaagaaactcgagggcttggcagattccaagctgaaagccaatgaccaagtcatctctaaggcccttccagttctaacattgtgtagtccaatttagtgattcccagctatgacagtggaagagtgcaggttgattatgtcatcagaattatgagacttttcaaataattgttcccactctactgagactctctttctgtcacctcaatcaatgaactatttctattaattaaccatgtactagtttcattaatgacaatttgatgaatcattttaaaaagagcctcccatgcccaggcactgcgcacgggctagtggtcgaccgctaaacaaacaagacagagtgacagacatgatcctgatacagctccaatgagtggaggaacaccaggttcttcctctcgagtcgaattagaaaaaccaacacggacacacgtggagtagttttaaggagcagggagtttaataggcaagaaagaagggggaagaaagaaagaagcagctcccctgcgcagagacagagggagggaggctccaaagtcaagagacagacagaaccctgctttcaggtaatatcaaccagctgtattccatggctggaggaggtggtgtctgatttgcatagggctcaggggattggtttgaccaggcatgtcattcacgtagcccacaaaaaactggccctcccagcctagccttttaatatgcaaattcaaggcgccatgatgttccacacacgcagggatatgtgggggcgaccatgcttccaggcacatgtggggcaagggcaagaagggcacgggaattgcaatgttgggtggacccagtttctaatggcctgcatttgcatatcaaagtttgccggcctggttctaagagccagggctttacaagaaacttttctggggatgctttaaaaattaaaacttcccaaggaccccttttcctctctatctgcctaaaataatttcttagtaactcctacaacaatcccattctcttggagcttccttggttgaatattatgtctgggagctgtcaaaatcttgatgctttaggtcccacccccagataatcttatttcaaaattaaaaagtatgaaattatgacaggtactgttgtttgttgaatgatagctaactgaagaaattagtacttgtaaaaaggcttacgtggagcatgctgagttctctacgtctgaggcagtcaagagaaattgggcaactactctatagctatatctgtctctgtgtatatatatatatacacagagagagaggagtcagtcatcaggaggtggttttataagtctgagcttatcagaatgtgtgaagttaacacaccgtcactcttcataatgcaatattctatgggctttcaggggatagcttcatgaaaatgaggagatatctgggggcagagttttattccttttcccacaatgtgtgtgtgagtgtgtgtgtgtgtgtgtgtgtgtgtgtgtgtctaggaaagactgtgttgggatgaacaggtctgaagggagtaaggaccttttagcttcttggcagaaatggtatctagtgggaggtaactacacattaggtatatggaagaggaagtatttgatggtgaagctattttcagatgaaagtgtgataagtaaagcttttaaaaccagcatatttcagcctgatttaatccttacctgtggtaaaacaaataaaaacaaaaactatacctatgtgactgtgaaatttaaaagaaaacaaaaccaatctctttagttaccttgaaggatgggaatctatgtattagtttaggcgattagagttagtaccagttctggtatttaaacttaatagaaaataaaaaataaatagagtttaaaacactcagaaaacctacttgttgttttcaaagtggatactttgatcatggttgcagtggaattttagactagagcaggaattagatggtatttgtgcttcttgcctctgtgcatttatttatttcttttaaggttcagctcaactgacatttttttgtgagaaatctctaatccttgtcagcacaaaggaatttgacaatcttaagacatgtaaaatagtcacagttacattatgtattatttttaacgctaaaatttttcttaatcagttgcaagctcatagaggcacgactttggttcacttctcccccatcaggccaaacataatgcctcagtatcacaggtcatttactgaatgagatagctttgttttcttcccctgattctctaatgagcgatattatggtgcaatggttttttaattctggctcccattgtaagaagcaactgcaacaactttttctacaaacctcaccattagatatagcagttttgatgtgcaacttctgaaaccaaaccaggaaaagacattatgtattgatgttagaaacccacaaatgcttgttttaaatactttccactgtttatttttttctaattcatcaaatgaaatctttccatgttttagctctaggagagattaagcacattcaatctaattatgcaacctcctggcaaaagcagtctcaatgtgaaacactgtgctggttgtatttcacagttgctaatggaaacagagacaagtttggaaaactgcaaagtcaagtctgagccttggcattatcatgcctctgaggaaaggcatttcctgggtctgttctttctttccttcactctctgtatgcatgctgtatgcgtcccgtcaggctctacaaataactgaaaatggtcacatgaaggtaggagtaccatagacataaaaaatgaataaaaacttgaaaagtctcacaaacaacaaacaaaatacaacttgccagggagtctgagacttgataattttgtgtagatagataaaattaatttatctgatgttaaagaataccagttgtcacggcgtttaaaaaattcctagttccaaacatccttggcagctcctcaggctaacaatgcaaccttacaaattatagttgttagctgcaggttttgtttttcacccatagttacatggtatattcagatacagagaagtcattatattatttccaaaacaagtttttaaaacttttattcactttaggctcaaagatgaaacagtgtgttatcttcctaaaaataattttgctgaattatagaccagatttacatgggagctggaaaacattttggaagtgaaaaaaagaatgctggcatccgcgtgaggaacattgagatgcacaaatggtttccctgcgacaaaagcactcacccatgtaaagacagccagtttgatcggacagccagtttgactagtttcctttccgtcttctctctaggctctcgtgtgtattatctgattggaaagtctttacagctcactgacaggtatggcaaacccctgcaggactgctctaacaggaactgaactctgtgttaacctttctgtcaactctgagcgcccaagtgttaacctaagcatcttggactgttttcctgagctcctcaccttacagtgggccctgcactgatgtgtgctgtaggccctgggctcttcctctttccttctggcctggggtgctgaggtcccagcatgcctgaggcagggcccacccaagggactgcttgaatagagtttcttatttacacaaatcttgaaataattaaaaattcagtttttactttgtatttcatgtctcagtctcttgtattattagccaacaccaaagacctcccagctggaatgacagtgcttgccaagtgcaggattaacgttgactatttccattcattcatttattcactcatccagtcatctattcccacctccatttagcagatatatctgtcaatcacataccatatgctaggcacagtgctgtgaatactgtaagccaaagtagacatggtcctgttcacatggatcttacagtctactgaggacagggaacactaatcaaataatcaccccccaacaaatttaaaattagaaatgtgagctgggtgcagtgtctcatacctgtaatcccagcactttgagaggccaaggcaggcagttcacttgagcgcaggaatttgagaccagcctgggcaatgtggtgaaaccctgtctccacaaaacatacaaaaaattcgccagacatggtggtgtgctcctgtagtcctagctatttgggaggctgaggtgggaagattgattgatcccaggagttcaaggctgcaataagtagtgatcacaccactgcactccagcatgggcgacagagcgagacccaggatccaaaacaacaacaacagcaacaacacaaaaaataaaaccgacaaatgaggtaataagttctatgaaggaaaggcgcacagtgctgtgagggagcctattagcttgaaaggagggggcaagaaggctttctcctagaaaaattacaacttgtatgagctaagatctggagtgtgagttgcaattgtgttgccaaaggattaaggtggtggccacagcagagcatttcattcaaaggggtccatgcacaatgtcctctggcaggcagaggctcagcctttctcaggaactaatggcagtatgacaagagcacagagagtgagaaggaataaggagggagagaatctggaggaagccttgtagatcatgataaagttctcgtcagagactaaaaaatgactgaaggctttagagcaaggcagtgaaacgaccagacttatgagtatttttaaagattactttgtctattaagttgaaaacagattcgagtagtggtaggagtgaggtgggcaatagtagtcttggtgcagatgaaggtccttgtgccttggtggtggtggatatgaacagtagtggatcagtttgagagatttttcaggacagatccattgtgcatactaatgtattgcgtatgaaatgtgaagaagatgattctgtgattgcagaatgttctgactagtgcagtcatttgtagggaggggaaacactggaagggggtcccatttagaggggaagattatgaaggtggttgtgaacatgttgagtttggaacattgaacaggagacgtccaagaggcacttggatattttggtctcaagttcaggggagaggtctggattggaattgcacatttgtggatcattggtgtgtaggtggtaattgcaaccgtaagtatgaagtatctctcctgtgtatagtgtggagtgaaaagacaggagagcctaagaatgactatgacattccaacatttagtgatcagacagaagaaaataaaattaccgttgaggagagttgtcggactaaagataaaactgagggagaattatggctactctctgtttgtctgtccatgcttctccatgctactctgtgccctgggaataagatattatgaattacatcagccgggctcccttgcttctggcttgatactgggttaagccaatgagagaagagaaagatcctgcctccctccctgttatgctgtgatttgacagcagtttcattttcccaaagtctacagtttctatatcagaataagtagttgaagagcacatgaaattaaaaaaggaagtatattgatgagtcttaggagacacttagtgtggctttaggcaaagaatgtagccactgtcaaattgtagcatagcagattggtcttaatgccctccttcatacaaaatgtctagtgagacttgcctgttctctctctttatctttttctgcatctcccacaggctcttcaacttattccaatctggcaacttaccaacannnnnnnnnnnnnnnnnnnnnnnnnnnnnnnnnnnnnnnnnnnnnnnnnnnnnnnnnnnnnnnnnnnnnnnnnnnnnnnnnnnnnnnnnnnnnnnnnnnnatttacaaattgtgtttacaaggaattggaattgggagcataggtaaggtctgctgatcacagaaaaactggtttttaacattccttttagttttggagggcggaagggagagagggagcgaggacacagggaagtttacaacaaaattttcactgttaatagctttcttgggaagaaaacacacacacaaattctgatgttaggaatattttaagcatatatcttcaatattattcatccaggagcaaagtaagtcctgatgcaggaaaggagtgagtttcacagctttctgagcccctacttgacccaggaagcccagctggaacctcctctcagtctcccctctagacaggacaccccaactgctgttgggaactggacggcagtcgttctggctactttctgctgatgaggggcgaagaaggggccctgcagttgtggtgtcttccagaggggaactttttaggctagtcagagaccagtatgtcgatccaggggtccttggtagatgccgtgagttgagctcatttgaggttccatttgtaagaccatttgtaccttgatggcctcgatcctgaggaaacaaatttgacaaggaggttaaaaatgcaaggcccaaaaacgagtaggatggctgtcgcagggcctagaaaggggaggagccgaggtatccattggttaaacatattcaagcgccctgagtgttcaagctccttttttctactttctatttattctcttatttctttgaccttttcagtaatgattcctgactggttaacaaaatagcaacattcttttcctaagaagaggcaagttcctccttttttagctgttaataagtctagggctctccggttttgaaggactactgcagctagagaattaagctggctttgtagggtcactagggagttggcaattcattccatgtcatcatttaattttagtgataatttataataaattggtggtggaggttatgcctccaattccagtcccaagcctgcccagtattccgactcctacaataaaagggacaataagggctcacgtgtggcgagattggggtataaggagactttgtaactcctgttcagtatatatggacatgggaggtgctagaaaggagagaaagcattgttctttcagagtgccatttaggcatcaataggctgtgttattatagatgaaaaaaatgcctgaagttagacaagtgaaacctgaggtcttgcactagtctctgctgaccatttgttttttgtattcctagcattcggttattgcaaggactgttacattttcttactaaaacttgagcttttaaatgtctaacaatatcctgtaatcctttgagagctttaggccttaaggtatattgcctttaataaggaaaagtgctggggtcttttagcttgatttggactggatgggcattctttgcctttccaaattgtcgttttaaggcccatacctcaaagttgattccttctttaattagggacaacaaataggtaatttgttccccatattcctgtagataatggccccagctttggctaatatgtccctccctaataagggtgtgggacttttgggcataacaagaaaggcatgtgaaaagaacaaagtctcctaatggcagctgaggaggcaagagaaatacctggttacaggctgtcttaagattcctcggatagtaatggactttgaggacagtcgttcagggcaggagattaaaactgagaagaccacaccagtgtccaggaggaagtccacttcctggacctcaacagtcaaccttacctgggactctgtgtgggtgatggcatgagctggcacttgccccaggcaccttcagtcctgttgctgaatcatctggttgggtgcctctggtccagagggccttcatcctctggagcagtgcaccttccaaaccttcctttcaaaccttcttggcatattggacatgggcgaggggacagtttgttttttgttggacaatttttcttaaagtgtccttgcaaactgcactgataacaagccctactaagcgattggcctcctcttctcttggttccctctgagccaccaaggtctgcctgtctgagggccatgtctaaggctgcagcctttatcttatcttgcttgtcccttttggcctgttcctcttggtccctgttatagaataccaaggttgccaggtttaataatgtctccaaattttgttctgggcctaaagcagactatgccagacactgattgggtgataaatttatcctttaaaataagttgaccttctacagaatatggagttagggaggtgtgctttcttagggcctcccttagcctttctagaaaagcggaggggtttttctctttttcctgtgtaattgtggatagcattgaatagttgataggctttttcctagtcttcctcaacccttctaaaatgcaagttagcaaatgcctgcggctccaatctccatgatctgagtcagtatcccaataagggtctacagtgggggctgcctgttgccctgtggggaatttttccctctcctccggggtcattcgatcatttacctggctaaagtaccacagatccccaaattgccgggctacagctaaagctgcttctttttcagtaggacttaaggtctgatcaagaagcaacatgatatctctccatgttagatcaaaggactgccccaatccttgcaggacatctatatagttataaggatcatttgagaatttccctaaatctgcctttatttgttttaaatctgagagtgagaagggggcatgcacgtgaatgggcccaaattctcctccttgtaagggacatagtcccttgtaagggagatagtttgggtgcctggctcacggagtttacgttctctttccggtgtgcctttaacacttcggtgggaccggatggaggagagtcagttggggaggagagtggggttgagggaagaggccctgagtgtggaggcaactgtgggcctctgtcatttgggcaaagcttgcaggcttggcacagggcagtattgtcacgaagggcaaagaaaacctgtacataagggactttactaaatttacctttctgtttacagaaaagatctagctgtagaagggtgttataattaatactttcctcagagggtcaagtttctccattttgtaaggaatactgtggcaaggcagtggtacagaagaaaatcagccgcttcttttttaaggtttcagggtcgaatttgtcccatcttaagggagtgtccagttttgaaggcatggtgcccatttggaattttaaacacagggattcccacacccgtggttagtcttgggactcgtcttccctatggcatcccccgagggtcaggtccagttgtgctcaaggctcatggctgcttttcctgagccctccatgtaccggatttaaccatgcttaccagcgggatggaaacttcccttgcccctgctgtgcgcccattgaccactaaatggggcacaaggactgttggatttattgtgatccttctgccaatgcattctacctgttccagggtggcaaggcccgggtctggggcaccactgatgcttgcatgctaaggcccaatttacgtgggcctggccataaaactgtccttcaaggaggaatctctgaattagcaacaggaggcttagtaagcataaaggggtggtagatgtcttctaggccagggctgagagaacagctgctgtactctagccttctgtccccacttgccatcaaaggagtaagcccctctcttaaggcagtaccagtatcctgtgtcccaactgactatattttcttccttccaataccaactattgaatggttgaaatagcaattcaacggctctaagagctgtacccatgcaccacagattgtacttgagaggccctaaggaaggggaaaacctatgtgggaagcaatggaggaaatgccttaaggtttttactattcacatgaaaattacaggcctgtctttaaattgtcctgatgtaggggaccataccctatggtggggaactggccctttaaaatagccatcaaacgatgatacctgcctaaaccctggaaggtaccatgaacagggatcctctgggcactaccccaaaaatttaagacttctaaatagggaatcttgatcctgcctagtgggaataaccttgcttgcaagatgagaaaagaagtctagccagtggacattgggacccaggagacaggggtcagaagatgtggtggtctcacgctcagtaacccttgcagggggagcctctggcggggccatggtctcaaccaggaaatctggaagactagaatgtctactgataactcccgggtgtacttcgggaccaccacagaaagtgaaagagtaggaactgggtccaaactaaccaacgttcccagccctggagggtcgggggttgttagacagcccttttccagacagcctgacacccgtgtctttagtccggcggccgcgctaatcgcctttaagtggctgacaggtgcccagtttagcctctgaattctaaggaaagacaggacagaatagcaagcgaaagaggtctaatcgtactcaccatgtgaggatcgagatgcctttcctggagatcctcctggctggctcgccaaaatgtaactccaaaggttcttgccttagccatgccaaagatttggtggggcggccgcccatggtgagagagagacatggatcagaccaagagaaaaaaagctgtaagttttattgagcagagtgacagtacaaagcttccacagcatggaaggggtcccaagtgggtagccagtgttagatttttcaattacattttaaactctttaaggagggaaatacgtgcagtgggaagatgttaccagagcgagaaacaaagacaattaacatgtctcagatcttgaggagaaccggaattgtaacttaagtttatctactttatgaccttgcagtggcatggcaaaggagacaggatctcacaggacttaacaaactgtgtttacaaggaattggaattggaagcatagataaggtctgctgatcacagaaaaactggcttttaacattccttttagtttcagcgggggggaagggagagagggagagaggacacagggaagcttacaacaaaattttcactgtttatagctttcttggggaagaaaacagaggcacaaattctgatgttaggaatattttcagcatatatcttcaatattattcatccaagaccaaaataagtcctgatgcaggaaaggagtgagtttcacagctttctgagcccctacttgacccaggaagctcagctggaacctcctctcagaagcagcgtgtagtctccaccagacaccaatcctgccagagccttgatcttgaactttccagcctccagaacagtgagcaatacatttctgttctttatccagtctcaggtattttattaaagcagcacaatgaactaagatggaaatttgttgacaataaaaccaactctgcaaaatatttaaagaggtttatctgagccaatatgagtgaccatgttctggggaacagtttcaagaaatcctggagaaagtgtgcccagggtggtgaagtacctgtttggttttccagattttagagagacagaagcctcagacaaagatataaatcaatacatgtaaggtataccttgatttggcccagaaagacaggacatctcaatgccagggcttataggtcataggtagattcaaagatgttctgactggcaattggttgaaaggagttaagctttacctaaagacttaaagtctgtagaaagacattcttgagttaacataaggggagttgtggagaccaaagacagatgaagctttataggtaacagccatcacagagaatagatgtaaatgtctctttttggaccttaaaaggtgttagactcttagttaatctttcctaaatcagggaaagtcctggctgcattaatggagattgtctacagatgcaaatttcccccaccaaaggcagctttgcagggccattttaaattatgtcacagaaatgtattttggagtaaagtattttgatttccttcagggtctgctatctgtcatgtaatgctgtaccagagtaggttctaatatgatatcttattgcctcaaggagatcagtcttatgatctctattttaatgtcaatgctggtcagttgtgcctaaactccaacaggaagagagtataacaaggagtgtctgacctccctttttgtcatggctgagaattcagtttttcaggtttctctaggggtctgtttggcccaaagaggggtccagtcatttggttgagggcctaggattttatttttggcttacagattggtaccataagtaaggtattgttataacaaatacctgaaaatatggaaacagctttggaaatagataatgggtagaggcttgaccagttttaaagtgcgtgctagaaaaagcctagattgctgtgaatggagcattaagggcaattctggtgaggtctcagaagagaaaagcagtataaaagcttcagtgttagatattatctaagtggtcatgaacagactgtgggtagaaatatggatagaaaagagcattttgaagacatcttagatggaaataaggcatatcttattggaaactggaggaaaggtcatctttgttacaaagtggcaaagaactgcctgaattatgttcatgtcctaatcctttgtggaaggcaaaatttaagggccatgaactaagacatttggtggaagaaatctctaggcaaagtgttcagggtggtgcatggcttttcttaaccgcttatagtaaagtgtgagaagagaaaaaatgctcgagattgaatttacggtcaaaagtagagcagaaggtaaagatttgaaaaaatttcagcttggttatataaagaacaaaagtatggttaaggagggaaaactgaggatgtggccaagctactcattgataaggaaattagtatgaatagagggaagccagatgctattgatcaaaacaatggaagaataactctgaaggcattttggagatctttgagactgccactcccatcacaggccaagaataccagagacttgaaggcagaagtttcaaaggaggggcccagggcacctgtggaaccttggggtttgctgcccagggtcacctcaagtctctcctcccccatactctggtgaactgctcccagctgtggggttaaaaggtatcaacattcatcattgaagtggtgctaagattgcaagcatgcaaagtacacaagctgtggaggtattgctacctccacctagatttcaaaggatgactcagagagtctcaggtggccaggcaaagaaatgccacaggagcagggtggctgcagagagtatccagtagagcaatgcctagcagagtcgtggggtggggccactgcaaaaagtccccaccagggcaatgcctagcaggtctgtgaaggtggggccaccacagagtctctacttagtcaatgtctcatgaagctgtgggagtaaggctgccctgaaactccagaactctagaactgccagagtgcaatcccagcttgcaggcacatgactccaactcatgagaactgctgcatgagcagcatccagcaaagccatgggggtgggatcccccagggcctttggagcccaacttcagtctcagtaagtccgtaagacaggagatagagctgaagaagattattctcaagacttgatattcaacgttgttttcccttttaggttttggacttacttgaaatgtattacttctttcttcttgcctatttctcccttttgagatgaaaatgtctgtgtcatgcctatctcaccattgtattttgaaagtagataatttgtttgatttcacaggctcatagctagagagtaatttgcctgagatgatttataccttgagtctcactcacatctgatttagatgatatttagataagactttggacttagactttaaagttgattctgaaacaagttaagacttttggggtctactggaatggaatgatgtattttgtatgtgagaaaaacatgaattttgaggatccaagagtggaatgctatggtttaaatcatgatgtcttctccaaaactcatgttgtaacttaatgcccaatgcagtagtattaagaagtatgacttttgaaaggtgattagacctgtgggttctgccctcatgaatgggattgttgcagcttttttactcccatagttcagcaagcaggagggagtggcacccagtggcttcacttcttcactcccataccttggttagtaggagggagtggtgcccagcagcttcgcttcttctctcccattgttccatgagagggagagagagttacagctcttttattcctgctgcccacagctcagcacagcttccactcctgcatttcagtgagttccaggttcttgtcccacaaccaagaggaataaggtacatgaacactggagagtgagtaaggcagagtagaattttattgagccacagaaagaaagctgtcagtgggagggggacccaaaagtgggttgtcatctggggtttttatgggcttaaaataggggaatgcacgctgatttgtccatggctggtcttggaaaaagcacctttggattgaaaaggcatcattcagaaggaaccaaccaagagagactgggcaagacagggatggaagttctcactcctgtcatgggctctatccagaagtggcagcttggttttcaggttttagactgtccttggcttgaaggttggatttcactggggacttgtccctgtctgcctaaggaatttgtctgtttcctgtcactatcaggattaacatccttataaatgggctcaaggttgaagagagcaccctcttccctgtcatttttgctatgagaggacacagtgtttgtccctctggaggctgcagcaatgggacagcatcttagaagcagagagcacccctcaccaaacactaatgctggaaccttgatcttgaacttcctagcctccagaaccaggaggccaattattcaagactgaataatttgtaaattattcagtttgtagtattttgttatagcagcaaaagtgtactgagacaaccctctgatctacacatcacagcccggaataaatttgcaaaaatataatttttctcctgtcaattttatgcttagaacactttggtagttcctttcgccttaaggacaaggttaaaactccttaatgtggcttcagtgattggttcctgtggtttcatctcccctcaacctccccttgaactatttgcttcagtttctaacctattaattttatttccttgaatatgccatgctctttctttctacaagacctttgcaccctctacccagattcttcttagaggagtcttcaaagattatctgctaatgtgcattttcaagtgatctcatgtgtaatcattttccaatggaatacctctaaatagccctgatatttctgcactgaatccttaatattgatcattgacacatggatggatccaggttatataggacttgaatagtgtttgtttgggaaaaacaactgtaagaaaaagtatgcaaatcatgaatacaaaattagatacaaaaatgaatatttatttataataaaaaaatataataataagtgtattggtgccttggagattcagacacacattgtctgagatctctttaggccatttcccagatacacttacaaagaatgcattctgattgcaacctggcttccactcttcactcagggcactgccactttcaacaataatcagcactcagagtggcccatgcatgtgattagctgtggaacttaagcttcattagcttcatgataaatgtttcttccccctgaagttttgatatttttaatagtttttaagtgtttcagctaacaaaaatgcttattggcttctttagttgtaattctgactaaaacttgggaaacaggagaatatggaaatctagcaagatatttctccatgtcttttttggggtgacagtaaattaaccaagaaagtgtttgctccatgtgacatcacagctctgtcattttttttttttttttttttttgagacggagtcttgctctgtcgcccaggctggagtgcagtggcatgatctcggctcactgcaagctccgcctcccgggttcacaccattctcctgcctcagcctctggagtagctgggactacagatgcccgccaccacgcccggctaattttttgtatttttagtagagacggggtttcaccatgttagccaggatggtctcgatctcctgacctcatgatccacctgtcttttttaggatattctaagtcagtagttctcagatctggctatatatgaaaataatctggagaactcttcacaaatataaattttggcttccaattctaaactactaaattaaaatttctcaaagtagagactataaatgtatctttttaataagctctgcttgtatttgtatgtggtcagttcagcaccaatctaagactagcatttgtaaacaacatgtctaaagtgtaacagaatatcaaagactgggtaatttataaagaaaacacatttttttcttacagttcttaagtccaagaccaaggtatcagcatctggtgaaggccttcttgctgtgtcacaaatggggacatcacatggctagagggcaagagtgtgtgtcatctcaagtctcttataaagccaccagtcccatcatggaggcttcaccctgattaacttagctaagcttaaaattacctcacagagggcccacctccaatcaacatatgaatttggggattaagtttccaatgcatgaaatttatgggacacattcaaaccatagcagtcacatcaattgatttttaaatattgagtaatcaatgcatttctttaataaaccccgcttggtctcagtgtgtaattttttaaatatattgctggataggattcggcagtgtcttggtgaagattcatgtcgctctacagtgggaaaatatcaaaannnnnnnnnnnnnnnnnnnnnnnnnnnnnnnnnnnnnnnnnnnnnnnnnnnnnnnnnnnnnnnnnnnnnnnnnnnnnnnnnnnnnnnnnnnnnnnnnnnnaattcttcaggcacttctcctgtagttgtaagaggatccgcttcgattattgctctcaattggtcgttgtcaacttcctacggccagccactatgctcttcatcttcaaggctctcgtctcttttactaaacttcttgaaccaccactgcactgtgtatttgttagcaattcctgggccaaatgtgatgttgatgttgcaagttgtctccactgctttatgacccattttgaacttgaataagaaaatcgcttgaatttgctttttgttgttgcgggaagtcagggaccccaaatgaagggaccggctgaagccatggcagaagaacgtggattgtgaagatttcatggacatttattagatccccaaattaatacttttataatttcttacgcctgtctttactgcaatctctgaacataaattgtgaagatttcatggacacttatcacttccccaatcaatacccttgggatttcttatgcctgtctttactttaatctcttaatcctgtcattttcgtaaactgaggaggatgtatgtcacctcagcaccctgtgatgattgtgttaactgcacaaattgtttgtagaacatgtgtgtttgaacaatatgaaatctgggcaccttgaaaaaagaacaggataacagcaatgttcagggaacaagagagataaccttaaactctgaccaccagtgagccaggcagaacagagccatatttctcttcttttcaaaagcaaatgggagaaatatcactgaattctttttctcagcaaggaacatccctgagaaagagaatgcgtccctgagggtgggcctctaaaatgccccccttcggtgcggctgtcttttatggtccagctgtagggatgaaataagccccagtctcccatagcactcccagacttattaggacgaggaaattcccacctaataaatttttgtcagaccggatgtctgctctcaaaccctgtctcctgataagatgttatcactgacaacgcgtgtagaaacttcattagcaattttaatttcaccctcatcctgtggtcctgtgatctcgccctgcctccatttgccttgtgatattctattaccttgtgaagcacatgatctctgtgacccacaccctatttgtgcactccttccctttcgaaaatcactaataaaaactagctggttttgtggcttgtggggcatcacggaacctactgacatgtgatgtctcccccggatgcccagctttacaatttctctcttttgtactctgcccctttatttctcaaactgaatttgctttttgtctaacatcatttccatagtctaaaataaacataaaataaacagcaagtaataagttattagcaaaaaaaagccataattcccatatatttaagaatgaattcctttatcaaatgacaaattctaacaatgcaaaaaccgtaattacttttgcactcacctaatattttgggtctaccacaatccttgctcaacataaactactcgaaatgtgtttaattgtattaaacactgatcagaagcttgcataagtcaatttttaaatgtttctcaaaaaaacggatttgctatttttacatgaaaacacatcctgaaaacaaacaaccccatcaacaagtgggcgaaggatatgaacagacacttctcaaaagaagacatttatgcagccaaaagacacatgaaaaaatgctcatcatcactggccatcagagaaatgcaaatcaaaatcacaatgagataccatctcacaccagttagaatggcgatcattaaaaagtcaggaaacaacaggtgctggagaggatgtggagaaataggaacacttttacactgttggtgggactgtaaactagttcaaccattgtggaagccagtgtggcgattcctcagggatctagaactagaaataccatttgacccagccatcccattactgggtatatacccaaaggattataaaacatgccgctataaagacacatgcgcacgtatgtttattgtggcactattcacaatagcaaagacctggaaccaacccaaatgtccaacaatgatagactggattaagaaaatgtggcacatatacaccgtggaatacgatgcagccataaaaaaggataagttcatgtcctttgtagggacatggatgaagctggaaaccatcattctcagcaaactatcgcaaggacaaaaaaccaaacaccgcatgttccactcataggtgggaactgaacaatgagaacacatggacacacgaaggggaacatcacgcaccagggcctattgtggggtgggggaagcggggagggatagcattaggagatatagctaatgttaaatgacaagttaatgggtgcagcacaccaacatggcacatgtatacatatgtaacaaacctgcacgttgtgcacatgtaccctaaaacttaaatataattaaaagaaaaaaagaaaacacatcctggatgatgtatgtaaatacagattagttgaagctgttttttttttccatttgaataagtgtcacaaaagtgtcgaacacaaaagctgtaaataaacagttttataggagcagattgggagaagtataagaattttctgtttaacaaaagaaaagaaagaaaaaaataccttttaaggtagataacgatgttatcaagctgtttatttcttaaacttgtttctagtaactgatgcaaaaaaagaagaggaaaagagctgaagtctttaagatgtcattacaaagtactacttactaaaataatacacagtaaaacagcgttacagacaatctttaaaggaacacacaaaagccaaggtcacattgctgatacaaagctttccctgatggaccctttctgccaaaatccatgtgtgctttgatgtccaaaataaaacttgggtataaaacccacctttctatgcactagactcagggcctttgaaagatattttgttcttctatagaccacacaagatttgcatcatttttcttctattcctagtgcagagataattattttcttcccagctgttaagtttccattcatgtacatgaggtatgtgtggttcatttcaggattctcaacctcctaaaaaatagtggttgctgcatgtattagtccattcttacactgctataaagaaatacatgagaatggagatttataaagaaaagaggttttcattggttcctggttcctcaggctatacagtaagcatggcagcatttgcttctggggaggccttagggagcttttacttgtggtggaagacaaagcaagcaggagcaggtgtcttacaaggcaggagcaggaccaaggagagaagaaagaggtgctacatacttttaaacaaccagatctcacgataactcactcctaagccattcatgagaactccgctcacatgatccaatcaccttccaccaagctccacctccaacactggggattagaattcaatatgagatttggtgggacacagatctaaaccatatcactgcatgtcacaacgtgtcacattctggaataaatatatatatttaacgaagtgtattaattaatgcttttttggttgtgacagaattcagtttggcatatgcaaagaaaaaaattaggtggggggagggtagagtaaaaattaatttcctcatgagactcaataggtcaacggtacctacctgacaggattagatcggccttagagaatgattgcatttaagaacccaaccttgtctatgtggttctctccattccttgattttgcttatctttgtatatattgactttattttctcctactatagatggctttctccttgcagcattggaaggaaaaggatggctgtagacagctccaggtttgtattattctagtcagttcactaagagaaaagagacatattctctcttccagtgtccacatataaaattctatggcagtatgacagaatcaagcagttcttgattggcagacacacatgaaatgcatggagtagaggactaacagttcaccaaatgaaagggagatgccatgacccaaagatgtgggtgagagataatggccagataaaaacaacagatgttgataagcagtgtggcagatgcttttggtgtccactccatatcctcttgatccagctctgagttcacctgtcactgtggtagatggtttctggcacactggtagcttcccctcttgagttcctgcttctactcatttatctgcctgagggttttctctacactgtgaaagcttgcgccatcacagagactcatgacaaagcatgagtgaattaactaccagggatagagtcaatcctcattcagagaagagtgtgaattggtaggtaaaatcctaaccttctcattgtccagtgggacaattctgaggtatgttcaatatgctttcttagaatgtctctagtgcgattgaattccaattgcctacaaagatagctggtttatttatactttttattggttctttttcttttcctgtctctcttccatattacctcacttggctgcctgaatttacatcttaaataaaccaccaacacccaagtccttatgtcaaggccagctttgtggggagcccacagaaagacaaccaacttatccactcaattttccaaataataactgcattatacactgggaatataacactaaacaatataggtatagtctctttggagatgatagaaaagaaatttaacctctaattataattactatcatattattctcattggcattcttggcgccaattaagataaggagaatggctgattatataggtttaattcagttaataaaggtattggctagaaaagaaatttaactctcagatcacataataaaaatagaaatcaatgcaaaggagatttctcaaaaccactcaattacctggaaattaaacaacttgctcctgaatgacttttgggcaaacaagaaaattaaggcagaaatcaaaaaattatttgaaataaatgaaaacagagacacagcataccaaaatttctaggatgcaccaaaagcagtgctaagaggaaagtttatagggctaaatacctacctcagaaagttaggaaggtctcaaattaatgatctaatcacacctagagaaactagaaaaacacggacaaactaaccccaaagctagtagaagaaaataattaactaaaattagagtagaatttaatgaagttgagacccatacaaagaatcaacaaactatccatacaaagaatcaatgaaatcaaaagttggttatttgaaaaaataaacaaggttgatagactgctagctagattaacaaagaaaaagagagaagatccaaataagcataatcagaaacgacatagatgacattacaatgattctcttcagagtctgttatgaacacctctatgcacagaaactagaaaatctagagaaaaatgaaaaaatttctggaaatgaacaacctcccaagatttaaccaggaggaaattgaaaacttaatcagaacaatattgagttctgaaattcaatcaataataaaaattctgccaaccaaaaaaaagcctcagaccagatggatacacagctgaattctacaagatgtacaaagaagagctggtaccaattctactgaaactttttcaaaaaattgaggaggaagaactccttcataactcattctatgaagtcagcatcacccagatactaaaacctggcaaagatacaacaaagaaagaaaatgagaggccaatccctgattaacatagacacagaaatcctcaacaaaataccagcaaacccaatctagcagcacatcaaaaagttaattcaccatgatcaagtaggcatcattcctgggatgcaaggttagttcaacatacacaaatcaataaatttaattcaccacataaacagaattgaagacaaaaaccacatgatcatttcaatagacatgaaaaaagcttttaataaaacccaagacctcctcatgataaaaaccctcaacaaactgggcattgatggaaaatacctcaaaataataacagtcatctatgacaagcccacagccaatatcatactaaatgggcaagagctggaaccattccctttgagaactagactaagacaagagtgcccagtctcaccactccttttcgaaatagttccagaagtgctagccagagcaatcaggcaagagaaagaaatacagggcaaccaaataggaaaataaaaattcaaactacctctcttcacggatgatatgattctataactagagaacctaaaagattctgccaaaaggatcctggaataaactacttcagtatagtttcaggatacaaaatcaatgtacaaaaatcagtaacatttctataaaccaataatattcaggctgaaagccaaatcaagaacacaatcccatttacaatagccacatgaaaaaaaataaaatacccaagaatacagctaactaaggaggtgaaaaatctctacaaaaagaaccacagtactgctcagagggatcatagatggcacaaacaaatggaaaaacattccatgtccatggattaaaataatcaatatcattaaaatggccatactgcccaaataaatatacaggttcaaagctattcccatcaaactaccaacatcatttttcacagaatcagataaaagaaactattctaaaattcatgtggaaccaaaaaagagcctgaatagccaaagcaatcctaaacaaaaataaaaaaagctggaggcatctcattacccaacttcaaactatactgtaaaactacaataactaaaacagcatagtactggtacagaaacagacacataaatcaatgtaacagaatagtgaacccagaaataaagccacacacctacagccatctaatctttgacaaagtcaccaaaaacaagtcatggggaaaggactccctactcaataaatagtgctggggtagctggctagccatatgcagaagaatgaaactggactcctgccttttgccatatataaaaattaaatcaagatggattaaagatttaaatgtaagatctcaaactataagaatcctagaagaaaacctaggaaacaccattctggacattggccttggcaaagaatttatgactaagtcctcaaaagcaattagaacaaaaccaaaaattgacaaatgggacctaattaaatgaaagaacttctgcacagcaaaagaaactatcaacagagtgaacaaacaacctacagaatgggagaaaatattcaaaactatgcatctgataaaggtctaatatccagaatctataaagaacttaagcaattgaacaagcaaaaaagaaataacatcattaaaaagtggtgtcatggttactagtaggtgtcgatttgattgggttgaaagatacccagatggctggtgaaatattgtttctgggtgtgtctgtgagggtgttgctagaggagactgacatttgagtcggcagactgggaacagaagatccaccctcaatgaagttgagtaccatctaattggctgccagtgcagctagaacaaagcaggtggaagaatgtgggatggcctttcttgctgagacttctggcttacttctttatcccgtgctggatgcttccttctgctcctcctgcccttaaacatcagaaggcaggttcttcagcctttggactctgggacttgcaccatgacttgccaggagtggcattgttggcttccctgattttgaggctttcggattcagactgagccactaccagcttctctctttcccggcttgcagatggcctatcatgggacttcatcttgtaattgtgtgagtcaattctctctaataaactcctataggatatatacatatatataccccccctccacacacatatatcctattagctctgtccctctggagaaccctgactgacacagtgggcaaaagatatgaacagacacttcttaaaataagacatacaagcaatcaacaaacatatccacatcactaaccatcagagaaatgcgattcaaaaccacaatgagattccatctcacacaagtcagaatggctattattaaaaagtcaaagagaacagatgctcgcaaggctacagagtaaagggaacacttacacactgttggtgggagtgtaaattacttcagccattatggaaagcagtttggagatttctcaaaaacattaaaacagaactaccatttgacccaacaatcccattactgggtatatatccaaaagaaaataaactgtctaccaaaaagacatatgcactcatatattcatcacagcactattaacaatagcaaaggtggctgtgcgtgttggcttatgcctgtaatcccagcactttgggaggccgaggtgggcagatcacctaaggtcgggagttggagaccagcttgaccaacatggagaaaccccgtctctactaaaaatacaaaattagccggtgtggtagcatatgcctgtaatcccagctacttgggagtctgaggcaggagaatcgcttgaactcgggaggcggaggttgcggtgagctgcaatcgtgccattgcactctagcccgggtgacggagccagactctgtctcaaaaaataataaaataaaataaaataaaataaaaaatagcaaaggcatggaatcaatctaggtacctatcaacgatggattggataaagaaaatttggcacataggcaccatggaatattgtgtagctataaaaaagaataaaatcacgtctcttgcagcaacatggatgcagctagaggccattatcccaagcaaattaatgcaggaacagaaaaccaaataccagatattctcacaaataagtgggagctaaacactgggtattgctggacataaagatggcaacaatagacactagtgactactagagggaggacagaaagaggggatcaaggattgaaaaaccaagtaatgggtactgtgctcattacctgggagatgggatcaatcataccccgaacctcagtatcatacaatatacccatgtaacaaacctgcacatgtaccccctgaatctaaaataaaagttaaaattattctttaaaaaagatgaaagagcagagggaatgaattatccattcaggttcataaaaagaaatgttcttttttccagtggaaaaatatttttaactatttatttatttatgtgtagttatattttcctttgccatacattataaaattagagtttgggtcccacccaaaacctttgttcccaattctaagaataaatcaaatttgggagtgttataaatgaattcaggcccagcttgtctcttagctcatctttctctcatccaatttgttgtccatctgcagattcaaatttcactgaaaattatagcacaaattctaatcttcagcaaaagaaatttaaataattcttgcccagtactttgggattcagaaggagattatctctgacctcaagtctcacaaatcacaacaaggctttggtcttaatcctgagacttgggtgcccactgtgaatcatcttctaacaactgagtttattcatcatccctggccaacagctaatgtatccattgttttccaacccaaatggttgcgacaaagagcaagtgcattggtccaggcaactaaaaagtccagaggtaatgctgttcttaggcatcacacaagccaaggtttactatatccttagagttttgtcttcatttctctgcaaatttccagttctgcccatcttcttctgtcagccttttccttaaaatggtttccctcatggtatcaaaactggctgcaatagtgccaaagaaggaagagagcatctgcattgcagccatcttagtaaaagtcctgacattcactatgggactactagaggaaggacagcaggagggggtcaaggtttgaaaaaccgagtaatggatactatgttcacgacctgggagatgggatcgaccataccccaaacgtcggtatggggtaatatgcttattgtctttcattctgtttctttagctttttgtcttagttatctgccttgttactcatgctatttagcactggatcttatcttgttctttccaaccctctgctaaggatctggtcctgggtctattggctaactttcctaaaggcaactgtctgggcttttgaccatcaaacatcacttgatttcctcttgactctgccccacaaatctcccaggatgccctcttgaagccccagtgcttccattttcttttaccatactgttttgtctaccctgacttgcttgtcgaatcgataccatcagtccatgtggctaagtctgttcacaggccaagcatcagttctaaccccagctccacactctctattccacctgtcagtttgtcaggtgctgttgggccaaacccaaggtatttttttttttttaattctcgaaactatacatttagaaagaggtaaaaatctaatgaaaagataaagaaagctactcaaaataatttacagatattattttgaaaaatgctgatttagatttttttctggaaagaacaataggaattatacagtggtctaagaaaagtaattttatttactagtgacattttgagcaaagtattttcaaataaatatgtttaaggtggtaaaactagaatgctactgaataacctttcagattcataacaaatagaacagggtttagaataggtttaagtcatttgcacatagctcatctgtttattcaagtccatacttctaaagtgtttgagaacagcttgttccttttttatcatcttaaacatctcatctgcagactcacgtataacattaagctgctttaaaatattttcacccccttttaaatggttcaaaaataaattttaccccatgtcccatctggcttagtataaattatgaattggccgaagccaaaattatatattttacggaccaggaactagcctttgaagcagaattatgtgagtggctgaggtacgctaagcagtcagtctcccattcctgaagattgtgtctccccatagaggtatttcctcctaaaatgttgctctcttacatcttttattaaaagtaaaaaggcccaaaataaaaactcctccagactcaaaaataatgtactatagtgactggctctttcaaaacagtgcaatccttccatttgaggtcctccatgttgctcacattagtgattgataaagtgctaattaaactaatttggtgcttgtgattacacatttatttaagttccttcttaacctgatatatctgtatcaagaacaaaatatgacctttttcagaaaaaaaaaagagaaatagaattttacgtccccccaatcttgaagattttcaaatgcaaccatacatttgaaagattttcaaaggtgttcctaaaaattattttactgttgaaatgtgcatataaaagttttctattggctcccaaagataaaatctgtgtcttttaaaaataatgtactaggctgtgcatggtggctcacgcctgtaatcccagcactttgggaggccaaggcaggcggatcactcaaggccaggagtttcagcactcagtcccttagagcttctcattatctccctgatatcaaaaccaaaaatccattgctacttatattaacagtggttttcttttggcatataagtatttttctatattcgtggtttttgtttggcttgtttcactttgttttgtttcggttttaacagaagagccttactctgttgccgaagctgtagtacagtggtacaattatagctcactgcagtcctgaacttctgggctcaagtaatcctcctgcctcagcctctggagtagctgggattacaggagttcgcgactagcctggcccagacccaggagtttgaaaccagcctcgccaacatggcaaaatcctgtgtctacttatgcctctgtctctggagtagctgggattacaggcatgtgccatgttgcccagactggtcttgaactcctgggctcaagtgatctgccctccccggcctcccaaagtgctgggattacaggtgtgagccactgcgccaagctgacgtggttattttctaagaaaataaaatatttcattgttcagcaaagaagccttttatgcttccccattttcactcttaagaggaaatattaatgtgatacaggacaggtgagccccaaaattgggacttagcccaagagagttcttggcatacccaggaaaggattccaggatgaggcagtgggtagacagcaatcttttattgaatggttctgctccttgtggagcagggctaactcacaggcagtgtgcccagagttggcaatgtatgggctgctggcaactgtgcttatatccacttatacccacttttaattatgtgcaaattaaggggcaggttagtgcaatttgagaggtgggttattgagaactttctaggaaaggggagtaacttccaggttgttgccatggcatttgtaaactgtcatggtgctggtcttatgctaatgagctataagggccactagggatcattttcattaccatctactggtttctgttggtttctttactttatcctgtctggaccagatcctgttttggtcagcagggttgtgaccagaatacaagtcctcctgctctcctacctctaatgcatttactgttatcatagcatgaaactgaacaggatacagaattacctcgtgtttcttcaactttcaatatatgttttaagtgttcgcaatgacagttaaagcaaatattgaaaaatatacatgtcaacctttttaggagttttaaagttactacttagcaatgcagtgtcacctcctccaagaagtcctggttggacatcggctctcttaataggtgatttactgctgcgctttcataataccttggacgtatctgtcagtgtatttatcacactatgttagtactgaatatacaaatcattaagataataataataacatagtgtgggagataggcatatgaacatgaaaaaatggggaagcataaaaagcttgtttgccgaacaatgaaatattttattttcttagaaatgaacaatatgttcatatgcctatctcccacctcggttgtaagagaaggatttttactgatacctgtgccagtgaggtactattagtactgaatatacaaatcattaagataggattctgtactctgggacatcccagccttatgatctggcttctgggcgctccccactacccacagagattgcaaatcaacaagcttaggatagaagaggctggtacatatgtcgtctttgactcacgtaatattttagaaaaatttcagccaatatttaaaatgtgagtgatttcaacaaatctcaggattttagccattcttgagaaatctgaagatctggcagtacttggcctggtttctcatgtggcattagtaaaccgccactaagaaacagttattcttttgcacagggcatgtgcttcccaggttatctcagtccctagtgctcctcattatccccttgacatcaaaaccaataatccattgctatttatattagcagtgcttttcttttggtatataaatatttttctatattcatggcttttgtttggtttgtttcgctttgttttgtctgtaagagacagggttttactctgttgcccaagctgcagcacagtagtacaattatagctcactgctgccttgaactcctgggctcaagtaatcctcttgcctcagcctcccaagtagctgggattataggcacgggccaccacctagctaacttatttatttatttttttgtggggacagattctcactttgttccccaggctggtctcaaactcctgggttcaagtgatcctccctccttggcctcccaaagtgctaggattacaggcatgagacaccatgccaagcctattcatgttttttaattaaaaaaaaaaaaagagcaagagaaccatgggattttaaaaaatataccaacctgctttaattatttgcttacctgaacttatttcaatagctttctgattaattcattcaatacactcaggtgtgtgctccaggctttacctggtctccccacctctatttctcccctattctaacccatcctatatacccttatggtatcatcactattttctaacacctataatactaatggcagtaatagtagtagtagtagcaatagcaatagcagcagtaacaacagcagcaatagttaatatctactgaatgctaaggataactagctgttctgcagtgtcctgtgtacattacgtgcagtaacatttaattcttatgtcaacaggtcaagtaggtaagattaattattacagactctgaatgaactctgaccaattccatgcagacacaactcaacagcaccttgcttcctgcctgcatcacacatttcacttctgctcagtgcttctctgttgttgctggtcatgtggaccccaaccaattatgtggtgcaactcagaagagcagagaattcatgccccgccagacaaagctttgaccattaggtgatgggagtcaggggctaaattcctcccctcagaagtgagaaaaatcctttataactaacatcaagtggcagccaagtgaataacacgtcctcacattgcacgtccttctcttcctgtcccactcccctcactcttgctcctgaggactgcactccctatgaagtgccagtgcatgcacatttgcctcaggctctgcttcctgggaaacccacactgaccttcttcccccgcttttttgcttacattatttatattgccttcaaagaccacctcatcatattactcattttttagctgcaagagataaaaaaactaactctgccgagaccagctcagtcgtggagaccctaacccagcagtgctaaagaaattaaagacacacacacagaaatataggatgtggagtgggaaatcaggggtctcacaaccttcagagctgagagccctgaacagagttttacccacatatttattgacagcaagccagtgataagcattgtttctgtagattatagatttactaaaagaattccttatgggaaacaaagggatgggccaaaataaagggatgggctctggctagttatctgcagcaggaacatgtccttaaggcacagatggctcatgctactgtttgtggttcaggaacacctttaaacggttttctgccctgggtgggccaggtgtttcttgccctcattctggtaaacccacaaccttcagcatgggtatcacggccatcacgaacatataacagtgctgcagagattttgtttatggccagttttggggccagtttatggctagatttggcggcctatccacagcagaactcaagctaagttagtcaaagaaattgcaagggttcttgaatatttcccttggcagagggaggaaagggctacaattgggccttaggaaaagtgaaagcagcgctctcttgcactttgtctctcattttcatttccattctcatctctgctcttacggatatatcagcttcattttctctgcagtagtccagcgtcttccctgtgttgtaggacatggtagacgagagttcccagcacgtatttcccatggctcccatacattgagagttgaccacttctattccttaaaattcagattgagaattcccaagagcaggttctacctgatctggtttaggatgggtcagcgaggagtcggggaaggacagtcacagaggactgatatggcctcaagggcttactcccagctgaatctttatgggacaggactctaccagattcaaggcctgtcaatgcccaacctgtggtacttcctgcataaacctcctctgatcctgaaagtcatcatgtggtaattaaaagagcatgggccaccatgtattcatcacaaaatgccaactctgaattcttcccaggcataccattctgagcctcagttttctcatctatgaggcaggtaaaataatgcctaccatgtgacagaagaaatgatgtttaatgtgcctaacgtgtaataggtattcaataaattccaccaaccaaaattaacatctatctctccaggtgcaatggctcatgcctgtagtcccagcaactcaggaggatcgcttgacccaggagttggaggctgcagtgagctatgatcataccactgcactctagcttgggcaacaaagtgagatcctatctcttaaaaaaaaataaaaggtaacatctcccttgagcatttatacaacatagcaaatatttgtatcattttatctctttgtcaccattttttgtgtatattttatctcccctatttgatcaaatattccctaaagacaaggaatgtcttatttctcttcttagctctcgtaaccttggtatattttccagcacattggaggtgaagtataaatatttattaaaagagtaattcaactgtactctataaagtgatctggtttttatttgcagattattacaactttttgaaaatgattagttcttcctcagattcaagtaaatcttttcttaactttgaatgagaaaaactttttcttcctttctcaaaatttactaaatgcgttctgtgtagcaagtactgttagaagtactaataattgaaaaatggaatcaactctctctgcccttaaagagttgaatattaacttgttgacgtagtcatttaattttcagatgtatttttctatatagttaattccacatgttcttcatatgctgaaaaaataaacatctttaaaattggcttcctttctattccatgttgcctttagttccacacccatgatgcaagtggaaactgttcatgtgtattcgattacatgaaaatggcttgtatattttcttctattaattacagtgattttaaaattcataaactatttccttctccaccccatttgccatatgcacaccatattagttacacatctttggcttaacacagctagaacacagaaatatttactatatgtaaataaaaggctttaaccacatacattttctgggttttacatataaaacttattatttctcaactatatttctcaattgcctatacaaacaatgtaaataactcattttaagtaaagaatgacaaagttaagtctttagtcaaaataaaaaaaaaagtcattctgttacagcctgtttcactcttgaaggcttaaaccatgttttctctgactattgtaatgggtttgccacaattttatcagtcctatgtaattgcaggttctagatgaaataaagaaccccacccactctggacacctttagccaaatgagcctcactttgcccaccccaatgtgtgctcaaagctaggaactccaagctggtctcccttttctctcctttcttttatcaggaaacccctttatcatttgtgatgaacactacaaattcaaacatctggctatggacattattggcatccctggagctcactcaattgcaaagcattccacatagaaatacgtacctgtagagcttcaagaagccttggagatcaagaagtactggaccttcattttgcagatgaagaaaaagctctatcaaagtgaacactgaattgaatttggttgacttgctgaagtgaacatacaagttggtaaaggagtctgcatgaatgattacatagcctgttttaggagaaggacctactgacctctaaatgctagctatacagtcatcccttggtatcctgagggactggttccaagactcttccttgaatgccaaagttcacagatgctcacatcccttataaaaatggtgtagtatttgtatataacctgtgcaagtggggtcttggtcaaaacatatcttggggtcttggtcccaccccactgcaagtgttctcatggaggttcacacccaagcagacctgcttttccagacagtgtgcaaagattcatattctttcttttccaccatcagaacacctgtatttcctagtcttcccagccaaattggttaaaccaatccatccttcattgtacatcatggatttaatccttgtaggatagtttgcttgttaaaagaggcatttttattagccctgaaaaatgattaatgatagcaccaggacaggattggagtggggcttagcggcagctttaaaacttctgtaaaatgaatttcagctggtggatgcttcagaatttttatgtaagaaagctcagctgactcatcctgtttagaagtgggtattgtggggcttttggtgaagctgcatttgcctagcaaacccattgctttttcatagattttctaggaaattacttggagtggctttggggacaatgagagaaatcaagacaagttgtcccttgacacatcaacagattatgctacttctcaaaatggatagtatttggtctaaagagtatttggtctaaggagctgatccaaaatcttttttcacttttttacaaattcctgccttcccagtcctggtcacatttgtcttaattttttcatgaagtaaaaaacaatcaacataaaccatgagtattgccctaaaaacactctatacacttctaaaagcagttttagcagaagtagaaaacagagccagtttatgcagagctggcttaacctttttccattttaagaatgatgtgaaatagaatttaacattaaacatacacgtgttttgcacactttggaaggagggagtgtgaaaagcactgctgaatgtatcagactgatagcagtccgagattctgcctgattccatcctgacatacagcttatagcgtcaggtagtaggagaagagattttgggggagtggctcaatccacattttagcatagatagtcatccacctcaaaatagccaaacagtcagtcactgtcactgtcaccaggcctcagataactggaggaagttgtaaatttcttgaagcccatgctgaatctcattcgtattgttttttccctccacctctcattgagatccaagcacaaaataggtgcttaataaatgtttcctaaatggaacaataaaatacagttctcaacttagtttattatcgactcttccaaaaacatatcatagcaggcaagctatttctctaatccatattgtctcaattggcccaattattataaaacattatcttttcatttatatatatatatgttctttttgtcctttattaaatatataattttcttaatttcccacaattatttttcactaacacaaaaaggaataaaaaatgaaagaataaaagaagtgaaaattatgataaccaaagaaggaaaatgcttacatatgcattttagaaaaaatatgccacttatagtttcatatttaagctttttcatgacgtttctgaagacttatgtacatttttccatattttattaaaacaaataatatatgctagatttccatggttaataaaccagcaacttaaaatagttattaagccctctctgtagctccattgcccagagacactatggataatcttgtaaaaacagcttgttcaccatagcttgtaagcatgatctgataatattgcacctgcctggccttgggtccagatttcaagtttgcactcaaagcttcctggcagaagaaaaaagctaacacatgtctggctttactacaacatgctctccccactttgggctgccactctgacttctgtttctcccttaattcttaagtccttttcaaagccttttttactccatctctctctctctctcttttttttttcttgagacgcagtcaccaggctggagtgcagtggcatgatctcggctcgctgcaacctctacctcctgggttcaagtgattctcctgcctcagcctcctgagtatctgggattacaggtgcacgccattatgcccagctaatttttctatttttaatagagacgggatttcaccatgttggccaagatggtctcgatctcttgacctcgtgatccactcgccttggcctcccaaagtgttggggttacaggcgtgagccaccatgcccggcctttctccccatctcttaatgcttcatttctgtaggtctaggttgggtatattcttcccatggtctagctgttggcatagagaatcatagcagttgaggattctcactcctctacctaagtaagttagcaagtatcttgatgatcttcatcccctttgtggccacggtaataccctgaccatcatccttccatacacctagaaaaactagctttctccaaaattcactaacctttctatgattgcaaagcttaagagttagaagcattaagtctggagttagactgtcaggttcaaatcctaactctacctcttacctgctgtatgaccttggacaaattagccttctaagcctttgttcctcacttgtatcatggagatgatgataaaaaaataatattgatgttaaaggttgttatgaggattaaatgagacaatatatataaagcacctggacaatagtgtacaaaataagttcttaataaagctatgactgttaccattaccttttcacctcgcattttttagggtatgtattgagagttacagattcacaagattcacaaatgcaagaaacttgaaaatcaactggtccagggttaaaaatactcaaatgcctacagggccaagacaggcaatatgattgatattgagaggtgacagtgtgctggcagccctcacagccctcactcactctcggcacctcctctgcctgagtgcccactctggcggcacttgaggagcccttcagcctgccactgcactgtgggagccccttcctgggctggccgaggctagagccagctccctcagcttgcggggaggtgtggagggagaggtgtgggcaggacccagggctgcgcgcggtgcttgtgggccagcgcgagttctgggtgggcgtgggctcggcgggccccgctggccccaggcagtgaggggcttagcacctgggccagcagctgctgtgctcgatttctcaccaggccttagctgcttccctgtagggcagggcgtgggaccagcagcccgccatgcctaagcctcctcccccactgccgtgggctcctgcgcagcccaagtctccccgacgagtgccgccccctgctccacggtgcccagtcccatcgaccgcacaagggctgaggagtgtgggcacacagcacaggactggcaggcagctccatctgcggccccggtgtgagatccactgggtgaagccagctgggcttctgagtctggtggggacttggagaacctttatgtctagccaagggattgtaaatacaccaatcagcactctgtgtctagctcaaggtttgtaaatacacccatcagcaccctgtatctagctcaaggtttgtaaacacaccaatcagcaccctgtgtctagctcagggtttgcggatggaccaatcagcactctgtatctagctaatctggtggggacttggagaatctttatgtctagctaagggattgtgaatacaccaatcagcactctgtatctagctcaaggtttgtaaatgcaccaatcaccgctctgtgtctagatgatctggtggggacttggagaatctttatgtctagctaacggattgtgaatacaccaactggcactctgtatctagctcaaggtttgtaaatgcaccaatcagcactctgtgtctagcccaaggtttgtaaatacaccaatcgacactctgtatctagctaatctagtggggacgtggagaacttttgtgtctagctcagggattgtaaacgcaccaatcagcaccctgtcaaaatggaccaatcagctctctgtaaaacagaccaatcagctgtctgtaaaatggaccaattagcagtatatgggtggggccagataagagaataaaacgaggctgccccggccagcagtggcaacctgctcgggtccccttccacactgtggaagctttgttctttcgctctttgcaataaatcttgctgctgctcactctttgggtccatactgcctttatgagctgtaacactcaccgcgaaggtctgcaacttcattcctgaagccagcgagaccacgaacccattgggaggaacgaacaactccagacgtgccgccttaagagctgtaacactcaccacgaaggtctgcagcttcactcctgggcttgcgagaccatgaacccaccggaaggaagaaactccgaacacatccgaacatcagaaggaacaaactccggacacgctgcctttaagaactgtgacactcaccacgagggtccgcggctttattcttgaagtcagtgagaccaagaacccaccaattctggacataatatgattgaaacaaactcgcaagttgaaggacagtagggagaactgtggtcacctggctagacagcactctagctgctactcaaggtgaagcgcattgctgtcatatgagatcaggagcctggtattaccagattttccagtttttcaagagaagctagaaatccagatttgtatgttattccagtgtataaatgtcgacagtcaattcaaactcctataaaatgctttattggtttaaaaaaatgaagcatggcagcttttactttacagtctctaatctaattgcatctcatttgaaaagtgcgaaaatagaattaccaaaaaagtgctatatgcccaagggtgcacacaactacctaatggcaaaactgataaaactcacatctcccaagtctgactccagggacctcttatgtccttccctatggtgctttttcgcccttcacatctgtttctaatctgcaactaaatgctgttatttttgtactctccactccattctcatggtcatcacactcactgggttgcagttgtatcataaacttctcactggaatttctgtcaatccgattcaccttggtttgtttgctaagatcagactaaccttcttgacattaaccctcacacccctgccctaaattcttaaagaattccttatcactactgcatcagtgccaagtaccctggactgtcattcagtcatgtggcctcaagttggtttccttttgctttcctcaggcctctgcggctggctggtatcctggctgctccttgaacaagctgggtcacattaactcagcatttcctaaagtaagataaaaacaataggagcgtataataaaacaagaacaaagaaacatacgttggttgtgttccatgccaatgcattcttcttaaagtatataaaagataaagagaaaaactttaagaaaaacacataaagacagatgacctgcaaaataatgataattagactcattacccacaacagaagctaaataacaatgcagtcatatttcgaatgtttatggaaaatcttgaattttagacaaaagctgaagtatttcttccaagcctagaagaaaatacttttttttttttttttttttgagacggagtctcgctcattgcccatgctggagtgcagtggcttgatctcgcctcactgcaagttccgcctcggagtttcaagtgattctcctgcctcagcctcctaagtagctgggactacaggcacgcaccaccatgcccagctaatttttgtatttttagtagagatggggtttcaccatattggccaggctggtcacgaactcctgacttcaagtgatctgcccgtcttggcctcccaaagtgctgggattacaggcatgagccactgcatccggccaaaaaaatactttttagcctcacaaaagatcagtgtgccactcacagatcttccctaaaacaattttaaaattatttctattacagcaggacaaattaccacaaatttaacatcttaaaacaacacgtatttattatctcacagtttcttttggtcaggagttcagatgtatcttagctggggtttctgcttcagggtttctcacaggctataatcaaggcgatgggcaaggtgcatatcatccaaaggctcagccagaaagtgaggtcacacaagtgttggcaggatttggtttttctatgttttgaaccgagaatcttagttccttgttggctgccagccataagctaccctcagtcccttatcacatggacttctccataggatcactcacaacatagcagtatccttcataaaagccagcaagggagtctactagctaaccagaagttactgtctcttgcaacctagtcatgaaaatgacaatccataacctttggtatgttctattggttagaaccagaccagcccacactcaacacaagggaattacgtgagggcataaggactggaggtcagcttaaagtcagtccaccaaaccagagcaagagaaaaacccagaaaaaaagacacggattataagaaaaatggtttttatgtaatctgtttgatatttggtgccataggtggttatacttctttttataagtctctctgcacctcctaagctactttttacttatttttgccattattatgtgaaaaatcacattattagtgcactccaacttggatgagcaaagcattaaggacttaggtgttgtgacaggtgctcctttcacagttctcacatacttagatggtacttcagtgtgtttaaatgagaaagaaagggaatttatggctcagggttacaaaaaggtactgaattgaaataagcttgatgctcttaaggaaaaatgcacaaggcatatgcacgagaatcagcacaggcaacggcttcttccatgggagcggggtggggaagaaggaatggaagatttacttcctgtctggtcccactgaaactgcaggaagggaggcagtttttccactggtgtttggctggagtagggcaggtattgccaaaaggcttttctgctgttaggtcattcttttcccaatcctccagcaatgggaataggctttcttggagctttttgtcttaggcctactggcagctccagtttgcagacaacaacttctcaagatgatgtgaaaggcaatcaagaaacctaagcaactcaccatcatgtcatccttcaattttcaaggtccctagaccatctgccttattctttctacatttttgaatcttcctatgcctgtttgttgtattgtctctaaggtttttcggttctaggatggagaacctgggaagaatggggctaccccatgttggctggaacatgatccatatttttaactaagtgtaacaaactaattttaaaagaacacatttgagataattaaaggaatttgagtgtcaactaaggataagatgatagaggaattatttttaatttgatttaatttggtttggtgtgataatggtattgtgattatataatgcctttaaatacagatttttaaaaatcatttttctttattctttggagatgtttcctgaagtattttaggtgaaattacttgacatcaggaatttcctataaactatatctgcaaaaatgtttctaaaaattagaacaggagagagaaaggggaaaaaagaaaacagaggccaagcgcagcggctcatgcctgtaatcccagcactttggcaggctgtggtggtaggatcatgtaagcccaaaagtttgagacaagcctaggcaggatggagcaaccctgcctctacaaaaataaaaacttaaaaattagctgagaatggtggtgcatgcctgtagtcccagctacttgggaggctgaagtgggagaatcccttgagcccaggaattccaggcagcagtgaggtatgagggcaccagtgcactccagcctaggtcaaagcaagactctgtctcaaaaataaaaaggaaaaaagaatgaaaaaagggagaagacagatacaacaagcaagaagcaagtgtgttgagacgctggtaactgttgaatctggctgatggctaaatgggagtcattacactattttttctacttttgggtatggctaaaaattgttataacaaaaagttttgttaatttaaaaatcactctagtaatattatgaagaaaagattggaaaggacaatctaagaattggggataccagtcagaggcaactttagtaaacccacaagacgtaatggtcgttttgactaggatgatggcagctgagagggaaagaagacaaaagagtgagcaaaagatctgggaattcatgacaatggtttgggaaaaatatttgaaggaggattaagtatcaagtatgactgacaggtatctggtttgtgttacctgtgacaggaaaggtgggagaagatacaattttggtgcagataggtgagtaggggggaatttggctttgaatatgagaaacaaccaagtggagtgatttaggcagcatgcaatataaaatcttaagcttaggaacaaggtctagattggaagtggtacagcattggaagttgttacataaatgttatatgaaaccataagaatgggtaggagagtttaacataaagagaaaaaaagggcttaggacagagcccttgagaatctgcaaatcagaaaaaggtaatttttcttaaaagtggccaagccacaggagagcctagcatccagttcttagtttctaaatgccatttgttcatcagttaattaattagatgtgattagttaataagtagggtgtgcccttaatccaatctgacatactcttataagaagagaaaggcccaggcgtggtggctcacacctgttatcctagcactttgaaaggtcaaggcaggccgatcacttgaggtcaggagttcgagaccagcctggccaacatggcgaaaccctgtctctattaaaaatacaaaaatcagctgggcatggtagcacccacctgtaatcccagctactcaggaggctgaggcaggagaatcactctaaccctagcaggcggaggttgcagtgagccgagatcatgccactgcactccaaactgggcgacagagcaagactctgtctcaaaaaagagaaagagaatatccactcataggagaaatcctgcataggctctcagagctggaacgagacagtgaacaggcatacgagccaccagacacagagtgcgatgcctggcagggaaaatgttcattggcaacatttagacaagttgattaagtgaatatatgaaggactataagagccaagtttctcactcgcagaaaggggaattaaaacaaaggaaaaaagacaactagaattaattctgtgatgaacaggaactggagatattgacaataaacttatgcatttcaataaatatagatatagaaataaacataggtgtgtgtgtgtacatacgcatacatctattccttagcttagttttctgagagacagcaggagtatctagtgccgagatcttgtttctaaatattattcgctactaaaaggaagcagaaacttcctggaaaaaatggcagattccagggctggaggaaggaaagtacaaaatgatcaatttttgtgctgaaaaagtaatagaacgtgtcaaaatcacacagacatcaacttgcaggggttctcattggccaaactggaggaactctgaacattaaaataaataatgatattaagaaattatagtttatggaataaaatagaaaatatgaaccctaagagatataagtaaatgaataaattgaaagtttaatgaagagcaagatatttacatagtcttaaagaactcccaacaaaatacttctaaaattatacagtgaaaaagagtaactttacagtgaagaaacctggcagacaccaccttgatcaagtaataaaagtgaaaatatcagtaatgggggaagttaaaatcatgtgcacctgacaggatgtattgagaacacagcatcacttctgtgatattcctgccaatgatgtgtcacctaaatataatcatgagaaaacttcagacacatccatactgaagattgttcttcaaaataactggctggtatcttaggaagtatcaaggtcatgaaactggggaaaaaaactgaaaaatttttctagagtggaagaaccctgagagaagtaacaattaaatgcaacacatgatcctgaaattgatcctttggtaaaaaagaacattattgggacaactgaaataaagtctgaggtgtaggtgagagtaacatattaatgttggaaaacacatattaaaatatccagggaacacagggcattatattggtaactttctcttaaatggtccagaaaaaaaagttctttgcacttgcaacttaaagtctgttgattgttttaactttttaaaaaactttttgcatttgaggaacacttcaaaacacagtatagtgcaaaatgccaggctctagaagatacaatacctatatacaaggcatttacaacggagcaaaggattgagacatgaacacttgtatacctggtaaatcaaattgagccaaggatcaaatttgactgaaaaattttaacagagttcttgccataccacatttcacaacatgtattaaggaaggttaatattccttaaaaaaattgccctgacttgatccaactgatttgcaatactgaatatatgtattctttatacttcaatccaatcctctggtaactgactagggtgaaactgaaggcatggcccaacaaagtgaatttataagtgaagaaaatggagctccagagaacaaaaataaagaactctttgttttacactcactatacctagtgccaaagtagcatttattttccaaagtagcaatcatctcccacaaaaaactaatttataaaatagaagaggaacctggagtaaatttgttacaatgcttttcaagactcctcataaaacaacagaagaaaatgatcactagagggcacagctgtgttgctctgagacatgtatacataaggaaatttcttcaattttatatctaaatgaatttataccatcatttcacttttgaaatacagtagataagtgagttcatttccaacaaggtgggtgcaaggccttgcctgatacaggtgatttagtggcagggaaaaaaacgctgtcagaaaattaagacattctctcatctccggattgcaatgtcatttatatttttttctggttctcaggtcgtatctatcattttgtagcatttaaaataggacaatgtgtctccccatgtttaagttgaatttcattatgaagaagcctttttgcattgtatattatgttagccagcactgcagacaccattcccttgctggctgctttccatttatttaaacctttggctttttactgagacttaaatttgaaattttcttcttttaaataacatcatcagtaactcagagtgatcacttctatgccactcttactgttggatagtgaagttgtgaaatcttagtgcctaatattctgtagaattttttcttttcagttaggtctcctcttcaatcaagcaatgatgaacaagatttttctaggatatttagcagcctgtggtatgtgatgtgtggaaagtgggctgaaagccgttccgctgtcaatgctacataccccatgtccacccacctgacacctctctactcacacttgcctactctcccacatacaactttccctggtctttctcaaaaataactcacccaaaaacactggttaagcatctgagcaatgcaaggtggaatagaaaatggtaaaaatttatgcacacataagagccttataatctagttagaaaggcaaagcataaaactacaaaaatgttgctaacacatggctgtttaatgaacaactaaaattatgtgtttaggggatgcagtggctcatccctgtaatcccagcactttgggaggccgaggtgggagaatggtaaacccaggagttggagaccagcctgggccacatggcaaaaacatatctctacaaaaaaaaaatacaaaaattagccgggtgtactggtgtgaacccgtgatcccagctatccggaaggctgagaccagcggattcattgagccagggaggacgagcctgctgtgagccgtgatagtgccactgcaatacagcctgggagacagagtgaaaccctgtctttaaaaaaagttttaacagtctatattctaaatttccagaacagtatcaatattctgactcactgtcacttcatgtgttaaaaaaaaaatttagcatagtatttaacttcagtatctttgggggctctgaataactggattagaatacaagttttgtcaactgttacgtaaattcagatttctcatctgtaaaatgggaaaagtagtgcctatcacttagagttaataagaagattttattttctaggataacatacagcaagtagttagcgataatggacaactacatcattgtcatatgtcaaagtatatgttcaaaaacttttattggaaaattgtattattgtggctacatttcaggtaccatgcaaaactctagataaagatgaatcacacagccattgccttcaatgagcttaccatctaatattaatactaacattagtattataaatatggaatagtatatatatgtcacaaatgtatataaacataaaaatacatatccaggaggctattcccagatttgttttttaccactgggtgcatgagcaacaaattaagaccattgacaggtatattaacaactggttattgcactgtgttaaaagattctgctgtcatggtgtcaattaagtgttatgggagcccagagatgcatgatacatctggacactctaaagtgtagctcaggattcatcattcaggaaaatacaagaacaaaatttcaagcagatgtaacaagcatgggctttgggtaagacaaagctgtgcttaaatactgactctaacactttctatctgtgtgacagtgtgtgtgtgtgtgtgtgtgtgtaaacactactacccaccccagggctgcctgaggatctttttttaaaaaaaattaagataatattcattagttcagtgcaattctcttgctgtaggtctcttttccccttcttgtctaaggaggatgctcctaactagatgtctctgtatacaccaggccggcaaagcacagaagggtaactggagttctaaattctttcgttatcactgctccaaagttgtttgtggttaatgcctggatttcagcccctcataaccattcactttacatgggtttctgaaacctgctgcttacctacatggacttctgatcttctgtctagctctgaactattactatctattgtaaacatttcttggtttttgtactcccatgtctccctaatcctgcttctccctgctactggtagcagcactctcatttccttcggcaacccatctatttttcattcagtctgtgtggctctgggactccagccaatcataaaaatgtgtcttcccggctagagaaattgggtccaggatggagtacaatgcaagtcaaagagaaccaggcccaagacttttattggaacttagcagggcacactttctctttcttctagttttggagctgaagttgccagaggccaccattaagaaagcacctgactgagagtgaagccagtggagtaaagtataaccaaaagacagtaatttaaaaatagcttcctgaggacttttttaagggcctggatccaccaatacctgaagccagtagatgtcctagatttttcagcatataagccaataattatttttccattaagcctggttttgggcttctatcacctgcaactgaaagagtcctaatacctctgaagcgtgttggtcaatgcagtcttctaacttacttcatttaatattggctgcctctgcctctctaaaccaaagttccagctttactgccatcatcactgacaactgaatttattacaaagtacagaacaaactcacctgctttctcagatctgttacatctatactaatcatgtcaatctacactgtgcttacggattacttctatactctgaagcttatggtaaaaccaaaataagttcaatccatcaattccctactatatttgaagggcacagcctttaactaccgcctcatacaatcttaatgctactaccactaataataataacagtaagaataatagctgaaatttatccaacatctgctgagtaacaggcattacaccattagtgggttgtgttttgtgggctgcaattattatttttttttaaatggagtaggatggaatagaattaagtaaattataatgaaatgcagtgaaaagaaaatatcagattgcatccaataggccaggcatggtggctcacgcctgcaatctcagcactttggaaggctgaggcaggtggattgcttgagctcaggagttctaggccagcttgggcaacatgacaaaacccagtctctacaaaaaatgcaaaaatttcccaggcatggtggcacatgtctttagtcccagctattcgggaggctgaggtgggagaatgacttgagcccgggaggccaaggttgcagtaagccaagatcataccactgcactccagtctgggcaacggagccacacgactctgtctcaaaaaaaaaaaaaaaaaaaaaaaggcaagaataagtattggtttgcaaatttttctcttcatttatattgtgtgtctatgtgtgcatatatgtgatgatttataataggaaccatatgccacttatggataaggaaattaagtttggagaaaacaagtcatatggggaacgtgataatacctaccatatagaattgtaaggattaaatcagataatataattgtctgatagataactgagcataatgaaagttaatattaaaccatttcagaagttttttcatgtaacaatatattaacaaatttctatttctttatatagtcttttacaacagcattttaaatgtctgcaatgtattcctttgtatttgcagttatttctttgcttgactgatcttatactatgagacacttaggttcttttcatcttttaactacttacaataaaaactaacagtggctgggcaccgtggctcacgcctgtaatcccagcactttgggaggccaaggcggatggatcatgaggtgaggagatcaagactatcctggctaaaatggtgaaaccccgtctttactaaaaatacaaaaacttagccaggcgtggtggcgggtgcctgtagtcccagctactcgggaggctgaggcaggagaatggcgtgaaccacggaggcagagcttgcagtgagctgagatcgcaccactgcattccagcctgggtgacagagcgagactccgtctaaaaaaagaaacaaacaaacaaaaaacaacaaaaaaaactaacagcttatggcaacatcttctgtataaatattttcataggataaattcggagaaggggactagctaagtccaagggcatacatgttgtaaactcaagtttaaaccaatttgcgctttaccccagcaattgctctattgctctaagtctcaaaactctgtcaagagttttgaaagaacttaagaatccatttgtagggcaagatactgctgtcatggtaagaccaacaaacaacaaagctggctttgtgcaaacctcattaaaccatccccatgcctgatcttcaactccctcaacctcatcccgtctccacgcttgactcactcagctttgtgtctctcttagagcactcctagtttcctcacgtaaataactattgctgccaccattggatatactctctggaacccgacaacgtctatctcctgaatgcataggaattgagcagaatcttattctatttcccaaacacaatcatactgagtgcaatgatactgactgcttgattgcttcagcagactctgataggtattatttgtaaacacccaatactcttttccatacctcttcttttagcagcatccctgtcctttgccagtcctttcttttaaggaacaccccccaccctccagttccatgtaatactagtgagtgcccttcatcgtagtaactcaacccctcccctaatgagtaaaaacaagatccaatctgaacctataatagcagcatattcttctggacacagaaattcgtataagggacagacatggtacacaggaagggccaatcagagtctctctctgagctcaatatacaaattttgagtgaagaaactccgctccatttggctactaaattatgattatgacgtatggtactgcttggacctatcttccccagatgtctagagaaagttgtctgctccagaagtagtccaatacacccagaggacagagatgagcagatcaataaatctgatgacatcattggccctgcattcagcagtgcttgaagtcagcaccaacagacttctgagtcaaaaaaaaccaaaaagttgttggccaaggacagtttgattggttttctgcttctagtgattagaagagtcctgactgacacagttataaaatgagcaaaattaacaatatatatcttgagttcggagtagggaggcatacagtatggaaatattatatggtaaatagggcaggaatggagttgagctgtaaaataatataaataatagtagttgtaagagaatgatgaatgcaaaataactctaagaaagatactcatttttaaaggcaacataatgaatttaaataaaagagacagagtgtggagactcagctatggtctcaatctacctctagacagctacaggtccttggccaattcacatcacctcttaaggacttcatttcctcatctaaaaataagtacactgaatagtttaattctagaatctcttatacctctaaaatctaagttaacagcccaataaagttattgtgctgtaacctgtgtttctaggaaatgctattttctgattgacttaggcctggtttactgtctgttgaagtgagcaagggtgatattacactgcatgtggaggtgtaatgaagcatattacatttgctttattttactactgatttttttctactcatacttaacaagtccaggattcaaatttgccaattaaaaatatcatctttttaaatcttttagtccttaataaagacaaaagaataattttccattttttatagttttatgtgcatatggactctgcagaggaatttctgaaaagtagctcttgaccaagcagttatttcttagccacaatttacaacatttttgccatatggagtccagggtcagtactgggtaagctcaattgttaccatattgagttgcatgtgcacagcgggtgggcaagctcataagcagggccttagacaatgattgcagactaacaagtctacagaggccaaagggtacctatgcatgcaaaatggtccaaagaagtctgtagaaacctggaaaatgcatgccttgtctgaagtaggcagctgctactcagctccagtttattcttgccatgagggagtgtgtgctcagcactgccagagagtgtctgattcaagggaagccagaaatctatattttttaatgcaaaatctcctgatttttaaaagattggcaacttattcaaagttttaaaagtattatgtggaccaacaatgtgtggtcctaacgaaacccatctgtgatctaccagattgtgacctctgctctaataattgttctagaaggggtcaaacattcagaaggaatggtggtaagtcaaggtcattcatgagctagattaattttatgaaatgctcaatgacttcatcatccattaaagtgggtattttgggacaaacacagatgccttctaaaatcactgtgtggtattgtaattgtgtcctcactaacccctcctctaatgtgtaataaccatgtggcttggatggaactgattccaatcccaccccacaataagaaatgcattttatttcattacttggtggtgcatttcttaatgtagtttgcatttgaaaatactcaagaaaaagagagctatagaatctatcatgcacataccatttctgagaaaatctcaagtgaatattacagttgactcagtaatataaaaaatatggaactgaaatgttactaagcaaactatagtgattatatcagtcaaggttctagtttgcagaaattaagttaatttaacttaaggtaaatttgaacagaaaaataatctattgggagtatattaggtactatattatttatctattgctgtacaacaaattcctggtgatttaaaacatcatttattgtctcacagtttacatggaggcacagcctgcctccatataagacaggtcctctgtctttggatctcctgtacagctgccatcaagatgtcagctgcggctgcaatcatcttaaagttcttttaggtatgaatctatttccaaactctttcaggtggtttctggcaggattcagttcactgggggccactggacctcgggcctcaatttctcatgagccattgaccagtagtagcctcccatagtcctttgctacatgactcatagggtggaaaccactgcagcagtcactgaacactgcacatctcctccggcgctgccaactcagccagttctgaactctagatatcctctacaacattatttagaattaatgtctaattagctattgacataatctgcaaatattgtaaaaattatgaaagtagctttttaaagagatgtaaaattaaaataatttattataatcacaaataataataacctgaaactattagaagaatgaactttttttatcctacaaggggagaattaataaatgatggtatatacattatttttaatcttttattgtgaaaaatttcaagcataaacaaaaaaagagaatattgttattaaccctcacgtatctccatccaacactggtgattatcaactttttttttttttggtcaatcttctgtcatctcttccatacacttttttctggctaacatattttaaagcatattccaaccaatataagtgatatgatattgatgctaataaataagtggcattcaaaattattttttaaaaatttaaggtcataattaaatttctgtttgttaaatgtctactatatgccagacatctaggcaaacgtacaatgataagaatttaatgtaatttttcaagctaaatcagtgagtgtttatgtgttaaataacagttttaaaatatacctaatcgaatttgtgagaaattctgtgaatagattgaaaaaaatcagacattaatctatgtctctcagtcttctacagaacaagctaacaaatataatatacattatataatttaaaagcttagcatgtatatatattgagctttttacacatagacaatgcatattcttttcaaaattcatgatgcattttataaaagggtttcttaatatattccaaatagtacaactaataaaggcacgttctttgacaacaatataataaaagtaaatatttgtatggcaacaaaacacaaataataaagtccacttattaacgagaaataaaatgtacactattgagtcacagaaattcaaagcatcaatagcagactaattagaaagcaccagtgacctataagtatgacaacacaacatttaaatttatgagaagtacttacaccttactccaaataaaatgcatacttttaaatacttttattattcaataagcattaataaaaataaggccaggcacagtggctcacacctgtaattccagcactttgagaggccaaggcaggcggatcacctgaggtcggcagttcgagaccagcctgaccaacatggagaaaccctgtctctactaaaaatacaaaattatccaggcgtggtggcgcatgcctgtaatcccagctactcaggaggctggggcatcagatttgcttgaacccaggaggcagaggttgcagtgagctgagatcgtgccattgcactccaacctaggcaacaagagtgaaactccgtctcaaaaaaaaaaaaaaaaaaaaaaaaaaagaataaaaattatctattcattgcctctcagctccaaatttaccctgcgtgattgctctgtaaaatgaatcttggtcggtctttgaaatgttttttgcttgctggctggcactgaagctttatcagtaaagagtgttggagagacattgtaatagaaaaaggatcttgcttcctggttctcgtgtgcttatgaggcaggctcctaagagtgtgagtgggtggctttttccagcaccaggctcctgaagcactcatagcttcttgagggctcaacttttgcagtgcatggcagccacataacctagtggttagcagcctgccagctgcagtgcttgcagcttctccaaagccaagctcttacactgcagtggacagcagcactcaggggccagaaattctcccactccaccccccaacatcccctttgcgtgcttttgtagcagagtgagacaccttcctgtgaacaatttttcctagcatactaaagggcagatttctggcaagtttcagagagcagatttccagcaagttccactgatgcagcatcacagagacttctttaccatccagtgagccaagagggcattctctccaacaaggtcagattccagtcccagggatggggtggggcagagagtgggagcttctttcttgggtgctccatctcaacccgagagtagtggctgttccttctatgtgctattcctgtgtttaatgttctctttacttcttaccagccaatccctaattactttagtgccttaatgtggttaataattctttatactaaaccttccctgttcaaattatgtggcttatctccctcttctaattggatccagactgatacaaactattcaattcaagaaattagaaaaagaataaaacaaaagaaagaaaaacagaggacattactagtgataaaaaaaacttagaaaaaagagtcagtagaattgataaatacatataagaaaccttaaaaaattgccaaatttaaataagcaagcttgtatggcaatattaatcaaataaataaaagtggccgggtgcggtggctcaggcctgtaatctcagcactttgggaggctgaagcggttggatcacttgaggttaggtgttcaagacaaacctggtcaacatggcgaaactccatctctactaaaaatacgcctgtaatcccagctactcaggtggccgaggcaggagaaccacttgaacccgggaggcagaggttgcagtgagccgagactgcaccactgcactccagcctgggtgatagagtgatactccatctcaaaataataataataataataatagtaataagagtgcacaaatgcagaatattaaaagtaagacagaaaataaaacaaatcttagaaacagaggtgattaaggcagttaagagaagaattcaatacatctaagaaaatataaaaacaaaaactgattcaagaaaagctaaaaaatccgaatacagaaataaccctgagagaaataataaagagccatcccacaaaaaaaagcctggttcaggcagtttcactgtgaagttttccagttttcaaaaagcaagtgagtcagtcttaggctctttaaactgtttcagagggtagggaatgaagaaaagagtatcctcattgtaacacttctgtaggtctcatagtaaagtacagacagtaatatctgatgaggcactaagattaagagtaaacatgaataaagcaactggttcagtgatgtatacactaagagaaaaggagggaaagaaacactattgttgaggtgcctattactagtgccaaaatatctactgtaagacatgccctctgggcaaaagtgctcccaaagaaagtttggttgctttttttttttttgagacggagcctcgctctgtcaccaggccggagtgcggtggtgtgatcttggctcactgcaacctctgcctcctgggttcaagtgattctcctagtttggttactttttaaaaaataatcacagcgtgaaataggcctctctacaatatctataataggggacagtaataagagttaaagaaaaactatgagaagatgatatggccaatccacaaagaaagggagggacgggctaaaacactcactctgagttaagcactatttctggtgtggttcaagaaaatacttactgaaatatttgctgtaaatctgtacagcaatgagtgcattaacatagtcaaaagacaacaagctagaaaaacatttgcaagacatatagccagcaaaagcctattttcctagatactcaaggtgttcacattgaataaggaaaggatcaaccgcccaacataaaaatgcacaaagggtatgaacaaggggtatgaacaattgatgcatgaaaaaatatatgtaagtagtatatacacacatacacacatcaaagttttggcttggaaaatttccttttgcttatcagaattctacttatatcctcaagaaagcgttctagagagctcctttagcatccctaatttgatgctcaatgttaatatcccctctattcatagggaaatactaaaggtttctttaaacaaataacatctgcatgtgaaaaagttaatattacccaaagtgaaaccaaaattttctaaaagtgagatctaaaagtcatctacttcaacatcacctggctgctttataaaatgcagattcatgggctctgctgcagcccacagaataaaaatcatctcaagaccacaagaccagtgtggtctaagcaggagtcgaccttgagtgctttgaaaatgcttctcggccgggcgcggtggctcacgcctgtaatctcagcactttgggaggccgaggcgggcggatcacgaggtcaggagatcgagaccatcctggctaacatagtgaaaccctgtctctactaaaaatacaaaaaaattagccaggcatggtggcgggcgcctgtagtcccagctactcgggaggctgaggcgggagaatggggtgaacccgggaggtggagattgcagtgagccgagatggcaccactgcaccccagcctgggcgacggagcgagactctgtctcaaaaaaaaaaaaaaaaaaaaaattgcttctcaggcaattcatatgttcatttgactgtgagaattcagcccctgtgaataaataataaatgtctgcctttgttttgtatagattttataaggtgtttttcataagcattttaaaatttcacgcccacacccagtctgggtggttgtctgggctaggagtattacctccactttcaagataaagaaattacagtcagagagatttagggacttattcaaagattcatctagaaaatggtagagctcagatttcattatattttcataactacaagttctgtctttatccatatgtagagctcatacaaaccccctaaaactcacatttcttcacatttgcagaaccaactcacagtggttcttcagaacaaagtgacaacaacaggtagaaacagcagtagtaaaggattacaagtaccttgggaactcacggctccatgaggcagaagttgatttcacagatgtggaaactgatggccagatggttgaatggttacacagctgtcccttcaagaaggaagggtcaggaacatatctatgataggggacagtgataggagttacagaaaaactatgagaagatgagatggccaacccacaaagaaatggaggcatgggctaaaacactcaccctgagttgagtgcaagttctggtgtggttcaagaataactgagccaaagacactcagcaggagaagcagcaagaccaacatcagtgacaatgaccccaggccagagacaagaagccaagcacgtcacccagagtctctgcctccatggattctgtagttggaggactcacatgtttctgcagcccctttcttcccagatgctttagaatccccactgcagcagaatttactcttgatccacagccaggcctaagaatcccagcataaagacctcaggagagattctggtagccccagctatagacttgctctttgctccttatgccagggactgtatgccagtgtctgaatgtttccctggccccacagtccaccttgcatctacagacccctttagtgacctctatatgtacctcttcccttagaaccctataaaaccttgtccccagatggagctggctttccagatagaaactatctcagcactgggatatttctgaattgctaaaagagtctgtccactgaaataacttgctgatcccctagggaagccattacagaaccttatgacaactatatgttaatcagtttatccatgtttttgcctgaagatgctatttgttcattttaattgctttgtagaattccacagtggagctatactatacttttaaatcccttcttctgatggtagataattgagtagttgccaattttggcatgtaataaatattgcttttatgttaatgaatttttatttcatatacataaaattgttgtatagtcaggtttagaagataatgccaaagagttatgtaaagtagattaccaagttactctcctacaggcagtatacaagagttcctgttgctcagggtcctcaccaacaattagtactgtgagactttatatatatatatatgtgtgtgtgtgtatatatatatatatattttttttttttttttttttttggtatttttagtagagatggggtttcaccatattagcgaagatagtctcgatctttgcctcgtgatccgcctgcctcggcctcccaaagtgctgggaatacaggcgtgagccactgcacccggccagagactttacatttttgttaacccgctgattgtgtttttttcttttttttttttcatttctctcatgactaatgagatgaagcgcttttcatatgtttttggaccattaggatttactcttacctgaagtgtgtactcaagtgttttgtccgtttttctaattgattgtaatgagttcttcacgtaattttaaatactagtctttcgcaaacattttgtcccattctgttgcttgtctttttattctttatggtgccatttaattattattattataattttttgagacgggagtgtcatgctgttgcccaggctggaatgcagtggcgcgacctcggctcactgcaacctccacctcccaggttcaagcgattttcctgcctcagcctcctgagtagctgggactacaggcacacaccaccatgtccggctaatttttgtattttttagtagagatgaggtttcactgtattggcttggctggtctcgaactgctgataattatttttaaaaaatatatttataatgaaattttacacctcagaaaatgatttgttctttcattttaagagactagggtaatgattatttggaggaaaggcattagaaaagattacatgttccatggcatatttttctgtagtgcttggatttttataatgattatgtattccttcattcaacaaatatttactgagcacctaatatatgccaagaaaggctttaggtcctagagatccattactgaacaaaagaggcagagactcctggcctaatggaatttacacaggaggactccatatagcttttatttagaaaaaatgctataaaagactttggtttctatcaaactttcattttgcacttttaaatatctatatataaaaccaacatggcacagaactcagagtaaatacttgaaaagataagcaaaagctttttgtccagggttgctattgatttttcccttatttcagcagcaaattttccagaaagcacactaaaatgtcagaccccaggcctctcaaacatataaataatacaaaaccatataaaatatttattttaaaacaccttagtgtaatgagccaccttaaatcaatgatgcaagtagtttaaatgtgagtcagattctgggctggctttgtctatagtaattatatttaaatttcattttgagtcagtaatacatacacaaggaaaaataaatagatgagcatgtacgatatatggaataaatatatcttgctttcatccaggatctacctcctccaacccactcgccatctactgccgcagccacagttagcagcttcttgtgtgttcttcagaaggtattgaattatgcacaaacacatagggattatgtacgtggttctatgttttaactgttctgtactgctaggttaattttgtgagtggaggctacagatttgggggataggaggctctgataacaaaatgataagctcagaactgagccaggtgaagctgaaagggggtccctgaaaaagcctctgtactcccaggctggctcccttgctggtgcaagcagcctgagaattgctgggatgccgcatgaaggtggcaatgccctccagtggatcccaggctacacccctcccacctcagcccaggcttcacagtgaacattgatgtagctggcttcacttcaccccttctcccccaaatataaaatgactgctgatgtcgtgccacgtccacttccttctcatttctgggcacttccctctcctcaccacccaccattctgcctgggggatgtcactgcccttctgtgctcaaccccttcgtttgcctgtcctacattcagcatagctttcctgagtgcaaacttgaagcaatttcttgtcttctgttagttagtttctgccctacccacacctttggtctcctatgcttcaggcttcttcacaggcacaagccagtgctctgagaaaggtgtctaggtctacaacgttatgagccttgggggatcaagttaatatttacagtgcatattttacaaatatccctcacctctgtactaaaaaagtctctccaaaatttgattgccagttttaacaaataaaaatacgggatgcttagttcaatttcaatttcagataaacaatgagtgatttttttttagcgtatatccgatgtaatcatctttcatctatatttaatctgccagttctatttccaaaccagttgagcagttaaattaaacaatccttctaatctgcatgtctttggcctgaaaaacaaagttctaatcctcctttcaatgactgtggcccatacacagcaaaatgtcccaccaatttcaaaactgggcattttgagtagccttgggtcagtgcaggaggcatttcaaagcggttgctaggtggcagacctcatctctggaaagcatttttcacattctattagtactgctgggtgagacgagcttggtagtcagcccaaatgtgtatgatttagagagcttcactttgttaccattttttcttccaatttaaaatctatagcaaaaccaggttcaaatagcacatctaaaaagctttgtcttttgagccaaatgccagaatgtctaggtaaacacagaactaagtaatcacaggcttcatttatttcagctattattctctgctggacttttgaggtagataagactagatttcttccaaacagatctgggcaggagaaaacttgaaagtaccggccagtcttaagtatcctcatgtgattcctgatataaatttacctggaaactggagtggacacaacagatttgttttttaaatcttgagttcttttgcaaacattaaactggttgtacaaaaggaatagtgtaacacacctttgttcaaattacttaacaaacttcatgaaacaagagctgtgattctacatgctgtcttgttaatccacagaaggagcaggatcccggaaaggacacaaaagagagaaataatcatcaaaagaatagtaatagtgataatagcacctcaacccaatttccccagaaagtaccagaaccctgcttagagcatgttgatgcacgatgatttcaccattaagacagcattaagagcagactctaaattaaacataacgaaattaaataacacctgcatctttgttcaataaagtattctcttttactatcttacatcttccaggcattcagggatgggaacaaagcaaagaattacagaaatgaagagctggaaggaattttacagtttttccattggtgctcagattttgcgaataaataatttaaatgtctgttaataggaaacttgctaatgaattatgtaatattaggtgaaaccatatgaaattcctgatatttgattgcttttgactcataaaaatggcaattttatttgatctacctaatgctctacagctattaaaaatatatggtagttctataagtaccggcattaaatgaattgtatttaaggtaatttgtaaggaacagaggagtgttatagggtgccagtgtgtagtatgtgtagggatatatatgtttactaatgtctaccatacatctgaaaatttataaaatacaacaaactgttaacagtggacgcctctagcgggccaacttggaaactagagacaagagtgacagagattttttttacttttgtgcagtcccaatttttactacatgcatgtattaaatattttacagcaaacacaaaacaaaaaacaaagcaacaaggaaatcactgtttagagaggtaaagcgtccgtacaaggcatacagtgagctcatactagaacacgttgaacaaagtggctgctcaattgcttatctcattcctacaattcaaagaacaaaagctaacagctcttggtggctgccagttgtgggagccactcttcactctgacctcatggtttacctgggatcttaattactctagttaaacggggaccttccccttcaaaacatggtgtcactggaggttcaatgcatcacgtttgaatcattctcactgctgttgtgggtgaacagattggatgctgcaggcaagggctgggagcaagaaagaagcccttctccacttggtgaagtcttcttgccatttcccttccatctggccatgcagagtcctcggagtcactttcaacaagtcctaacccttttctcattatgatctttattctttaacatggagttaaaaataacaaaattttattctaattatttgctgttcaagaggggggaaataaattagaattcagttttttgtgcacttatctggccaggtctcccctactctttgtccccatctccatttccacgtcctactttcctccaaccattagaccggccacatccaaattattctaatctataccagtgcttcccaaactgtgctagcgaggaggaacaacttcatgttgcagctgaagaaactgtggtcttagagattaaatgacttgtcttcattcccacagttcaaaagtggtaaacacaaactcaaacccagcttcctaatgtctagccaagtgtcctcagtcttgaaactaaaactgtttatttctcccttatcctccatctactgccctatttttctccttcgttttactgtcacaattcccacagttgcagttaagttcctagactgttttctacttgccttctccataagcccagccagttgggttcagtgcccaccaagactgaaggtaccagttgcaagggcactaagtgagcagcatctttagcattcaatgctatctaaggttagtctttcccgatataccatggtaaggattatgtgcctattttcttcaccactgtacctattggtagcctagggccaggtaccaaccaggagctgctgatctgactttccttttggaaacttcctttctcaggcttttgtggctttcttcccacttgcatgacatcccttcctccacctctttttctttataactttgggcattttcaccaattgatcaacctgtccattactgaagcaatactggagataaagaaccagcctgacgttggggtgtttatatattatttgtgaaaaatataaatgcataatggaatcacaaaccatgtaacaatatagtgtaataattatgagccaggatgcatggcttcttaacctctctgtgctatacttaattttcttgtgtataaatggattacagtagtagttcctacctcataaggttgttgtgaggattaaattatataatacagttgaagcacttcaaagagggtctgtatactgtaagtgctcacaaaatgttaacatgtaagataatatataaatcattaataagtgtcgtagaaagtctccttttcagaactcttttcccaaagagatctagtcaattttcaaaacctccttttcaagtatcctctccagaattttctttgtcattttgacttaccactccattgtctcaggaatcatggggattcctgttcagaacattgaagatttgagaaagggagaataggagcctcaaataacagccagcatcaaccagctgtgaggcatgtgagggggctttgtcctcccgacccagacaaccccacagctggctgcctgctgccacactagaaaacctaggtgagacctactgaagaactgccaggccagcccacaaaatggtgaaaaaataacaaataatagaagttgctattttacgtcactaagtgttggggtggtttgtttcacagcaaaacatacctaaatatcaccattaatccagctgtgcagagtagacatgacaacattttggtgaatactcaaaatctaggcattacatatatacacaaatacgttttatatatttacaaacagttttacatatagctatttgcagtttgtaaaactcaaagtaggatattttgcatagtgtgtattaaaacagttttctaaaaaaactttaattacatattttgaatttttgtataattataattttgcataattatttttggtggttgcattgcacatcatggtttgttagccagtcccttgctgacacttagcctgttgctaacttttggccaccataacaaaaggtttggttaagaatcatctaattgctctccagaaagaggtaccaatttacattcttaccatgaatgattcagaattctcttttgcctgtgcttttaccaacagtgggtattgcctttttaaaagacaatcttggctgggcaccctggctcatgcctgtaatcccagcacttcgggaggctgaggcgggtggatcatgaggtcaggagttcaagaccagcctggccaagatggtgaaaccccgtctctactaaaaatataaaaattagccgagtatggtggtgggcgcctgtaatcccagctacttgggaggctgaggcagagaattgcttgtacccaggaggtggaggttgcagtgagccaggatcacgccactgcactccagcctggggaacagagtaagtctccatctaaaaaaaaaaaaaaaaaagacaatctttgcttatctaataaatgaaaaactatctcactaattcttaaattttgtttttattattgagattgagtatattttgatgtatagtggacattcatgtcttctccaaaatgcttattcttactctgttcattttacaactttcgttatcttattcttattgattgtatgatacagccacttaacactttgtcatatatatttatatatttcaatatataatatatatatttaatatacaacatataaatatttaaatatatatgacaaagtgttaaatggctatatcatacacaaacctatttatatttatattttatatatatttaaatatttttctctaatttccttctaagagaagatttccctcaaaatgtatgggtttatgtggcttttcttaatgcacaaaggttaaaatgtttaaattgtcaaatctgtcaatgttttgttttttatttctgacactggtgtcatcatattcattttttagaagatggcaaagtttaaatctcttcaaggagtatgtattagtccattttcacactgctataaagatactacctgagactaggtaatttgtaaaggaaagaggctcaattgactcacagttccatatggctggggaagcatcgggaaacttacgctcatggcagaaagtgaagaggaggcaagaaccttcttcacatggtggcaagagagagaagtgcaagcaggggaaatgctagacgcttataaaaccatcagatctcatgagaactcactcactatcatgagaacagcatggaggaaactgcccccatgacccaatcacctccctccatgaacacatggggattacaatttgagatgagatttggatggggacacagagccaaactgccaaatcatatcagagtagttagttgtcattcaggtaaaatctcaatccctcagtctctgttgcataccacattctattctcaccatattcagccaaattaacatcccacaacttctaaaagcaaactgtgttttggtgagcttagtttcttgtatgttttgatgcatgggctctggagtattgtaaagaaaaagtttaggattctgactcaaccaattatcaacagtatgagaagagctttttgggcttcagcttcatatttaagtgggctcagaactaatgtgagattaagttatgtgtaacaaacaacaaagcttaaaatacagttggcacttaatgaatatcagttctccagccatccctccatgtttttgcttatcctgggaaatctttctgtgacatcattgtccgcttctccaccttgcaatactttatctacccttctgggccagttttatccagactccttcacaaaggtttccatagaacagagagcttactatgcatcttacacagtttgggtgtcttttattttaatgtttcagtcatgtttcatgagccaaactgtaaggttcaggaatgtttgtcttaatgcttggcacttgaatgcacccaataaatagttgttgaatgtataaataaacaaaaggtacacgggatgggaaatactggaaaattggacatatattgtaataagactagctaacaatttgcatttaaaaattagccaaattattgtgcttgggacacaaaatttgtgaccaatgtgaatttgtttagtaaatgtagccatatatatcttgcgttgtaccattgaatattctaatagttcaatataccattggaatataccagcggaaaatatcattacaaatagtttgacatactgtatttcttcaattttaagaataatttggtaccacattttaatttctttgaaactgggatgtgtcttactatcaaataaacatccagtggccaggtgatagtgatgatatagttggcattgcctatttttgaacatgggcataaatgaattgttatcatttctactaaattctatgaaatttagtcctgttgtgtcaaagccatatgccaagaaacatagttgaaggcaggagaaattaccagatatgacagattaggtgaaagaaattctaaagcaaagagaggttgatataaccaattcatgtatcatgcaggactatggttaaggcatgaaactaccatttgtgagaaactttctcctggccattaatagagaagctgcatagcttgtagtgacatacaattcagttgaacaagaaaactatgtgtttagtcaaatgggatagtgccagcatcacaactgcagaatgagtgtcattgtctaggaggcaaatcccagaaacaagattggaacatccttttaagaaatggtgcactatcaacaatattgtgtggaaaaacacacatgaatgcttttcatgaaaaggtattcagaagaatcaggctcaatgttcgggactttggtaaattcattttgcttatattttcctttcctacatacacacagtactaagcaaatctatgtataagtgtctaaaagcactaagtataaagtaaaaattcgatatgacataacatattgtcatagttttattagcagctcttttcctttcttttgagtggaacatataattgaagataggttagatttgaatagataacaataaattgaataggcactaggtctgtgagtttgtaaacttccctcagtgaaggaccagagcttggtgttttgttgttgttttggtaggtattttgttgtctgttggaaatgaggtaagaagatcctatgaagtcgtcacaaatattggttatacttgtttgtagaagcaacataatttcaagaaaagccaccttctcacatcaccttttacagcttcttaacataggtcacaggttgcattttgaattaggtgaatactccatttgtcagtcggtaaccacttctgaaattaatttattatatttccccaatataacagcaatacatgttggtatagaaaacaccttatattaaaaaaaaagtctatgtacctacatgtgagtatgtaatcagccatgtcttccacccaatgtggaaaatttctttcttaaaaattttcttaggccaggagcggtggctcacacctgcaattcccagcactttgggaggccaaggtgggtggatcacctgaaattgggagttcgagaccaccctgaccaacatggagaaaccctgtctctactaaaaatacaaaattagccgcgcgtggtggtacatgcctgtaatcccagctactcgggaggctgaggcaggagaattgcttgaaccctgaaggcggaggttgcggtgagccgagatcgcatcattggactccagcctgggcaacaagagcaaaactccgtctaaaaaaaaaaaagtttcttatacatttttcgatgccgtttctttttttctttgtttatgaaaatgtctcagatcaaagtaatatatcttcattgtccaggatatttcgttaagtatagaaaaatataaagcagcatgaaacatactatccttcatctcaccacccagagatcacatcttaatatttttggccattgcattcaatctagggcaaaaacaggcagcataacttgcacacagtggatgctcactgcatccctgctgaatgcatgaatgcagaaagagaacttggagaagggcccatttgtcttgctaatagaatcaattatacagctcttatggtctaaaattatttgtcttctcaagtttgcctcattattgtcacacagcaggagcctggccaagacacagccatctttctactatttgacaaccaagcactttggaaggaatggtcactgttttcacttcattcctgtcattcattctctcactcattaaataaatattaagtgcccaccatgtgccggaaatacggagaagaaaaaaaaacatgacccctgccctcatgcaaattactgtgtaaagacaaaagacaataaacataaacacataaatatatatatatacaaaattttataagtgcaaaaatagaagagaacaagtggctgggaaaataaacggggcaatggtataattaaggaggggacagggaaggcctttctgacgcagtgacaagtcgggtcaagaaggaacgaaagggaaggttatgaggctgtcaaactttgagtgtggccaaaaaaataatgaagaaagtgatggaggaaagactaggctgaagaagtagggcagtagtgaagtgtcttgtaagccatgctaaggattttgagttttattctatgtactgttggaaaccaatactttttttgtagtgtaaattgagcttatttttcacagataggtttcaagatgcaaagcatacaaggaccaaaaataattatatgaaaactctccctccctccggtttcctagccacccagtttccctcttcagagctgccagtctttcctacggaaagactctaggcacaaacaagcccatctatctgtttatattataatgcattttcagcactgggacgagcccatctgatttaagaccacctgaatgctgagagggcatgactctgcgttagaactctgcgctactgcccacgcatctcacaaagtctactacgccgcgcgttctcggtttcaacgcacctccaggattcagggcttcctaagctgcaattcagcagggctcccttgcttgttctcactctgtgcccccggcaacgaccccgcgcgcctacactcccgtgccgcctcagctactagtccgcaacttctagccccaaaacgctggagctcagaacccagctcaggtgcgctcgtcggtttcccagggagactggggctgattgtaggcacgcgggggcgggaagacagcttcttgcttctggctgcgatggaggcggatctgggcggggccgaaacgggggcggggccaagtgtgggggcgtagtcaggcgtgggggcgggccggcgccggcgccgcggtcggcggcagcgctctcctaagctctcgcggctgcgcttcggtcccggacccgggccacccacggggtagtgggtgctcctcggccccggacattgcaagccccagaaggtaaatttgcgtgggagccgcgcacctggagcgcgagggtacccatgatgagggcgggaggctggatggcgacagaagggagcgtcccgcggcgagtttcccaagaaagctgaactcgtcccaagtttcttgtgcctcggcttgcactcagtgaatgggtggcgggctcatttgctgcgggtggtcttttggcgcgggagggacgcggaggtgattggattaatccgcctgggcggcagcccagatttctgccgggaaccgcgcaccgcagtggtgcagtttttgcccgagaaagggcgggtaagtgcggtgcagtcgtgtcctgcgcagcagcagggggaccgccggtctgggagcacgcgagtcggccaggcgtccccggttgtccagaggcacagtttcctaacttctttcctctttaggcaagactaactcggtgttgctcctcccggcgctgacttcgaggcccggctatggacggcgagagcgaggtggatttttctagcaacagcataacccctttgtggcggaggcggtcgattcctcagccccaccaggttctgggccggagcaagccgaggccccagtcctaccagagccccaacgggttactaattacggatttcccggtggaggacggagggacgctcctcgcagcgcagattcccgcccaggtgcccaccgcctcggacagcaggacggtacataggagccccctgcttctgggcgcccagcggagagcggtggccaatggtgggacggcatccccggagtacagggctgcctctcctcgacttcgacggcccaagtcacccaagctccccaaagcggtgcctggcggctccccgaaatccccagcaaatggcgcggtgaccttgcctgcgccgccgccgccgccggttctgcgccccccgcggactcctaacgcgcccgccccctgcacccccgaggaggaccttactgggttgactgccagcccggtgccttcgcccactgcaaatggccttgccgctaataacgactctcctgggtcaggttcgcagtccggccggaaggcaaaggaccccgaacgggggctctttcctgggccccagaaaagttcttcggaacaaaaactccccctccaaaggctgccctcccaggagaacgagctcctcgagaatccttccgtggttttgagtacaaacagccccgccgccctcaaagtggggaagcagcagatcattccgaagagtctggcctcggaaattaaaataagtaaatccaacaatcaaaatgtggagccccacaagagactcctcaaggtgcgcagcatggtggagggcctaggaggacccctgggtcacgcaggggaggagagtgaggtcgataacgacgtggatagcccagggtctctgcggagaggcttgcggtccacgtcttatcgcagggcagtggtcagtggctttgattttgacagtcctaccagctcgaagaagaagaacagaatgtcccagcctgttctgaaagtggtgatggaagacaaggagaagttttccagtctgggaaggataaaggtaaaagtgggcaggagtgtggcacgccattcactaagcggaaagtaaatgtgttgggagtggggaggaggagcgtagaggaaacccgaagaagtcattccgttttaattctgtgttttgctcttgattgctagtgtacatccagctcttggccactttgatgctggcaggcacagccgagtttagtgcaactttgtgggaagaagtgaaattcatcacttttaaatttctaagctcaggcagaattgggggggacaagagtgaaatatggcagattattggctgagtgagtctttaccacttttaaaagagatagctgaaagggggaggagcatgttcagaaccgcactctgcagtcaagttgtctggagtttgcttagaggtttcagtcaatgatagctgttatcacagctgattcagaaaaatactgattcctgtttgagcctgttgattattttttgcttttacttactgaattttgagtggttactacgcacttgatgtcattcaggtagaatgtgaatttgaaaatcagttgccaggatcacaaaagacataaatattttgtcatcttttttgttgcttgtttttgtcaccgtggcctttggttgtgttttattcccgttgtatgcccattcatccttgagtgcatgtaacagattggcagctgaaaacttaaggttagggtggacactgtgtggtattgctcccctatattgtcccattagctgcacttattaaaatattgtcaaatatgacataaagaaacagggaaaactgaagaggggtattttggagtgtgtgcttccttccacagaaacaacacaggtttcagcaataaggcagattctttttggcagccacattttttcttggttaatcagagcactggaaccagtctatataaatggcacatatgcaaaacacaagcaagcctgttttattttagagcccgtggtcttaaagaaaataaattacataacattttatgtgttttttccaactctgcaagtatagcaaagttcaatttaacagtgatggtgaatcacgagttgtaaaatgagctgacctgctagttatttgaggattctcaatctgttttgacagggtgtgggggatcttgtacattttatttcattgtttcagtgaattgtagtgatcaaatgagtgaactcctccagggctcagcttctgtgcgctcttggaaatctaattaatgtaatgactaaaaaaaagtatttttacttaaaatagctgtattttctatttggctcattcatacatagtttgcttttccttttttttttttttttttacttttttttgtctcttagaaaaaaatgctgaaaggacaaggaacatttgatggggaaggtaagcatttaattttccaaactttcattgctgtttcaatgtggaataccaattataagttgaaatccaactgcagtaacaaaaatgcttacgatgagaaatatgtccaacttcttctcaaattatacagtccaaagcttctcactaagctaaatttttatctagtaatactaatggtgaatatagttaatggcattttttataggctgataactttttcagtcgatgtcctgggatttttaattcttctctaccttggctccatccccatgttcctcaggaagggtaagagcaagatctagctttttagttaaaaattctgattttggcatttagatctgaagtcatatttctttaggtcacatttcctttgacttagtattctgcccatatttccacatttgattatcatttctgacttcctgtttccttattaagtttcagctttggggaaactctaactctcctggctgacaaaaacatattcttaagacttttcaacccatgtagtatttttattaaggatctcaaaaaaaaaaaaagcagcttcaaccaggtgttcaaaccctaatcagattaatggacttttttaaatagatgggtcaagcgtcagccaactggaagagcatgaagggagcagtcccagctgtagcacttgttgggctagagggtcatggtggtagtgagggtagttaaatttttgtcatgttttgaagtgtgaagattttccaaccttcaaagaataataaagaagggagtgcccctccataggtcaagcaaatgtacaatcacccagagttataaaatatgtagccttaggtgattgtcaagtaattccctatataatttttataaagatgagtttcccattggaacatttataaatgacttatctataaaaattcattcaccgcaccaatcttaggaaatccagatatagtatttagctggttggaataagttcatctccctaattttataattgaggaaaccagaagatctgagaggtttggtaacctgtctgctgtcacacctagttacacagccagtagtaggacacagatcgagttcttagtccagtttgctgcttcttatagcactctgactatgaagtgaacagcatctacctaatatttacctaaggagatgctttacattccctggaatttgatatttattttgtgacctctgcctaagagagtttaaaatttttagattttttttgaagtcagagagtagacttcattataactagttttacgttatttccttttataaggagctgtttctgtgtatcctctcatttcttctcaaatataatgacctagaaatttttttcatgtacatacatatgtacatgaggaatgcaggattcttacagttaatgattaacaagaatgtaactaaagaagcagtgtgtctaaatggtgagaatctgtgatattagagccaggcagacctgggttcctgtcttgctgttcctgttcatcagttaagtgatactgagaaaaacccttaatatcacagggacctcactgagccacctcatgtgtgaaatgaggttaataatactgttgcctaagttgttgtgaaaatgaatgagaaatctgtcaacaatgttatgcatatatactttgtgccaactacttagtactttgaagactaggggagactcagcctttaccctcataatctgctttacatagcatgacaatcagagaccagtaaaatcttgaatagactccagtgttactttagtcatagtgcatacagaatattctgtagttgatgagaaaaggggcagatgcatgcttgttttggtagatgggaaagtcagttcaaactcaaaatgccccaaaccaaactcataatcttccccactaaacctgaatctcttctggtgttcccatctcctactttctggttgtgaggcctgcagacctaggaaacacccttaacacctccctctctctgcccccatatccggtctttcaccagtctgttctatgttatgtagctcaaatctccatcatctttcgttgactaccccaatagcttcttagtctcctaggtagtcaatgttttgctgtctaatctaagcaagtctttccttttcatggagtcccattgtgttcaggaaagaaatgctatcatgacagtgtgaaagaaactcaatccttttgtactcagggtgaaatccagtttttaccattgcctacaaatatttccttgatttggactgtctggctcatgtctctaaactcaccttgtacactgtggccactagacatacccaagcttttgccacgttgactttccctagttcttttaagatacagccatgcatcacttaatgatgaggatacattctgagaaatacacccttgggcagttttgttgttgtgcaaatatcacagagcgtacttaaacaaaccagatggtatagcctaggatatatggtagagccaaacctgtacagcatgttactgtactgaatactgtaggcagttgtaacacaatgatatttgtgtatctaagcacaggaaaagtacagtaaaaatacaatataaaatattaaaaatggtactcttctataggactcttaccgtgaatggagcttgcagtactgaaagttgccctgggtgagtcagtaaatgagtagtgagtgaatgggaaggcctagaacattactgtacactattgtagactttacaaatactgtacatttaagctatattaaattttaaagaaacttttcaatcattaacttcagcttactgtaacttattttgtaaaatttaaaaatttttgaatcttttcaactctggttttaatacagcttaaaacacaaacacattgtacaactgtacagaaatgttttatttcttcacatacctattccataagctttttcctattgtaaaaaattttcatttttactttttaaattcttttgttgaaactaaacacatgcattagcctaggcctgcacagggtcagaatcatcaatgtcactgttctccatctcaacatcttgtcccacaagaaggtcttcagggacagtaacatacatggggctgtcatcaatgataacagtgtcttctggaatacctcctgaaggacctgcctgaggctgtttcacagttaactattttttttttttttttttggtaagtaggagtgcactctaaaataatgataaaaagcatggtatagtaaatacataaaccagtaacatagtttattatcattatcaagtatcatgaactgtatataattgtatgtgctatacttttgtatttttggcagtacaatcggtttgtttacaccagcattaccatagacatgtgagtaatgtggtacactacaacatttaagatggctaggtgataggaattttttagctcctttataacatatgggaccaccgttgtagatgtggtttgtcattgatcaaaacaatattatgcaatgcgtgactgtattatgtttcctcttatgttcgcattatagcttttgtgtatgcttttcctgtagctctgtagcttctcagctttcagaccttagactttcctcattgaccaaatatctgactgccagactagatcacaccctactgacagtctgttctcacctctatataaatccttcagtttgtaggtatgtatttgtgtaagatcattatgttctcaaacttatagtgacttgccatcacattttgagtaaaaatcaaagtcctttaatggctgaggcaaggccctacatgatcagccctctggtcacccacaactcccatcttcttcttcttttttttattttgagatggggtccagtctggagtgtagtggcatgatctcggctcactgcaacttctgcttcccaggttcaagcagttcttctgcctcagcctcccgagtagctgggaccacaggggtgcaccaccacactcggctaatttgttgtatttttgatagaggcaggatctcactatgttgcccaggctggtctcgaactcctgacctcaagtgatctgcccatgtcagcctcccaaagtgctgagattacaagtgtgagccaccatgcccgccggcctcaactcccatcttctgtactttccccccatttccttgtactccagccatgcagtcctccttgctgctcttggtacatacagacataccaagtagactcatgccccagggctttgcacttgctgtgtccctgatgagatgctgtttgggcactagttcttcatcagagtcaacatcaagggccttttctttgtagttttgatacaggtggctcactttctcacctgttctatgtctttacttaattgtcactccagtgaggccttcctaaactaccctacttaacatctacatgccctcctcccagcgctttctaccccccttccctgtttcatgtttcttcatgacacttatcagcatcaaaatactatcaaagttatttgcttatttattgcagttctctcatgctttagtatcagctcctgaatattgagatttttagtgtctattattgtatttcacgtgctaagctgttgccggttcctagtaggtgttttctaagtaacagttgaatgaataaatgcatgagtgaatttgacagtttttttaattaaactgttagctcatgagaggtggatgagggcatgagagctcatgaggcatcagaggtgtctttcttttgttttccattttactctcagcccttggcacgtcatagatacacaataaatgtttattaaatagataaatgaatggtgatggaccttaaataaaagataggatgtaatttaacctaaattacagtgatttaacaggcctgactgtccttcatgagtagtggacagagacatggaaactgcttctgttggcattctctgtatgggctggtccccttcccctgcagttgagtttgagatagagctatgtgaatgagaaaatcacttttctgtaattattcttcagggactaaatctgtttgtctctctgtttataaaattggaggccaaacattgggtacatatgatgtttatttagaacaagtaacataatgattgagaacaattagtgacacataggccttgttttcttgcagaaaatgctgtcctgtatcaaaactacaaggaaaaggcccttgacattgattctgatgaagagtcagagcccaaagaacagaagtcagatgaaaaaattgtgattcaccataagccattgagatccacatggagccaactctctgcggtgagtgtttatcttcttttctatctgtggtaggaaaaaaacaagttttggaaattatgtgtggatttggcttttgttcttttctgccagtgatcctgtaactaaggagaaagactctttttagattgtgaaatgtttctcggaactctgcccgcactaatgagaacatgaactttgacacttctgatcaggaaaattaggtttgataaaataaagtgctatgagattgatgtactgtgacctctggaaactctttctgcgagatctctctttttgttaaatatagcctgcactttatcataattatggctatttacatatatatgcgtgtgtgtttatgtatgtatgcgtgtatatgtacatgtatgtatgtacctgtatatgtatctctgcacaatagaaagctagttacaattcttccttggaaatttttttttttttttttgagatgaggtcttgctctgtcgcccaggctggagttcagtggcgtgatctcggctcactgcagtctcccaggttcatgtgattctcctgcctcagcctcctgagtagctaggactgtaggcgtgtgccaccatacccagctaatttttgtatttttagtagagatgagatttcaccgtattggccaggctggtcttgaattcctgccctctagtgatccgcctgcctcagcctcccaaagtgctgggattacaggcatgagccaccgcatctagcccttccttggaaatttaatttgatatagaaatgtttatatattcttaaagctgattaatgaatgatattctgttccatctctgtgccttttttgtatgcctgtctctgacacttaattttgtgttgatgagtaatttctcctctctgcatcagacaccttttgttttttaactgtatatttttttcctcctggcttacaatgtcacagtttgatgcttagtttacttgataagagtttgggcacagcatttgcgaatatctgatgaattagcaagtagaaaggaattcccatggctggcttggttcaggggagctttgcatcaaaaacaagccagtacacctccatgagtccttaggcaatatcagagcagaggtgacagagatgtttagaatcaggaatcttgtgtatttagggaacccactggtgtaagaaaaggagttgttaatgttggtgctgtatagccagggccgtgggaatatgtgtatgtaaacggtgggagacaacttctgcttcaagctctaccttccctcttctaacctgtattggaattcaaaattcaatacaccaagcgctttctccctgtcttcttcccacctcctaattttgttctcaggagaatctgttcatttccagggcctctgaggtatagcacccttatgattatgccaaaaattaaaatattcacagtgtcaggggaagtagaatgaatatgtgatgctggtatatgtaggtgatagggagtggtgggagctgtggtgaacaggccttatataaattgagcagctactacttagctcaaaccaggtgagtgcaggggctcagtgtgaccagatgttctgataattagaaaagagaatgtacaaatccagacttttatgagtattttctcaactcaaattttaaagaaatgttgtgtgtccaagaaagtattcagatttgccctctatgctaacagtttgtaacttctgtgatatttttaaaatttttgcatgtggttaggtggtaaaagctagccacagaattggtttattagcagccttataccctaatctaatgatctcatgatatgtgtatcccaaaacagatatgtggaaaaactgatgacaaggtccattgaggccatgttggctctaaatggctgtcattcagttcattcagttgttggtatggaccatttggtagaggatccaggagaagaaagaaggctgtgaattttttgttttctctctgtggcagcagctgggtttgttagcacaggcctaaatcgtgctgttggtctctgaaagaatgctaaaaagaaatgtggatttttatgtcagttacaccctgatctcagtttagcccaagaaacaggctgccatatttatgcctcctggagtttggctttcatatacatgaacaaatgtatatacaattaaataatagtgcatatccttcagttcaactttgtttatggacttgcattttatttggcaaaaaatgaatgttgtgtcttttgtaaatgatattgatatcatagaactatcttgtaataaaatgtaaaactataaagtgatttctgattttagtgtatgttatcttggagttgagtgttcccgggaggcttgtgtgtgtttattgtgttgcttggcaattaaatttaatgaaagcagcatgattggacttggccacttagcattacttaggcaccagcctgcatttctttgtgccttttgtgtcttcttttcacttacattttactttaattttttttgttataaagtgctttaaacccatagaaaaattaaaaaataaataaagttaatcaatttctgtgtacctatcactcagattgaacaaatgttaatattttaacatatttgcttcattttctatttttttagactattacagcgaacccctccttcctttccagttcttttctccttcctacctccccagagataaccactatccctgacgttctcttctgtccttcccatgagggttttctgtccaccaaaaagatataaccagttctggcttttaggaaagtagatattttaacaccagaaagcagccattacctttttagaagctcatctgctactaaattttcaagttgtatttaggaccctaacgagcggaggcttcgtgcatcattaacaatgtcaggatgtttctcaaaagtgatcggcacctctatttctctatctgacccctcctggtagtgaagctgcagcgtttagggcaggtctcagaagactttcaactttaatatatatattcagctttaatatgtaatatataaatatatatgtgtgtgtatatatagagttggaggtctatatatataaatacctagtataatgtatatattaaacctagcatcatctacgtatataaaatcatccttccatgcttaattttaataatcaaaatagtaaggtagcccgtctaattttgagtataacattttaatgcaaaactcttcttaaagacaaggggttttctggcagtgggttaggtctcagttcggcatataccttcacttcctgctaaggagggtagggagtgagtgcacatgtgcattagccggtgttgttttattttctaaaaaatctttttattgcaaatgcctgcctcctgggatggtgaaactatccttatcagttgactataagaagcattcagtatgctgaatacttttgaagtgcagcaatttgcagtaatttatggttgttacgtaagatctttaagccttgagtctgtgctgtaatttgtctgggcgtgtttatgtttcctttggtttcattggaccatgctgggtaaggcagtgttcagctatacagatgacaggtggttccccatttatggtgttgggacaggtttaactgtagtgttgtcatttaggaataaaggagaattagaagaggcatttatttagttgggcctcagtagaataataaatgatagtcatttgtttaactgagcctcaatagaataatgagccacagacttctatattaggactaaagaaataaggctgcacacctacaactatctgatctggcaggtttgtagaagatcagatagttgtaggtgtgcagccttatttctgggctcttttttctgttccattggtttgtgtgtctgtttttgtaccagtatcatgctgtttggttactgtagccctgtagtgtagtttgaagtcaggtagtgtgatgcctccggctttattcttttgcttaggattttcttggctattttttggttccatatggattttagaatagtttttttccagtttgtgaagaatctcaatgctagtttagtaggaataggattgaatctataaattgctttgggcagtatggccattttaatgatattcatttttcctgtccataagcatggaatatttgtccatttgtttatgtcatccctgatttctttgagcagtgttttgtacttgtagagatctttcacctccctaattagctatattcctaggtatcttatttttttgtggcaattgtgaatggcagtttgttcctgatctggctcttggcttgactgttgttggtgtatagaaatgctagtgatctttgcacatcgatttcgtatcctgagactttgctgaagttttttttatcagcttaagaagctttccggctgagactatggggttttccatatataggatcatgtcatctgcagacagggatagtttgactttctttcttactatttgaataccctttctttctttcttcctttctttctcttgccagattgcactggccaggacttccagtactattgtattagtccgttttcatgctgctgataaagacatccctgagactgggtaatttatacaggaaaaagggttcaatgggcttacagtcccctgtgtctggggaggactctggggaggcttccacaatggtggaaggccaggaggagcaagtcacgccttatgtggatggcagcaggcaaagagagagcttgtgcagagaaacttccgtttttaaaaccatcagatctcgtgagacttactcactatcatgagaacagcacaggaaagactggcccccatgatcacttaactcccacctggtccccccaacaacatgtgggaattcaatatgagatttgggcagggaaacagacaaaccatatcaactatattgaataggagtggtgagagacggcatccttatcttgtgctggttttcaaggggagtgctttcagcttttgcccatttagtatgatgttggtgatgggtttgtaatatatggctcttattattttgaggtattttccttcaatacctagtttattgaggtttttttttttaacatgaatcaatgttgaattttatcaaaagccttttctgcatctattgagataatcatggtttttgtctttagttctgtttatatgatgaataatatttattgatttgtgcatgttgaaccaaccttgcatcccatggataaagcctagttgatcatggtggataagctttttgatgtgctgctggatttgatttgccatattttgttgaggatttttgcatggatgttcattaaggatattggcttgaagtttttttcttttgttgttgtatctctgccaggttttagtatcaggatgatgctggcctcatagaatgagagaggagttcctcttctccaattttttttggaatagtttcagtaggaatggtaccagttctttttacatctggtagaatttagctatgaatctgcttggtcctgggcttttcttggctggtaggctatttattactgcctcaatttcagaaatcgtgattggtctcttcagggatttgatttctccctagttcagtcttgggagggtatatgtgttcacgaatttatccatttcttctcgattttctactttatgtgcctagaggtattcataatgttttctgatggttgtttgtatttctgtggggtcagtggtaatatcccccttgtcctgaaataatgttaatggtcgtagttcccagtttgggttggtcaaatgtggaagggatttgaggttttgaaacctcaatgactttgaaaagtaagttttgacccctggagattatctggaactctactcagagacaaaaaccctgctgcacgcaggtaaatcaccggtgcctcacccaaaacagcagcacaaacattaagccagcagttcttggatctctgggaaaagcatgtgggtttgaaggaaaatattgattgtattagtcagggatggaacactgtgtacttgttacagttaatgccaggtgtgtagtcagctgaacttcaggttttccaaagggttcattcattagtaggaccccggaagtatttattgtcttttcttttagatagattttgactagagtttttgcttttcactgtaagtaccccctccacctctccaagatcatgtactatgcatgtatgaagaaatgactgttgcaacaccagtgtttgttatgttaagttcggtgatggaaccaaaaccatatttgccagctgtgccctgacctgatttatttgccatggggtgcgtttgtgtaatttccatcaccttgaaatgccagatacctttgaaaagggtgttctctgttcagcacctaatagagtcatcctctactgcactcttcttttgtacttgctgacatgtggctttatcagtaatcttaagtcattggaatgtttcttcagtttgctcaaatattttgaactctgtagtcagaaatggtttgatttcttaaagtattttaattttaattaaaatattttaactaaagtattttaattttaattaaagtattttaagtaaagtattttaattttaattaaaatattttaactaaagtattttaattaaagtatttttcagctctgtgctaagtgtgactaacagtgcaatgggagatctagaattcagacctcagtctctggttctgggctcagctcttaaagcacacatagtgtacctgtgggagactttctggaattgcaggatgagaaaggaagatttgaaaagcaggaattttattataaatatcatttcattccattgaaaatgcagcagacactttggcatcttagtagtttgaggtgatgggacttattattttagaatttactctgtgcttattgtgaaagacatactattttctagtaaaaatcagagctcaacaaatgtaatatacctgaatgtcattctgtttgcagaaatgcttaatgcatttaaacttattcttttccctaaattttcacatttgtctgaattttcagttgtttgtgacttgttgcttaaaatagtaatttctgtagttttataatttttcatttacagtttggcaacgcagcagtctcataagattatttttttactttagatggtgactaaaaccttttaccatatctttttttgtgtgtgtataagatatggaaaattattttcactttttataactggctcacatttagctcacatcatggtttaaacagaactgcaagcacatactagtccacattttcaagttggcttgtgggtcttctggaatccttgtgtctttataaacaaaaatagaggcccatgtgcctagacctgagatccatggtttggatatttttcccctccaaaactcatatggaaatttaattcctgatgtagcagtattgagaggtggagcctttaagaagtaattagatcatgagggctctgcctgcgtgaatagattaacagccgcagattactgggctaatggattaatgaattatcatgggaggggagcaggtggctttataggaagaggaagagagacctgagctagctcgttagcatgcttagcctccttgccatatgataccctgcaccacttcggggctcttcagagtgtccccaccggcaagaaggctctcaccaaatgtagcccctcagcctggaacttcttagcctctataactgtaggagataaatttctttgctttataaattacccaatttcaggtattctgttgtaagcaccccaaaacggactaagacataccccaattagaattactactctagctaagagagataaaggtgggggactacttagcttgggccagggactgggctctgtatgtggtcttgctttttatgtataattagattatggtacatttctgaaaattaacttgacttatgtaagcaatatataatatgtccttcatgtagagaataattcagacattttggaccaggtacagtgggtcctgcctgtaatctcagaactttggaaggctgaggcaggaggatctcttgagcccaggagtttgagaccagcctgggcaacatagtgagacccctatctcttaaaaaaaaaaaaaaagaagaagagaagaagaagaattgggacatttcagattagactaaaggctcttttggtcatttgtgcaatcccagtctctatccccttctccatagataatgctgctctcaatttggcaatactcttctgaaaatccacatatatacatttaaggaaacaatatagattacccatatttatgtaaatatacagactatttataatatacagcttgtttcttttctgcactatgtgtcttataagtcatttcatatctacacatgatctacagtgttataactgcattaatacataggatggatatgcatttagccatctttactgggggagtgtcatacatgctttaagaatctaataaaaattatgagccataggctttctctgtagaaaaatgcacacatgtatacatgtaaatttttttaataatttttgttttttcagttttagttggagagtatttttttcttgactttatttccaaatactaggagcaccttagtgtagcttgttatgtattgagtacagtttccatgttgttaatatcactttaaaaagtttttctgtatctgcattgttgcagcgttggaactttatgtaactcctaaaaatatagacagagattgaggaaaaaactactctggttggagctcactaattaaagggcaactgagtggtagatctgccaatatttatgtaattgattcttctgagagaacagtgaagtgttgggatatgggggtgtgtgcaccagttgcccgagggtaggcagagatcagaaatgacaggtgctccaagaaagcaggaggagatgaaaacacggttagttaattgttatgggcataactacaaaggcagatgtttcaactacaaacctacaacagggtccagacagagagggtcttcttacttcattgagtagaaaatcgatgagagagattgatgaattcattgtcttcatcaagggcctgccccacatgaagttctgtctatggcaggccctggagatagagcaagaacagactccaccttgcattcatgtccttgtaaacaacctgaatggcgagacagatgtcagatatcaaatcatcccatagataaatgcataattactattgtggtaaagctgtgaatgacttactggtgctgctgcaagatcttctagaaaagagcacctgtctgggcaaggtgcggtcagtggagagcaggtgtcagaggaggtaatgtgagctgtcatctggagggtccaggacgatagctggtggggcacagttggggagtggcagggtagaagagtctcaggtagagaaaatgtcatgtgcacagacatttggggtgatggtgggtaagaggagttgggataaggccagtgcagctggaacatcttgatctcctttgtgggtttttcctcattcctctgttctctaaattttggagggcccctgggctcatccttgggcctcttctcttacctgcactcatgtggtggttttatcaatcttgtacttttaaatatatcatatactcggatgacttccaagttattgcttactatgaaatcgaattaaattttggacttattctcaactagctatttcttttggggagttggaagggatacattcaagaataatagcagtctgtaggaagagaaggctcagggatgttgaagagttctgaataactgcatagaaaggctttttcatactgactttggattgcagattcatctatgggattcttgtatttgccctgttgagcttaatgtatcctcttgtggggtctccttcctcagtccaaagatagggctatttctcagggccacatccacacagtggttggtctccatgatgattggagagtgttgtcacctttaaaattactattgaatctttaaataaggaatccttaaaaatttgttactcaaattttgtggatttatctggagcacatatagcctgttaattctctagattattagcctgtactctaatatcttaatattaggatgtttattatctatatttctattattttgaggagataagaactatacagtcagtggacaacttctgtagcaggaagtattattgacagtaaaataaaattgcagattatttccctctttgtaggaaataagcctatccaactataataatacaaaaatggagcaatttccacttagcctggttagaaaccctgcttctggtagtggagtgcaaaggagtctgattgttgtgtgcccacctgggcaacagggagcccttatatccacatgggtccaaagttctgaatgagcagactgagttgcaggatagctgttagctctgggatcatcacagtattgatttgtttacatgcagttaaattactgaccacatatttgcaggagacttattgtgtaccaggattgtgttaggtaatttcagatacagtttatgtagtcccgggacaatgccacgagggtaagtacaaattctttactttgtaacaagtcagctgagaggccaggatgttaaatgcggctgctagttaaggtcttgagattacttggaacagcctctgcagtgacctcaaaagatggatacatgtacctagggctctggaagagcaggaactatgtttctcccaggtgctcagccaataatgtgactgcaactctgacttgggcttttttttcttctcataaattggcttattttccctttttactatgcttgtctttttcctgaaagctcctgaatactcagggtttctgagtgcttttttttttttttttgagatagtctaactctgttgcccaggctggagtgcagtggcacgatctcagttcactgcaacctccgcctcccataagcgattcttctgcctcagcctcctgaggaggtgggattacaggcacacgccaccacgcccggctaatttttgtatttttaatagagacagggttttgttatgttggtcaggctggtctcgaactgctaagctcaggttatctgctcgcctcggcttcccaaaatgctgggattacaggcatgagccaccatgcccagcctctgagttctcataacttacacttgagcacttgagactgtgttaacagccctgtccttccctcaagtcactctttcagcttccatcctattttttttttgagatggagtcttgctctgtcgcccaggctggagtgcagtggcacaatctcagctcactgccagctccgcctcctgggttcacgcagttctcctgcctcagcctcctgagtagctgggactacaggcggctgccaccttgcccggctgattttttttttgtatttttagtagagacggggtttcaccgtgttagccaggatggtctctatctcctgacctcgttttccgcccgcctcggcctcccaaaatgccgggattataggtgagagccaccgtgcctggccttccatcctatttttgaaaggatgtaggccagaatgccaaagtgagttacacagtttagttgcccagtttagttccttgagaaagagaattatattggctcagctactttgcccccgcttaataggtcactagaacatgtattgtcatttagctaggtgcttaactaactctgctccagtcagctttggcctccatgatgtactatggcacaaaatgtggtcccttggggctgctgcttttgcagaggctgtgagtagaatggtttttcttgtagaggtccatggaagtgttaaacgacatgactgactgacttttgtctagtgtaaatttatacatcatggagtggacattgtaaccatggtctttatcagcagcttaacatgataagaaatatgttttaccttataaaccagtatgtgtgtctgaatgtgtatgtttgcacatatgtatgtgtgtatatatctcaaagaaattttacaaggcaggagttactttatacttctgcttgcagtgtactatagtatttttaatttttttctgttctgttacatttaaatagataacgatcacttcatgataagactttattttgcattcaatgccagtttataacttataatttgaacagtggtaatatctgactccaaaattcatttgttttccactgcactgtagtgaatgaggcaaacaaaacaaggctaaaacccagcctaccctccaggagcttagaacctagagcagaagacaatagaaatgaaatgtctgaatgatattttgaaaggatgtaggacagaatgccaaagtgaatgacacagttgaaatcacagaaagcagtgaagtgaagatgaggaaagttttgtctataggatgtaacttaaactagatgggctatttgggcagaagaggagaaaataaaagtaatgaaggtgtaaattgcttgaataaaactttttctttttttttttttcttttaaggtagagataggaagacaggatttcaccatgttggccaggctggtctcgaactcctggcctcaagtgatccacttgccttggcctcccaaagtgctgggattacaggcgtgagtcactgcgcccagccaataaagcttgataggtaggcaaagggaagaagaaagataggacttctgtgtctgtttctcagatctccgtacaataaggtaattcctgtccaaagaaaccactgcctgctttgtacatctaatggaaagcatcagtttactctattacccatttttcagaaacagattttgctcaggttagatttttattgcaaaatctcagaaattcagagtcgctgttgttctaagtagcttattgttttggagtttctcattcctatccactggtcattttacaaaaatagcaagcaaaaataaaatagcaactaatatattggcatcacctttagaaataggtgttcttttcttccgcaagagaggaacatcagacctgttgtaccttccttaaccccttgactcataccttcactatgtgtaaatggcatcattctcagttacgcagactcctttatcctcctttatctctcatgcttgcagattggcctgtcatcactcattttcagcactgcctcataagctattgctcagtttggacttgattaaaatctttctttcttattgcctccctttaccttagcttctcatttcttttatctacaggtggtcatctctcatttctctagtttctctttggggcagcaacaaagaaatagaggtattattggcacctttaaacagttctacttgtctgccctactcgttttgtttcttttttgggagaggatgttgaagtagtattttagtttttgttattcgaagtgttgctttaattgcaaagccaagacatgtttattacagaaaaatcagaaagtaccaatagataaaaaaattgaactatctctttctattcaatcactattaacatttttgtctataacttttcagatttaaaaatatatagaaggattgtcttttacgcaaaaatcaataatgtagtaatagttttgtcacttttttcccttaacagtgtcgtaaatatcttttcatgttattaagcctgctgttttgtcacctttttttaacagtgttatgaatgaccttctatgtcattaaatattcttctacaacctttttaaagcccacatactagctcctcaaataagtggatgtttagctcttttaaccaatttcttgttgttaatcatgtgtgtgtttctaatttttcaatttaaaattcaaaatttaaggctgattaagttttttaaaataattatttttgaactactgaagtaaaagaaatacattctccttattaaaatattaaatgtaacagttaagactgaaagctgcttaactttaccaccattcccaacccctcagctgttaaccactgctataagtctggtctgtcccccagtattttattaaatagtgcacgtttaaaaattgttagtcttcggttaaattatagaattgccctttaccctgaatttattccctttcatccttgttacttctgtgtcattagcttttcatgtatttgttaacctcattttctcttcttaatttagctgatagatacatgagaactgcatctcttgctcatttgggggatagagaatacataaattttagtccaggctcagtagcccacagcgggaaatgcaggttagagagagccacaaggaaaagaggaatttgtttggtggtagaaatgtcaggattgatcaacaagttaaatgaccagggagccctgctgacagcttagctttcactgcagcagaagccaggaagccaatgagagatgttgtttctggggcattcagggggagcaacttaatttaggggaagagtagcttgcacagctcttaaaaactctgaagttttagaaggcagtgtgctacagtgattaagagctcaggctttgggggtggacaggccggcccaagtttgaatctcagctttccaattattagggtgaatgacttaacttttctgtgtctccgttctttatttgtaaactagggatagtaatgccttcctcacagaattgttacagggtttagatgcatggaaggaacagtacctggttcatggtaaacatttgatataatggtagtttgagaaataaattgagaaccaaccagaactctgaatcaggaattgacaagacatgggtagcaagctggtgagtgctggctgcaaatgaagtaatgcacgtttatttcctaaatgtacaaagcacagcagttcattcttgtgcatttaattacttatctgtagtttgtattctcagcctcatgtctgtattgaaatgatttggattcattcaggaatcctggctctgtctgtagatggtgatgcagggcatagaggagcaagtgtcctggtctgctttatctgagttttccattattttagcaaactcgatgttgcctgcttgaggctgagtacttgctatttcttgagattcaaacacttttttgaggattatagaattaagcttaacaataggacatcagagagatcagctttttgaacaaattaatttggatgtcactggcatattacctgatgcatttttaaattaagcatatgattttatgatatgtgctattatccttctactttttctttccttaaaaaaagcgttctctctctctgtttacccaccactccccagaaggatgacccatcttgacctcatgtctagtgtttggttatgcagatctctggccctttgaaatttgtgttctgtggcagctcctagctaggaaaagtgatgtcttagaacctttccttgtggatgtagtggggttaaagagagcctattgggtctggttacagaggacactctttctggactctggcagatttttcattttaaggatttcaagcatactctcaaactgctgctgttcccatgttatttacagtgaaagaactctagctcacttgtaattcagggatgactcaggttacattaagtctgtagaaaggacctgagagtgattgtgtcctgtggtataattttactttgaaatcccttcccatttgagctcttgagaaaagaagcctgtaagtagagaatcaccaatagacatgaaaagcaagcttactttcagcaaatgggtaaactccattgagttttagctcagatgggtgttcagtataaattagtgcttgatggagacagagtgatcttggattgtaaatctaatgtaatttttaactggctacatttttgagtctttttggtttgtgaggcttttgggttcttcccatctgttttccctagtggtgggcaaaaatagaaggaatgcacattcatctagaaacactatcgagtcatggagggtctgagaacaaagagggcatcagaacataaatatccctgtttacttcacagaaaatgattatctgatcagccaagagactggtgctaatcttggttctctccacagatgtaggactggctgtatccatagataagttctgtgtaaatggcaatttgagggatctatttggggcttagagaacttggctcataacctattccagttagtagagtcaaagaccaagaaatattacacaaagtttatagttcttttacacagttctctgcaaggtggagatgcttagtgtaactgtgatgagtgtaataatggactcacggtctaaagcttgtctgttcctttttagagtatttatctgagaagctcagacctgcaaagtactttagtttgggctgccataacaaaataccataaattggatagcttataaacaacagaaatttatttctcacagtattggaggcgggaaagtccaaaatcaaggcagatttggtgtttggcaaggggctgctttctggcacatagtgccttcttgctacatcttcacgtggtagaagggttaggggtttctctggggcctattttaaagggcgttaatcccattcatggagcaaagcttaatcacttcttgaaaggctccacctcctaataccatcaccttgggggttaggatttcaatatatgaatttgggaggacacaaaccttcagaccatagcacaaggtatcaaaaaggaaaccggcatgattttaggtggagtgtctaattaccttttggatctatactttgggagtttacccttttacaaatttcataaactatgttttgggtctaactagacagcatcatatccatagaagaaatatcttgtagtgttctttattaggtttagccaattactaatttctatctcatttcgacatgcaaaatatatcagttataaagatcacaggtcaagaatttcagcaccaattatacagtaaatttgtaattatgaatttaaaactattataacattagcaagttctatgcattcactatcttaataaggcacagatgtatgcttatatttttaacatgtcaaaactgtagtattgttcattttcttgttttatttgaatttttatccacttaaaatgctgaagatatagacatatgttcatatattctgtttaaaattcagaatctacagatttgaacagtttgtgaattggctggattatacaaaatcaagaacctcacattaaatccagttcttactgctttgttaaaaactacttttgcaattttacttgttgatgacatatttaaataagaaatttaaaccagtgaggaataagaaagttcaaatgaggttgctttggctgtctgtgtgtttaaaggagtgttgctttggctgtctacatgttcccatttgtacccagctgaagctggtatgaaatgtatattttaaaaatgaggccggacatggtggctcacgtctgtaatcccagcactttgggaggctaaggtgagcggatcgcctgaggtcaggagttccagaccagcctgaccaacatggtgaaaccccctctccactaaaaatacaaatattagccaggcactgtggtgcacgcctataatctcagctcctcatcctcaggaggctgaggcaggagaatcgcttgaacccagaaggtggaggctgcagtgagctgagatagcaccactgcactccagtctgagcgacagagtgagactctatctcaataaataaataaatacgaaaaaggagcctgtacaattttaatttctttcactttatgtatcaagtaagactcataggttttagaaactggtatattatattttctttcccacgaatggagacaatagaaacacttgaagaaatgggataaatttgacagtactttggattctcatagcaaaaattggtaaacttcaaaaagcttgtctattttaagactataggtataaacatatgtttttcatgctacaaagcctggaacatcaagtgatttttacttaggtttacagataaggtccctgtgtctgaatttgagaattttcagaggtctttcctattaaaaactttgtacacattctttttccccttcttttcttccttttcctttcttcctccctcccttcctctctgcctttcttccttatttccacttgatgttattcacctacattctcattctcccctgattgtctcttctttgctctctctcagtcttcttggggtccccttttcagatcattctctcccctcttgggtttcatctctccaccttgatcagtctctgaaatcttcttgcctgttcatgaccttctacctccagacacctgctataaggtgctacttaatttggagttgactgtggaaggatgcctcaggtggacaaaatgactcctctgggccttggaggaagaacctctagagcctgttctgttacaggccgtggaaggacagagacagaagcacaggcccaggagcagcggcctggcagccagccatgaggagccgctttgtcataccttagaagaaactttcaggctccccaaatgtgtgacacttcagttttctcaatcagaatacaagaaggcttcccggaatctctttttctagcactataattttgttagttccttactgatggcttgttaaaggaatattttactatatgtcatgttagtattagtgaaagattataattctgtatattaatactttacctttgtcaaaactaccttctctttcccctcaaaaaagcaagtactttagttgtgggtttgccctctcttttgataggacaaagtactcttaattcctcagtaaagtagctgtcatctgtgtaggtcgctaagcccaggtttttcattctcttctccttaagattttttgggtctgaaccccatttgggtggagatgccactggcatggaaattcttgctggtgacctcacctgcagagattgtgggcatggcacctgtatatccatctgccggactttgggtcatgcaggaaatcctgtgaaattcctgctcagggttaaccaaagggagcagctctgaagggttacattcttctggccagtctcctcccttattaaaatgtgtaaagaatcctttttagccatgaattcttgctgacaggctgacccagggtcaggatggtgggtaaagctaagaacattccaagatacatgtggaccaaaaaaacacatgaaaactggtacagacttggtattagaaggggtcttagtgatgctagcccaacccttagaaatgggatgcctttcatataaagtagggggtccctaaccaataatattgactaaaagcatgagccctggagttggactggcgtcgatgcagatcctggccttgttacctattagctatgtgctcttggatcctaagcctcaattgttacccccatctgtgaaatggggaaaagaacagtatcagctttctagagtttgtatgaggattcaatgggaaaaagagtataaaatgcttagtatattgtctggcacactataaatatttattaaataactgttgattaattaataaattaatattgatgaattcaacattttgtatagtttctcctaattcatttttgaagggcatagagttatgccttgaataatgcccttgaaacttttaaagtattaataaatgagtcaactctactttgctttttctcctaggtgaaaagaaagggattatctcagacagtaagccaggaggaaagaaagagacaagaggtatgtttctaccgagcagctgctttagagctctggagtgtgcatgtcggtgtctgcttttttgtgttttcacttactgtgtgcacttgtttagtgttgccctttgaaaatgtatttgtttaacaaaagcagtaagtgatcattttaatgtaaagctacgcataagcccccagaaaagaaaaaattttaaatatctcaacatcactcaacatcgtttgattttaaacaacaaagcacctagttcaggtatttaaactgagagaaatatgataaaaaatgaaaccaacattagatcttagaactgaaaaaggatgtttatggaaaaactgatagtcacgttagtctgtagacaaatgtagcctatttatgtaagataccctaggttagggaaagctggatgtagcatacaagggtctctgaaccctttttgcaagttttctataaatttaaaattataccaaaataaaaagtttatttagtaaaaaaaaaaaaaacaggttaataatgcagttttacaacttgaagtttaaatcaatgcaatttgagaaaattgcttattgtaataatattgtgaagctctcaaagcattttcctcttgcttcctgcatattattgtgtgtgtgtgtgtgtgtgtgtatgtcaatgcatatacatacatataaattgattccacaaaggacccaaggatgtccttttttttttttttggttggcatagaataaagtgaaatacaagggtgcagtatagtgccattttttcaagtttaaaaaaaataatagtatagaactttggtgtacccatccactgagaattaacaaatgtataacaatcgtaatttttctccttttttaaaaagaacataaaactgatagtgtagaaggcctgcattctcttcctcagtcctgtcctattcctttcctccccagagacaactataattatgaactggtacatatacttccagcctgtgttttaaaattatgtataacatacacacacatatttgtgcatgtgtgttaaaatgtatatgtatgagattctatgcatattttttggttttctgttttttacactcaacattatttttgagattattcatgttaatgcatatgaatctagatcattcatttcaatcatcatatagtactctagtctatgaacaccacctttaaatattttttatctatttttccaatgctggacagtaggtgggactttttccttcattgttaacattgtgacataaaaatgtttccctctccttgtggataaatttaaaagctcctccaagatattaatcccatttgaacatttttgttcttttaaaccttatataaccttgcctatttctatcatattctgaaaatatttattcagactttctattcctatatagcaattcctacctgctatatataacaggtctaacctaatttgcttttaaatagttgatggtattattgcaggatattttagcaattattttattaaacttattataataaactgccaattatttaccttttcctgtgatctattataaatagttcattaagtctttttgcccagtttgagtatttagattagattacacactctctccttgatgtaatcagaagtaaggagtgagcagagtgggggaaaagaaggaatgaagtgactttggacagctgtctgctgtgacaattcattacacactgaacatctgtctgtccacccaacttgaaacatacctcaaaatttctttcaaggaatcaagacaaaagccaaatgcatgagacattataaccctaaatggcttcctttggagataacaaagggcttatttgtttatgcccttcaggaacaaaagaaattatttaaaatgttgaattcagcaatattaatttttgttctcaaaaccctcaattatcacttaatcacattaatcagttagcatagtacagcattgaagaagtgaaaaatgtctttgctgttgcaaatattttaagtaattccaaggcatcgtatacatcaacacctgaaatccattatttatggtccagaagggaaatttttctttaattcgctttgtgtatagtttttgggggttattgtattgattgaaaaaattcaatacgcaggttaaatgagactcttaacattcttactctttactcttcagatagttacatcacttaatttcatgaaatacaactgaggctagattagcacatttaagtaagacccaagtccctaaaccttacggaagttaaaagtggaggtgagcactgagattagcacttctaacctgatttataaaatatggagcacccatcagcagctgggtgtccacctgcttgtgcctttcctgctcccacccagccacagtaccctctgctctttggggcaaggacttgaaggggtggagccctggagatcagggtgatgaagacagaattaccagggagctttccaggaaggctgtgaatcttaggcctgcattttccctatatccctttttagaggatctgaatttgattttgttaaggatctagatgaattccttacgcagggcattggaatcttatccacatatgtgggttggtatttcatcattaacagttatcaggaaaaccactgtgtgcctgccactgagagtctctgcagagagtcctttgctccttcttgagacattgatgagagtagagaatgtgacttgttgaatagatggaattactttcaattgtatgagtttatataaaagaattcctgtggttgataagaaccttttgagggtagacacagtcataccagaatatttgctgttattgactgaaaattagtcagattaagcatagggagaggaagagtgtgacacacaagagggaagggaaggaaggtgtgagaaattttctctgaatctcaagagatgaccataaatccttactgtccctaaagcagcatgctttgaaagcagggctggaggagatgaccccaaaggttaattaatgtctcactgagattttatgacatgccctcgcttccttccatagattctaccccttggcaaaggcatgacctcaggatgtgatgtcaagtcatccacatgatttcatttttttcatatttacagatagtgattattttttaagatttgggtaaatgtatattatataaagagagtagttttgtgatgttgtttctttaatgttctttttgtactttccaagatactatacctgaaaagtggagtatcttgttattcttacagcaaaattatgagagctatatttagttctttaattaaaagaattaataatacatttctttttccttcttaccaggctatctttgaagtcatatcctctgaacattcatatttactcagcttggagatcttgatacgaatgtttaaaaattctaaagaactgagtgatacaatgactaaaaccgagaggcaccatcttttctccaatattacagatgtctgtgaggcaagcaaaaagtaagtgcactgcagtctgcctttggtcgtgccaagaagttgcgtactaataaacactttgttatctctaaaggaaggcatttctggttatcaagtctcattcagttggcttttgtcttgattccttgaaatacattttgagatatgtttcaagtttggtgaatagacagatgctcagtgtgtaatgagttgtcacagcagacggctgtcctaagttatgttattcctctttccccactttgcttgctctttacttctgattacatcaaggaaagtgtcttcgtttggtgctagtctgtgatattcatccatttcagtaaagaaagagtaagccttaggcttaggtcttctgcaggcaatatctggctacgatttaataatatatattttcattatatttaaggatttttgctttactttttgtcatgaagagtagataaaatcatataataaacttttatacattcaaaacttatatttagcaattgttaaaattttccatatttacttatctattatttttgcttaatttttttccaagtatatacattggatgttttacttataaatgctccagtattcagctcttaagaataaggttattttcttacataactacactgttgtggttatacttatgatgatgcttttatgattttattccatttaagttttgtacgtgtaagtagtagagtcacatgttgcaaaattccaaaaatatgaaagatcctacagtaaaatgccattcatatactgttccctggccacctgaaacacaaccagagtcaacatttgtttcttgtgtatctttttagtaatactttatgattatgtaagaaaatacatgtatatatatatttttcttgtttttacttaaatgttaccatactataaacactgttctgctccttacttttttttacctctatcctggagattatagcatgtctgcacattaaaactttccttattcatttttatgttttttccttgcaattatttgttgaagaaatccggtcatttgttctgtagaatttcccatgaggcacataatttatgggtggtgatcaataccagatccattaattcattaaggattgtaaaacagtgttactctaatttatcgttctttattcatttattagctgaaatatttctataaagggaaaggtacatccatctattcatatattcagtggtaaagttcacgttattctatttattagtgctcaaattgttccatctttgatcttaacaatttttgattattttcttgctatatgacattttaagatgttaaaggatcatgttttacaattcctgctccaggcctggaatcaaccatttccccaaagagctctggtgtcttttgaaatgaggtggtatttaaaacctcagtgagtaccagcgtgctcattgctaagtggttttaggctgtttcagtagatacccagaaaaaaaatccaaatttttctctataaaactagatatattaaaagcccatagacactccaaatttatcaaagtatatatattaaataggtacttttttatgtatcaattatacctcaataaagcttaaaacataaagaagaaagtctagtttctattcttgtcccctctatcctattctcttcccatatagatactcttaaataagttgtttatctttgttttttaaaataagcatatgcatatgcttatgtatatgtattcccctcactttcttagataaatgaaagcatattctacttatttttctcagcctctttattcatgtaacaacatatattagaggttactccatagtagtttatggagatgttttactcctttctccagctacaataattatcatcgagtaactgtgtagtagtttattcatccagccgcctatctgtatgagcattaggattattttcagtctcactgttacagatagtttttctttgtgcttacaccctgctatatattagccattctatctttgagattttctagaattaggattgctagatcaaagggtaaatgcgtatactattttgtaagatactgccaaattcttcttcaaagaaattgtaccattttgcagtaccaccaagaatagatgaatgcttgcttccccagagtctttctagcagagtatgtcaacaaacctttagatttttgtcatctaacctttagattttgtctgataggtaaggaggattatctgagcatagttttagttagcatttctcttataagcttttccatatgaataagagccatctggaacatagtatgtgtcagtaaaatattactaaactaataatattcctctatgatgttggaacaatttaaaatttgagataagcactaacattacatcaacaaaagtcaaggaaggagaggttttctaatgctcgctgaaacacaagaatatttgctttgactagatcagcaatgttaacatgtaagattggcttagctagtgaaagagaattatctgcttaataagaaggagagggaaaacgtattagcatttttttttctgctcaaaaagttagaagctgttagaggcatcttatctgaaaaagttaatacaagtagaaatgatgaacataactgaatttatcaaataccaaaatattagaatccagggtattccttgaggcttgaaggacgtgtacgttcatttatttagttattattttagttatcttttatggaatacttataattcataccaagcattatgttgtagccttttcaatagagtatgtatgtatccttaaatagactgccctcagtgaacaaagtcttaggagaaataacaaaagtataatgtagttcatggttagtaggcatgtaaagatcatcactctaagaggccaggaaaactgaaggaaaattctaaaaggactgtaatagaaatatggttttagtttaataagctatgtatacctatataatgtacgattatttaaccaataaaatgctttaaaggaatatttaataatatggactttaatatattcagattttaaagcaggtctaaagagtgggatttcatattgttctagattttaattatttgaaaggtaatttatcaaaacataaaggataattatctttaatgatagaattatgagttattttaatttctgtctgtgtacttatctgtagtttcagcatctgcaataaacataatgtagttagaaaaggaaacacaaggaaatgagaaacaagcagtaagaaatatgagcccagaataaaacaggggaggtcactggatatggctgacaaattcataattggttaaccttgaaataagtcattttatttaaagtatagactaaaattttactttaatttcagtcatttacaaaattcatttaaggttttattaaaaattttatctctgtcatagcttatcgtaaggggctattttgaacatttttgtctattttttatttaaaaaagaaaacagatacttttcatcctccattaaaagaaaaacaaagaaatatctgtattctttacatttttattttgttttcacttcaaatgcaatgctttaatatggatatctgcctttgtaataatttgatctctgttatatttcaactaggaatgttcagcttttacatgataactctgtctatatcataataacttacattacaaaagtgtttttgatttagtttgaaacactcatttcagatacagcctttttgaaattcaaagtactcagaagatttatttgcaaaggctatttcatgatgtaaggcctgcttgttgaacttcaagagtgacacccaagtgttggtaactacttaatgtattactcatgaaagagtttgcagtcccaagaaaatgcgaaataaaatcttgagtaaaataaatgatcagtgtctgaattagatattacagagtaagcatggtattgttaagtatgtcataaccagggctatcttcattgttttacttttacctaatgaaaaattatagctataggtgatgacatattcaatataggttgcggtcagaacatcctggacatccaaattaacagtgtgttgtctagtcccctgtattgtggcttaggttgttgactgccaataaataacactaagatttatgtaagttgacactatttgaaaacagacaagcagggacaacgatcattctgactgtgtgtgtgtgtacgtatgtatcagtagtatgtctctgcaaaattcttttcttcttttaaaacatttctcatttcagttaacacttagggcctcctattctgcaaggctcctaagttccaaagcatttcagctggtggcatctccccaggggccgttggttcttgggacccatggtagttggcgaacacctccaatgtatttgcagaggcgttttagggcactttccttgaaatggaaaggcttgggtttggctggaggttatgggtttaaaggcccttggtgaaaatcaaaggagagcatgagagcagatgttcgtgaaggccattatgtgccctgctgaggcattttcaccatttcctaaagcctatgtggaaacatttatcaattaagtaggggactgattttgtggcattgtagagaacagtatggtgtttgtcttagcagagaggtgaaaatgttaaaagatttgaggcaattgaagtaacacagctagctagggtggaaactgacaggggcctccaagggatattgagagatatttagaatatggactcttgaggacttgctgaaaaggcggggtcctcctaggtttgcctcccaggtttctacctggttgactatcattggaaattgtattaaccaggatataagagaaacagattggggcttagggagggagacaaggaattcagtttggggcattttgcatttgagtgcctggaacatgagagtaaggtatttagttaaaaagagaaaagcaggttagaactacagaaaaatcttcagtagggatgtcaatttgagtcacagaggtggttcttgtcattttaagtttaaatgagataactacaacttgtagcagtggtttgtaagcagtggtggtggtatttaccccctaaggatacttggaaatgcatttttggttgccccagtagacttggggggctctattgacattagtaggtgggggccagggtgccaggcatcctacacttagtaggacagtcccagataagcctgaattgtcccacccaaatgccactgaagccctttttgagatgcatggagtaaaaagaagacgaatgtcagaattttgacaaagaaacatttaaggagcctgtgggttggaacagaaatgagttaaataggataagaggaattgcacagtgtgcatggatcttaagtcctttggctgtaaagggtttgcctctcttattaacaccttcctgttactctgtctcttagtgccatggcctaacaattgtttgttttctaaccctccttaaaaggagtatttggggagttagaatcctactgattgtttttaccctgcctaagaagggtgacacactttccttttgcatggaatgattagagctaaattctttaaatttaggtagtacctagatgactttgggtcagtgtcagggaaaaaggctttgacttccaactctacttccttcctgtttaactgtaccaacttcttccctctgactcaaattcatgagcttttcctggtttcatgatctccttgtcttttaaggacctcggctatcttaaaagcctgatcatctcatgaaaaatggagtatttgatatcatctttcaattagaaatgaataggcttaattcataactaaacatcacacatagtatatactttgcatattttcatatttcctttgatttttttttggttcttcccctacaaaatctacaaaaatctatggttacttaggataatttatagataatccctgtgttaatataaaaagacctataaatgtgattaacttacaatgatttgcaacagaatatgatctaacaccaattgtttttaaatttaagatacatccctattaaaagactgatactattaggaaagaaaattgtcttttgtagaagactgaatgttaacccttctcccatatttagaaactctaaggtctaaataaggtcttttgtgttaaaaagttttctgcaaaatgaaaattagatgagtctttgctttgatgtttcataaaaagatgggtttttactctcaattctgagttttcattctaaatacctaggttatgttaacagtctttcatttaatttttttcaataacagagtgtgctgttattagtaccctataaaaatatgctactgaagacctttgcaaggtacttgtttctctttttccaattacaaagttaaaacattggtattctttggaaagccatttaaaactaaaactatgcttgtcttcaatttctgcagagtaaagtaaaaatatccatcaatgtgcttttgtgtcctgaggaactgaatttgttcccaacatataatgagcagtgaatgccaaattctctggtttctgctttgtgtagcagagtaaattacaataatagtaaacatacaaaatagtacttaccccgcacttgcttctccagaagttttttccctaattttaatcaaactctattaaaattgaaatgtcatatgacattaaaaactaccttacatgcacttgctttaatattattttatgaaatgagttcatattaccaaaaaatgacaatttatgtaaataatagtatagcatatctgcattatgaaatacgtttctatttggtaattaaaattctaaactttaatgcataagcaaataacagtaaaccttcaaaagtcttttatagtatgaatattaaaattttaactttcctgactaattcttaaagctaaattttaaaggaaaaacacattaaatttaactaggccagagaatatggaacattttaagttgtagaacctgtttaatttttgccctgaagtaatggctgttgctatttttgttagcaaatgttattttcttactccatatatactcaagataaacttaccccagagtctttggtaaacaaagccattaccttattttcctgaatataacagagaaactttattctttctaaaatcaatttcttcaactgacagttgaaagacagtgacattcagaagccactctttatgtcactttttgactgtttctctatcctgagattaatgacaaagaagtttatttgaaattcacccgaagtattttcacaatacttcaaagtaagtctacgtgagtattctagtccatgttgttcagctcttatcaacaaccagtgtctggagtaatagtaaaagaaataggtagttgtttaggtattatttcaataaagaaagaaaaactagtgatgttttaatagatgcagtcctttggataagacctcaggaaagcagtgtgggatctgaagtctttgtacaattgaacaggaggccagttaaagatgactgattagagacatgcactgtattcattctcttctaaaaatcccagtaaaaatgatgggaaggtcaatacacaaggaaaaagaaaataagaatgagacaacagctacaatattttggaacctgaaaaacctgagatggttgtccagtaatgcaggaaagtttaaatctagactggtagtgaggaaaaccaaggatcaaccagattgaaatcccagaacctctgaaaggtggtgcattgattgattgattgattggttcttccttcacaaatctatggttacttggagtaatttatagataattgctgtgttaatagaaaaagacctataagtatgattaacttaattaatttggtctaggactaggttaaaggtaattcctaggtgcaggaattgatgatgaagttgggtaaaggtgtgactaaaactgcaagtttcatgcaaatctgtttgagaagtagtcagatcctagatcccctctttggctctacccagcaagatgatgaccctctttaccccagcagcagggcagcattggtgaatactggaccaggagacccaggaccacataagaaggggactgttgtacaggaaacgaaggtatagtggcagttggcacccacagccttctgcgctactctccttttggaatgctggtagccaggtttgtgtgtgtgtgtgtgtgtgtgtgtgtgtgtgtgtgtgtgtgtgtacactttgtcccttttctgtcaaatagtgattggcatagtataggttaagtaacattttatcatctttgttaatggatttatgttcaaatacattattattaacatcattattaggttttgcaggaaacaataagttgagtattacagcagaaatataaaaagcctcaagaaatatccattttagtaacatgttaggcaagtacttgttgactttaaatcttaagtttctttctcatttaataaggatgatagtatacttaaccttataagattgttttgaggattaaatgatatacataaaatgcttagcataacactagacaagttctttagtagcaattattttgttgatgttattactaaatgatttttatcatctatgtctggtattctgaaatgtctctggattttgtatttgttgacttttgtaaatatatgcctctgccagcattggtctaggactaaattaaagaataggtcttgttttatgcagcatctagtgcaatggtttgcatgagtttatttttaaaggtagttgtggcacaatattacattttagcaatcatctttattttgacattgagtgaatcaaagtaaatagattcttccataatcataaagaattaattgtgacctagattaggactaaaacctgagctattttttccaaccagcctggtgttttctttgtgagtggtagattccttgaatcagtgcttcagagcaggccctggcatgcttcagctgccaattagaccattctcctggtcactttttgcaggcatttggacccattatgttctttttgcattgcctttacaaattctaagtctgtggattctgagttgtcacatggagatttaaacttggataatgagcctggttgggacagactaaagtgttacctacttagtcattagctgttatcaatcttaaactagggtagaattttgtggaaaaagaaacaatgactggggtttggttgcagtgtttcatctgcattgcatttatagctgtggattttgaaccattacatggatttttgactctgccagttgtgagtaaaacaagcaggaccacacagtttttctggctgatggaaaagattttaatttaaactttgtattctagccaagttaaagctagcacttgatttaagtggaagggagatggttgatgaattaagtttcaaaagcagactttttaaagccttctaattgcttatcataggatgttgcctctaattgctgtgcattaattattagcatctgggcatcaattttgtgtttctccaaaaacttttcttatttcatctgatttaatccttaatagcatgctgtgaagtatgccaaatccttgagtaatgttgttttgctataatgttgatgaggggaaaaatggattcccagccagggccattgcatgtgtggagtttgcatgttctcccggtgtctgcgtgggttttctccaggtagtcaggtttccttccacctcccaaagatgtgcacattaggtgaattggcgtgtctgtggccccagtctgaatgaatgtgggtgtgtgagagtgcactgtgatggaagggtgtcctgtccagggttgacacttacctcgccccctgagctgccgagataggctctggccaggtgtgaccctgaactggaataagatgcttgggaaaggaatgaatgaatgaatgcaaatgattatgaaatataaatttgtattatatatgataatcatacaaatgcactataataaacgatgcttttagaaagcgctcattgagccgccgtatttgtgattgtttttgaaccgcatgatggtaggaggtgctccttccaattttcactttgcaaacatttataccttgatttaacccactgctgtcactcactgattcaccaaaaattgggtaaataattgtcttacttgtttttacttctctttcttaaatgtatatctagcttacatttatttcagtgtttaatattagaagtgttttgagtgtttatttagaagtttggtgattttctttttgaccagaaatatcctgtaggaacttaacttttgtttatatcaatgagcctttggtaaaattagtttagttatacatcatttcacttagagtcacagcccccaaaacctatcaacaacattgtgtggacttactgtactaccatttcccttttgtgggtaaggagactgaggcccaaattagttacgtggatttgtttaaagtcattcacctaactggaattgtacctagtgagttttttgattcttcataatgtattggcatagactgtttgttcaaaaatacatatatattgtaagtgcagttaagggttcagtctacagaactaaattttaatttaaattttaatctgccagggattacacatctggaaaattatttgaacttgctcctgttggtgtacatcacccatggagctagtcagacggagtgatgagatttttatctcatatttgaatgtctttgacctcttagaatatggagacttaaaagcaaagagcatcttgttttctgtggcacagctctgtggcacatcataaaggtcattgtcttattttctcatggacattgttcccgaagtgaagaatattgtccatatctttagcataagcagtctgtgaatgtgtcccaatggtttggcattgcagtattctctagaaataacctaattgattataaaagtatcccataatctgaagtgtgtggagtttgtatttattaacttttgcatgtatgctgtctatgtactttcctcagattaaaaaaatacccaaataacatacactaccctccttaaactactttacagtgatttgaggaagaaaagaaaatgtatgtttggaaagtgccaacttaattcaggttgtaattttctgctttttggtctaaaaaatctgttttcaaaataaacttttgtagaaaatgattttgcaagtctttttttaggacttaaagaatttcttatatcttaggtgctgatataaatactgagcaacctcacagcaaaatattttaattttttagagtatcaactttatgtaaaaaagctgtgaaaatatgatttttaaaaaaaattttgaaatcacctatatgctaagaagaaggtgaagactgttttagtattaattcagtatattattaccattctctaattgttttaaggatgtggattaaatcatgtaagccttgttttttaattttaaaaatatatttataaaaaatatcctgaggaacatatgatgaatggtatttgttaaagaacttaatagatactttatacagtgtttcctttggatttcaaaaaggtttcgggaaatgacttggactttgaaaaaaattttggtggaaaggttccatagaaatgtcaagattggctaagattgaccttgtcacttgtgggggattcaaacaaaggtccctttgtaacaagaaaaactgtctctgtattgggagttcattggaatttcttttctagcagagaagagtaatacgaatgaccagaacagggcacaataggaatgtttgtgttcatctgctgaagttgtcctgtgatgtagcttctacttcttattctcttgagtcttgtatatatttgatacacactacttagttataaatatttaggtgtacatttgtgaatgtttttagatagctctgaaaaaatctgctgtgaataagatgctttccaagaaatcctcagcaagcgttcttacaagttgagattttacttgaaggcattcagttgaaaagaaagctggagtgattaagttatgaaattattctcttggatttatctaagtggcattaaggatttttaggaagactggtttaaaaaatgtatgtcacaggtatagatttaattattttatctttgatttttggaggatctcatatggtcgtttgagaatctgtgtttttcaggttttaaaaatattaaatatgggaggagtttggtttacctcacttatgcttatgccattcctaggggtcactgtatgcctcctgttttgaaccttgacttattttttaatcctttttcttttttcagtcttcctggccaatacccagtttactttcacaaagctgcttttgtgattgtaatataattttatttgtccagaatattattttaccactgttttaataaatttagagatcaggatatcattttattaatatttcagagagagagacactaagtgattttctgttacttatggagtaccttttccaacttagaatggggaaaacagtataattatttagaactaagatacgttttctctgcatgctgttgaataaagcatatttttccggactctttgaagaccccaatatttggaaactcaggtgttcaaactggagaaacttgcctgcctttatctattttattccagactttcctggcatgaactaattaccaactttgaatactagtttttattgatcacatttctttttcctgagacctgcataaggaatgttaatctcatccttagacagatcactttgtccctctgcatgtcagctgctaaatgaactttccatcagcatggaactaatgtttatcggaataactaaataatctaaaaccagggccctaaggtttcacttgctgtgagtctgttatcaccagctcacactggagaattctttttcgtaccattgctttttctaaacaataatttctatccatggtatgtggatttggaagttagtcttttagagacttagctttgcagacattaccttaggctcagaagtctgacttaaatcagggtctggatgtagtgaaagcctcctggggatggtttgaaaaaatctagctgtacatgttgctacagtatttatttatatctatttttattttttatttttgagacagagtctcgctctattgcccaggctggagtacagtggcgtgatcttggctcactgcagcctctgccttccatgttcaagcgattctcctgcctcagtaggagaatctactactcctactgggactacaggcacatgccaccatgcctggctaattttttgtatttttagtagagacggggtttcaccatgttagccagaatggtctcgatctcctgacctcatgatccgcccgccttggcctcccaaaatgctgggattacaggcatgagccactgtgcccagccagtatttatttttaatgtgggaaagagttgctagaggtagcaaacatatgaataacctgaggataggaaggtaacgtatgaaaatggttttctgagagggaacgttcatgctctgaaaaacagatggagcagaaagctttataaagaagctgccttttcctttcctctggaattgttgaacaacatctttgagggaaacatgacataatattttgataattttagtgagtgtatgtatttgagcaaggctggtattgagttgtaggctgtttggcatggtaaaagtttgaattctccagagctgcttttaatccatttgcaatgcctgtgttttttcttgtgagcagtgtgtatcctcatcaggggctgcctcaatgcttatccatctggaggaggctactcagctttaattaaagaaacagtggttgagagggtccgcctacaaccactgaaagtaataaatgtacatggtgtaaaattcaaatactgccaaaaagtatgcactgagaaacaagtccccctgtatgactggtttggggcgtagcttccagagatactctctgcacatacaagtacagtttttttaatacgatgattgcctaccatacacactgtatgcaccagtacctatttacttttagtccatcaaacagccagagtcttaagaataacaccgagtataattttttaaaatctttgtatgctccccaaataagcccaagttttctttatgtagtttcttctacttaggaactttaaatgaataggtccacatgagttatggactttattgtgaaaatagtcattgctctgaatatgggattcttattgagcattacatctgattccttgataaaatattttaggatgagagcacctactgtgtaccaggcactgtgctaggcattggaaatgtaacagtaagcttgacaagcgaggtccttgtccttgagacctggtgggataaacacacacagaacagatgcctgagaaacagagtattccttaaagtaggaccttggcctggatgggggaactgaggaagtgacctttccttaccgctcaatcttctttcctttcctcctttgtcaaattaatctcattagattaatagtctttatcagatgttttaattcaaatataattcagtctagtctctagatatagaaatgccatactagtcacatgttaattgttttatatttgcaagtaacttcattaaatgggcacctgggatgtatggaacagcttaataaaccaacatttctgcactgtagttaaattgatcctttagctacaatatgaaaatttttatttaaagaaaaacagagcctggattatgtcacagtgcaaaatacgaaacatatttctagtttgaatgcataattcttggatttccctgcctctgaatgatttctaaatctggaagatttggatcctgtcaatttatttagcttacggaaaagtcatctgatctatacttcaggttcattagaaactccttttacatcatgtccttaggtaacagttttatgaaaatttctgtaactcatgattgcagttttgttcttacaatctccaggtattttatttaaaaataagaaataaaattgtacaacctatcaactgtgtgatcattagcttgattaagatatagctcacctgctgttaatttatttatcttagtaagccatgtggtgtgcatgagcttattttactctttcactttgttctgtgattaataaactacttccatggaattttgggattgagtttagaggccatatatcccattctgtaatttacagatagtatcccagatctcacagctaattagaattagagctaaggctagaactcaggacttctgacccattttataggaaagggtggttcactgtgtttttagtatgttatatatttacgtggcttaaaagtccaaagaggctgtacacgttggctcacgtctataatcccagcactttggaaggtgggggtgggtggattgcttgagctttggagtttgagaccagcctgggcaacatggcgaaaccctgtctctacaaagtatacaaaaattagccaggcgtggtggcacatgcctgtagtcccacctacttgggaggctgaggtgggaggatcacttgagcccaggaggcagaagttgcagtgaaccgagatcactccactgcactccatcctaggtgacagagactctctgtgtcttaaaaaacaaaaacaaaaacagaaaaacccaaaaatggccaaagattatcaaatagcatctgtttatatactgagaagcccagacgcgttgactctgttacccttcaccttctgttgatgtattatattagttgtcttgtttatcctcctagcatttccttatgtagatacaggcaaataaaaatggtttcttattgtcccacttttctttaaaaacagcgtgctgactgtatatgcgattctgccacttttttttttctctcaagaaagtttaaatttaagctcctgaaaaaagtcagtgtgcctacagataccactttattttgtccacttagatcagaactaggttgctatctttagcttaattctagcatatgagaaatgtgagatagttctatgaagactgtagtgaaaaaaaaaagattagaaatgtaaagtacaaggtgggaaattattgaaattgctattatttaacccaaagaagaaaaagtttgggcattattactttatagatgaggaaaggggaggctcagatggaggtaaagtaccttacccacagtcacccaagcactcggagtctcaatgggggcctgcactcagattagcctgccagtattgaagtctcaattcctcatctgctacaggagcctgatacatttgtgagtgacaagtatagtcgatactcattatttgcggattccatatttgcaaatttacctatttgctaaaatttatttttaacccaaaatcaatacttgtggttttatggtcattcacagtcatgcaagcagagcagcaaaaaaaaaaatgtgtttcctgacacgcgtgtttccagctgaggttgaacaaggcagtctctgccttttcttatactataaacaagtgtccttctgatggtcgattaagtgccacagttttttgtatttttgtgctttttgttgatcattttgctgtttaaagtgatcccaaagcatcgtgcaaaactgtttagtgtttacaagaaggctgtggtgtcttacagagaaaatgtgtgtttaaggtaagctcatagtgctattgtaagttagagttctagtgctgtactgctgttggcgtgagttcaatattaacaaatcaacaatatgtcatagttttgtgactgcagtgatagtgccattggcgtgagttcattgttagtgaatcaacactgtatacattaaataaggtgtttttaaactgaaacactcagaaaacaaagttatgtattgatcagttgatgaaattattgtgaccagaggcttgtaggaacccacactgtgtttccactagttcagtattccagtaattcaatgttcacagcaacttcatggaacataacttctgggaataatgagaacagatagtaaatgcaaagccagaagtagtcagcttcctgccagttctagctatgttttatttcttttcattctaccctaaggtacaggaggaataatttagtttagctataagaaaaaaaaaaacaactagctgggcgtggtggctcatgcctgtaatctcagcactttgcgaggccaaggtgggtgaattgcttgagcccaggagttcaagaccagcctgggcgacagagtgaaaccccatctctacaaaaaatacaaaaattaacctggtgtgatggtgcattcctgtagtcccagctactcaggagctgaggtgggaggactgcctgaaaccgggagaggtctaggctgcagtgagctatgattgtgccactgcactccagcctgtgacagagtgagagcctgtctcaaaagaaaaagaaaagaaaagaaaaaacaaacaaacccatgacttcctattgagataactcaggactatgaaatacaaggttaaattgcttattataaaacatcataacaattgagacattttgaaagttgctgacagtggtgttactgatagtatagcatggtgactaagagtgtcatcagtccacctggattccattcccttctgtaccatttgtcctgtgtgaccttgagcaaaatacctaacatctttgtgcttcagcagtcatgtgtgtaaaatggagatgataccactaactacttctttgggttattatggaagttaaacgaatcagtcagtcagtctatggaaagccattagactagctcctggtatacagttagtgctttttaaatgattagagtaattgcatctcctcatttgcccaggataattttagttgtgattagctgcccctttcattctcaaaagatatcccaatttggaggataaattgtatggtcaccctctaatgtaaggatgattcataattatcagctaatactgaattattggctatttctgtaaatacctgttgggacgattgatttctttttcttcttcaagaagtaagttgaaaaactccctcctcctggttttggagggctgcttggagaagagaaatgggagaggaacaggttgagtattcacatgtggcataattgtgtgttgtttccttattttgtgtttttgctcagtgaaagaaagtggtctagaatctggttctggcatagagagattatatctttcccactggacagctctttctctagtagccaggaaagacttgtgggaaatatagtttatattttagaacagttttaggttataggaaaattgagcagcaagtacagagttcttatataccccctgatgctgctcccaccccacacagcttctaccctactatcaacatcccacatcagaatggtacatttgttgtaattgatgaagctacattgacacatcactatcacctaaagtacataatttacattacggtttgctcttgatgttctacactctatgggatggataaatgtataatggcatgtgttcatcattattagtatcatacagaatagtttcactgctctaaatatcctctgtgttccacctgttcatccctccctctccttaagcccctgacaaccagtgatcttttttattatttctatagttttgccttttctaatgctgttgagttttgcagtagttatttgtcccttgtcccacatagtcttttgagatggctatgagacataagaggcactattgaacaggcaggcaagcaggtttggatttgggccatttgaaggctggagacatatttgggagtggttagcatgtagatggaatttcaagcaatggtgctgaaagagattattggagaaagactagagatagagaagttaaagctgagcaccaagccctgagaccttccaacactaagatattgagaagttgggggtgggggaggactggccaagaatgctgagaaggagatgccagtgggagtagaaggaaaccccggattatgtgtgctctagaaggcaagcaggatgtaattttttttcttcttcttccatatttataaaggaagaatcaacataccttaagaatggtttcaatctcttgtggcattcttttgaggatcagtattttgtgccatgtcaatgagatacagagttgtagacaggaaaggctctgcgcaagaagcaggtgcgaccggctcattcagggtgtcatcagtgtaaaaaggatacacttttggaactctggagtcatggcatggcccctgtgccttccagaagattattggagtaatcagcatcacttccaaagaagtgaaaagtgaaggggaggtagagcacttcagtaaatgcagtagatgctgttgaagtttcacagtagctgtggaatgtggatgagtcttctgctttcatttgttttcagaatgtggaaagcacaggttgtgtttaaagacaggccagcctaggcagagcctgccatggccaggcaccatggtgcacacctgtaatcccagcactttgggaggacaaggcaggtggattgcttgaggccagtagttcaagaccagcctggccaatatggcaaaccccatctttactaaaaataaaaaagttagctgggcgtggtggtgtgtgcctgtagtcccagctactctgtaggctgagacatgagaattgcttgaacccaggaggtagaggttgcagtgagccgagatcacatgagtgcactctagcctgggcaacagagcaagactctgtctcaaaagaacaaaaccaaaaacaaaagcaaaggaagagccagccatatagaacagatacattcattctaaggggaacatgttcatcctcaatatgtttcttcttataaaataaacatccaagggtttttttgggtcatttgtagtgatttgatttccaaaaataattagctttataaacataaattgcataagtaatgtccccattttataactctaagttgtcattatggaagggataggctgtgctgtaaaattgttgactttgaagtaaaatgcttattaaggatcatgagtaccaattttcacatatgtcgtagcctatgttgtagccaaagtcgacatttgagaaatggttaaggttttacagcaacgtttactttattatcagaatatagtatattcagtcaagtactattaataccatttcatatcgtaattatgccatttcaagggaatttattagaaaggtttacatggattcttctttgcattaccctccactcctgccacccccccaccccacctgcagccatccacgtaaaaattcattatgttactgccttggatttttgccaatatagaataaataattggatttagcttctgttacagttttgtctgtctcagattatgaatgtaagttggtaagattttctgccaattttaattcaccaagattgcattaaaattatgaagagacaattgaatgtaatttttctttcctttactcctgtaattgaactgtaaaagttctcaattaattacagttcttacagagtatcaattattgcaatttgcaaactccagagcctttataatgaaagataaacattttacaaccatacatttgtcaacgtttgatgctaattgcagcaattaattcgttctttaatgtttaatgttttataggttaatgaaagctggcattctcttccctctttatgttaatatgagaaacttttcaggagtagggtacagattgatacatgtataaaactatttttgcaatctattgcttgtcttagcaactaaatgaaaaccagaggttgcagaggtttgcttattcttttctctgcatatgtagagtggaggcctgcaggttcctgacaaacaagagcagaagtttaatgagtccctaaaaactcagtttgtttctaaataaaacataaatttggagagttgaaatgagtgatttcagaaacctttttggcttgggtgaaaattagcatcttctcaagtatttcttaaatgccttgtcatttgaagatgataatagtatctatgaccatttattcagcccagtgtgctgagtactgtggtaagttcttttagtactttatgttatttaatccagaattcagacaagatctgactccagagctctctctacagggagacaagttcaaatacctgccctggcagccaggccatatagcttagtaaagtaggatgggtgtgagatgggtctgagtagtgggatcaccataaactgggctgtgagtacagcgccagtcattccagccatggtggaatgtaagctcagtgttgccagatctactgatgtttcagaaaaagtgggaaatctagatgtgtgggtgcacttccttaatttttaaatgtttggagctaatttaggtttttaaaatacatgtgtagggcagtttcaacccaccagccatccatttgagagctccgaagcacactgtgttggcttgatcttttggtctgaattagcttgatacaatggctggggcttgtgcctatgcatcaggtggcactcttgaagttcctcagagagcctctctacaaattcagcaggggttggagggaagaagggaaaatatatcttaatgaattatattaataaatactaatatgtaatttgaggcattgaggaaatacaattatataactttcagtgataaagcatgctgatctttccttcattttccttcctgttacagttaattgggcaatcagttaaataatatgcctttgtcagattttttatattagagcacctaaaggatcaggtagatttcttttttatagtattaacacagaagtaaaaacaaagtagcctttctttaaaagaatgaggaaatgtatacatacatatacatactcatttttttttctgaattaaaaaatagttaagaaatttgagttggcttggcaaagaaaactgagaaaatgcttaaaattagaaaatatatagacatatactttttataaacattgcaaagaaaaatgatggagactatttttatgttcaatctctaactgtcctaggcatagtgtaagtgccctccgcatgcaagtcatgatttactgtgaatgggtctcctgtatatactgctttcagcctgtatgttttttaaaaaattgaatttaccattctgtgtcataagactagagggtaaagttcagattttgaaagtctaagaaaatgtgatggcatcccattcatcttgtattaaaggttctataaaccgtaatggttagatctttgacctctgttcctacacctgcagctagtcctaaatcaaagtgtttaagcctgacatgggctgtacctgtaactcagtgtggaagctgcatattgtaggctatttctactgttggagagggagggcgggcattgtggtaactctttttaccttttcatatgttcattaactttccaaggaaatgaaatgcttccctcttctttttctacggttaaatttcaagctagtgttaaaaaaaaaagtgcaaggaattaatgtaccaaaccctggagatgtgtaaaagaaaaacctttaaaattgtattttcaaaaatcttgagtccttttaacattcctatagataatttagtaaagataaatcatacttactttttcatgaagctaattgcctctggtttgtatcccctgagaaatactaatttacaaattagaacctacaaatgatttttgtttcaaagaccacttttgtttcagagaccactttccagggaacaattctcaataacggaaggagggtgttttagttcccccttcaaaggaaggtattggcactgtatgttttgttttgttttgttttgttttacaaagaagccagatggtatttattttgcatagctgtaataagttctaaggaaagcacttggaaatggtactaatgtttaatggaaagatgtataaacccacttgggaactgtaaagcattatgcaaggtatagtttagctatttaatataataacaggtaatcattctgtgctggctttgttattagcacaggtgccagggcattttggggctctgacattttatagaaaccagagtagctgctgacaactcaaacagtattgttaccgtggcagggcctggatcccacagtctagctatccagtggtgcctaccttctgttctgcaggtatatctttctccatcccttttaaaccggagactatcaccctgtgaaaggatcacagtgcagccttcccctgagtaaatgacaaataggcagtttctttagtatttttcacattcctgcacctggctgggagccagctctgcttttgtggcagaaagtgaggctggagagaatgtttgggagccaatctttggtagggaagtgacaaaatgcaagggtatatgtatatgggccaaagttaagataaacttttttttggtagttttcactgtaattattaagaggcaattaaaaaaaagaggtaacactagaaaatgacaaactcccagaaggtgtgattacttacaaatcagctgctctgggtcctggtgagtgacatagtcctggtgatcagtgtcagcatccttcacaagcaatgaaaggagagttcgcaatgacgctgcttcacaggatgtagatgggtccaggcatttaggctggctgagaggcataaagtggctgagatttggttgggaagaaccaagatgaggcgtgcctctgtgtgctttacgtagacggtgttgtatggttagaagccagtagttagaaattcggtttgaaaagccgggtctgatgtttcagagaaaaagggtaatgcggccagagacgtttttagaagcagattttggtagattctttttaccttttaaaaaaatacatatatatatctttttatgagatgaggttttcctacattgcccaggctagtctcgaactcctgggcttaaacaatcctcttgcctcagtctcctgaatagctaaaattataggcatacacctctgtgcctggcttggtagagtctctaaaaggggattgatgcaagaataaaagggagaagagtaaataccataaaaagcccattgcagaaggtgtgtgtttcaaagccagggtagagaaataagtaagggatgcatgtataaaacagaacaacattggtgaaatgtgactgtttatggtttacaaattactgattggcagcaggaaacatagatttaagaatatacatgctacagaaatttccctaaagaagtaacgtattttataattctaaatttactgttattaaagttagaggctgccagcagcttggttatggtcaaatgccaggtaagattttgggatatgaaacatttgacccttctgaactaagttcacatgcattggacctctccgaaagccttgtaagagggtataaaagcaaacttcccttagcttcctacaagtgaaaccattatttcctcttaccagggtaccttgcatggtgattaggcagaaggataagagttgtgatgtgttaaaggctgtgcaggactggctttagtgtggacataactgtctctaattccctggtgtgactggggtgggggacatgttggctgaattccctctcactgaccctacaaatacaaagatgcttaacattccacatctctcagccatttggatctatagagtggtttcggattgtgttccatcaggcctggaattccctgaaggcactttagggtctgccaatttgggtgtcagggaagcaaataactgggccctgggcctcctgaccctgctacaagcagaacagctctcttttattgtggaagtcttgggacttttcataagattcacttgaaaagggatgaaacacatacaaaatccactatctggggaagcaggaaaagagagcattctgtatgtgaacaaaactagctgatacaagccccggccctccatccatttctctagctgctgcacttattaaaagggctttattggccaggtacagtggctcacacctgtaacaatcccagcactttgggaggccgaggcaggcagatcacgagatgtggagttcgagaccagcctggccaacctggtgaacccctgtctctcctaagaatacaaaaattagcctggcatggtggtgggcgcctgtaatcccagctactcgggaggctgaggcaagagaatcgcttgaacccgggaggtggaggttgcagtgagctgagaccatgccactgcactccagcctggttgatagagtgagactccatcttaaaaaacaataaataaataaataaaaataaaagctttattgagatcacaattcatatgccatacaaataacccattaaaattgtataatttagtgatttttagtatagtcatagattgtgcaaccatcaccagagttttacgatttcatcacctcaaaaagaaatgccctacccattagcgctcactccgcatttccccccacacttccccagctctaggctgccaccagtctactttctgtttctatagatttgactgttctggagatttcatatgaatagaaaatataaaatgtggtctttgatgactgctttcttttacctagcataaagttttcaaggtttatccatattgtaatgtgtaagtaagtacctttcattgctgaataatatgttattgtgtgaatataccacattttatttatccattcattaattgatggatattgggttcttttttattttaaattatgctgctatgaacatttgtgttgaagtttttgtgctttcgatttttatttccctcgggtatatacttaggagtggaattgaagggtcatatggaaactatgtttaacattttgaagaactgccggcctcttcttaagtggatatgtgtagacttgcagctggcctctttaccacctttgcacctcagttcagctttttccagccctacaccctgcccttcaccctgctccctccagggttactttcctaaaataccagaaaccctagtggttctcttgttactttgaaacaaattgaaactctctaatagggcatttcgagttctacatggtctaggcccaggctatgtttataatttcatttaatagtaatttccaagttcttgcgtagatgtttcattatacaagcactagatgtttcattatacaagtcagtgattattgaacttccttttagttatggacccctttgaaaatcatccaatagccatacgtttcttgcttcctcaaaaaaaaatatgcatgtataattgtactgacaacaacaaacctggcatgcaagttcagagagtttgtgattgctctggcaccattagcaaaccatgaagttcaccaacacattggctgggcacaatctgagtgttctttgttcaaactactctctcacctctcttctcccttttctccttcctgctgattgcctaatgagaagctttcttgctttttagagtatctttcagagaatctgctggaaaggaaggtggtttggctcctttttccaccattgctgctccacagttgtgtgtgcagtcctgcagcagggccttgagggaattgaacagagagggctagcctctctgagaactagatggtgagtgccatgaagacagagacttttgttggaattgtcctgggctgtgtattttatgtgtctagaatagagcctggcacatagtaggcattcactaagtagtcactgaaagaatgggtagggaagggaattgaatctggaaccatcagctttctgggatggatgaagctatatatagtagggcccatgagttacaagggacccgtatgcagatactggatgttggttactgggaatggaacaagaggttagaagagagtttctaagacagattaagaggatgtattagttttctattgctgctataacaaattacaacaaacttagtggtttaaaacaacacaaatttattctttttcaattctgaaggtgggaagtctgaaatcaatttcactgggctaaagtcatggtgtcactaggctgtttccttctggaggctgtaggggagaatccgttttcttgcctttttcagcttctagaagtcacttttgtatcgtggcttatgaatttttctgtcttcaaagcctactgtgtaccatcttctctgatttctacttctcttctgactcttatcctcctgcctccctctcttataaggacctctgtgattactttaagcccacctggataatccaggatgattttcccatctcagtatcattaattacttctataaaatcacttttaccatgtaagataacatattcacaggacatggacatttttgagatgatggacattaataatggacatgtacatggccatcatttagcctgccacagggggctctaaaaataaacatggcgccctttgtgtttttgccaagtgtgtctgttccttgctcagggcttcttaattgtgacatgacttcttcctcacaatgattacgctaaggccaaggacagtgtttgcatgtaaagaaatgttccaccacttctcagttgctgagaactgttagttttccctggttcatttctctcccacatgtaactcactggggaggtaccaacacaaaggacttaaaaaggtctgtgctgcatcctcctctaattttgtcattggtaagtacctactaaaacagtagctatcagaatgggaatgagaactaccagagcatttttgtttagaactcttttttcccctcacatcccaaaccacttttaatttcttatcctcttattatcaatccagagataaaatttcagaagaaaaggctaaaatagaatatgagaagacatatagtctgctgaaaaggaagtctcttgagacctttaccagatcaggatgtaggtaggatattttctgattgagaagcaactgtcctatatttgtgtcgaatcaacacatttcctatcactgttagtctctggtgaaggattcatcgatgagcttcatcttcctcagcactgattttgatgtattgttaatggctgcctggagtgcaaactctgcatgtaggcagagtgccagacagttactgatgcctgccatgggttagtggcggtgcgcttgccatgcttttattctccctgatccagtatgtcaaaagaaactgacttcaaccttcagtgtcaatgtgaccaccaaaaaaattccaaataaagcagccccaaatcttacttaccggcagcagaatataaattcattttggtagagtacagaatgttctgtattaggaaagtatttccagcagcacatacttcgctgccacttatctggaatatttctttgtttagggaagatattttattatataacaacaacttagacatgtgaaatctgcctggtatgttacaagtctccagcctaagtgaatatgaccttctctggtaggatactgcagccatttagattgacagctcatttaagtgagggagacgtccaagaatgatttcagtttgctttaggcagatggatattaatgaagaaaaagtaccttgaaaggatgccattctgaggagggcaccggacagcggcattgattataaccagagctcctttttttctgtgtttccagagctagagtgctgagtgctgcgctgcttagtctctctgtcatccttctgaattggataggggaggggctggtctggcaggtttttcagaaaatgcagctggcattgaagaaactcagattggactgggtctctctttagtaatcctaattgaagaattgtaaagacttgtgctgggagtttgtgtcttcattggtggcccttcctgtacctagcacagttctgggaagccaacttgtggtcaattaaatatatgttgacttatcagtgataaaagcaaggtagagactgacccaatttgtgggcattactttcttagtaaaataataatagaacgaaattcttttacatgtttcacctttatcattttttatttaaaacaataaatttcatttgtttatgtattcactgatcaaatatttgactgtctcctatattccaggtactatggccaagtctgggtgggtgggtggttgggtgtgtgtgtgtgtatatatacacacacaatatatatatacacacacactatatatatatataaatatagtagtgaacacaacagacatggccccatcctctaaaccttgctaagagagacaaaagtaaacaaaaattataaaagaattaattgccatcatagtaggtacactgaagaaaatatatggggatttatgaagtcatagaacaagagaacttagcctatcccagcaggttcagggaaagcttcctggaatagatgaaatttaatctgatgcatgaaggatgagtgggattcatgagggaaaaaggggagcgagaataggagggccaaaatgaataacccccagagggcttcacagggcacctgtaaaccaatatttgatcacactgtgtcaaccaggaccagagcacattgctggctgtgattttcctgattatctttcttggaggctgaacctgatatggttgctgacccttctgttgtctgcacattttgtcatggcgtggatcttactgtgaacatctgcactacgttgatttgtgtaatttatttgctgagaccattcaacattaatcttggaaaatgatctttttctttgcagttccagctgctactcttcttgctggatgtcttagttgagggttggccagtagtaacaggtgggcaagatcagctcaccgctgagagctgaggcagcaggtgttttggttcaagcacagggtctggctctggtttcaaatgaagttgtgacttaagcactctttgccttggttttcttatctataaaatgggtataatgaccatctcataaagcaggcttgctgttggttttgttttttcctcaaaaatgtagtgccacatttaagatcatcacataataaagcaaccacaaaagacctaaaaaaaatccctgcagttttaaaaaacgttagaagaaaggttactagaccataagcaagctccacatcaggctcttttttcaaacatgggttttagctgaatcatcttgaacctcctgggaggtggaccttatatgtttggtaggaccattatctgcacagctgaggagctcaccttggcagactacaatcatttaaagcactcatttgaagtatgggtgtgattttgcttgtgatggtgagttaacagccaaacagggctaacttgtgtttctggttaggagggaatgtttctaggcagcttttcctggtccacagaaggtttctctttagtggtgagattggaaatgctttacagggaaaaaaaagataaaggttgtgtaacatgattggttataaaacatgaacatcttggtaatactacaaagaggaaataagtggaagtattatccccgaaaaaaattcatagaacttaaatacgtatttccattaaaaagttgtcctcctcgtaagccaaattatttcattcaagtttcatccagggaaccagaatacttttacttttgcttcagatttgatttgattcaccggcattcttggttcccgaaatcatacctcattttttagaaatactttcttgatctttttgtagctaactcacttagtaaagtatgcaaattttccaaaataactaatagatcatttaacatagaaagctttaaattatgtcttaattatgtcaatgtaaaaataaaaggtgggtggtttggtttatattgaagtaagtagcataaacagaaatttaattagtaccttatttttaatatcgtactttggcaaacctttcacagtgataaatgaaattttccttttcattgggaaaagccaagttactgttgtttttggttatatagttgcattccttcaggctggtaacagtgtaagctaaagacaaattgtaagagctacttgcctcaagatatttatatcctagaattataacggccttatggtttcttcttttttcaattttctttctttttttttttttgagacggagtctcgctctgtcgcccaggctagagtgcagtggcgcaatctcggctcactgcaagctccacctcctgggttcacgccattctcctgccgcagcctcccgagtagctgggactacaggcgtctgccaccacccccggctaattttttgtattttaagtagagatgaggtttcactgtgttagccaggatggtctcgatctcctgaccttgtgatccacctacctcggcctcccaaagtgctgggattacaggcgtgagccaccgtgcccggcctttcaattttctttaaacaattttctttacatttgcattacaaaacagttggagttaaatgacaaatatttcacatttctatgaaaaacagctagaaatcaaatagtcttaactatatagtacctagaattccagttcctctgaattttcacagatgtgtatttttagctgtccattagacatctccaaggcaaaattaaatggagctcttcctgctgcttctccctgttcctaaatctctgtcttcattaatggtttaagaacccactttattgaccgggtggaaaccttgaccagaaatctcagcatcttccttgacttcccatctaatgcgtttcttgagtctattaattttatctccagattgttaccctatgctgggtcctcttgatttcccactaccaggctttattgtcagcttgcccagattagccacctaaccggcctgcttgccatctgttcctccctactagtaatccatccttgctctgctccagttttctcggattgagtgatttattggcttccacacctccagtggtttcttattgtctacagattaattgtaaacttcccagcatgcagtataacctttgcaatcaagctcagccctgctctgcagtcttctttctgtgcccttgttcctcctggagtggagtctgtacctcagctccactgaacttcccagtttccccaaccagacccacgttgcttccactgcccattgtgctttgctcccctgctcccgtcatgtcatccttcgcactgataatccagcttacacgtgtccttacctgtgtttaccacaagagtggtcactctgccctctggagttttctttgtaggcctctttggttttttactcaccatacttctgacaccaaatgtgtgaattttttttttataccaaccgactctctaacccttgagacaccaattgtgtgtcctacagttccggtcctacaatttaagttcctacattaaccaccctgagtttgcatcacactccacaggtttaaggtttcagcccacaatactgccctcatttaagacggcagatgcaagtattgggtccccaggttacccacacttctcttctacttggctacaaagttgtggggggatttccacaatccacccctatttcaggccctgatgatttgctaaaatggctcacagaactcaggaaggtactctacaatttctgctttattatatagggtacgactcaagaacagccaaatacaaggattgttacagggcaaggctggagggggtgcaggtactgcagaccacctagtccctctcagggcctgctactctcccagcacctcaaggtgttcatcgaccctccctaaccccatcagttaagggttattgtggaggctccattacataggcactattgattaaatcattgttccttggcaattgaactcaaactcttctcttcttatgactggagataggcaggcatggctgaaagttccagctctgcaatcatgccttggtctttctggcatgctgagagccatgctgaagctatctaagggtccccagctaccagtcatctcactggcatacaaaagacactcctgtcactggagattccaggtatttcaaggagctgtgttccaaggaccagggatgaagaccaaatacttattattaccacacctgtgttatagatcctgtattgtaattggctgcatgcctcccatcaaccgctccactgtgagtgttgggagggaaaggatcatttcttactaaattttgtttaatgagctaacctctccttggcatataattcagcttcttctgttttggttcaagtattatgctaccgtttctctacacacacttagacacacacacacacacacacacacacacacccctatacacatactattgtacagtcagtgtggttaaaattccactgataggaatataccccagagacttgaaaacagacacaagaatagatattcgtatgcagatgttcatagcagcattattccaggtagccaaaaactggaaactactcaagtctccatcagcagatgaatggataaacaattgctatctatatgacatatataatgatatatatcatatgtgtattatagatatatacacttgtatgtgtatatctatttaggtgaccctaaattgctatctatttatacactaaatctggtaaccctggccgggtgcagtggctcacacctgtaatcccaacacttcgggaagccaaggtgggtagatcagttgaggtcaggagttagagaccagcctggccgatatggtgaaaccccgtctctactaaaaaacataaaaattagccaggcatggtggcacatgcctgtaatcccagctactcaggaggctgaggcaggagaatcacttgatcccgggaggcagaagttgcagtgaggtgagataatgccagtgcactccagcctgggtgacagagtgaggccctttctcagaagaaagaaagaaagagggaaagggagggagggatttaaatatcatgtatattatcagatttaaaataatgtgattgtttttattttgagaaaaaaacatatactgttagatttatttcagacttttttttttttttttttttttttttttgagacggagtctctgtcgccaggctggagtccagtggcgtgatctcggctcactgcaacctccgcctcctgggttcaagcgattctcttgcctcagcctcctgagtagatgggactacagctgcgtgccaccacacctgtctaatttttgtatttttaggagagacggcgtttcaccatgttggccaggatggtctcgatcccttcaactcataatccacccgcttcggcctcccagagtgctgggattacacatgtgagccaccacacctcctggcctcagacttattttttaagcatttatttaggtgttttgctcatgtatttttccatacaataaaatatataagcattcactccccttcccataaagaattcttgaaaaataatgaaatatgtttagtctaaagtacctgaaggcagagcagatcaatgtttgaagccaaacacttgaagcaataacttgatttttttttttttttttttggttttgtcttgtcttgaactcctggcctcaagtgatcttcctgcctcagcctcccaaagtgctgagattataggcgtgagccacaatgctcatcctcaaggaggtgttaatatgatagatttaaacttagataaaatttttatagattttaaaaatattttttagttggtactgtgtactgttgaattttcaaaccccgtgtaataacattacatgaggctaatctgttatctgttagagtgtatgaaagaagtgttaatttttttttccctttggtttttcaggttctttatagagttggaagcaagacatcagaataatatcttcatagatgacataagtgacattgtggaaaaacacacagcatccacatttgacccatatgtgaaatactgcacaaatgaagtctaccaacaacgaacactacaaaaattgttgtaagcaatgtcgaatgctacagttttaatcatctaacctagttttaattaggctacattgactgaaattaattgatcttttgaattatatttagaaatgcctcctgataggctatttcccagaggagaaatgtttaagagcattacttttagggtgagggtgtttaagtagaaaaatctagtgtgtagagaattttctctcttacgaaattatagcttgttattgatgtccttgtttagtgtttcgttgtttttaattgttgcaggaaacagaggtggtcctcactctaaacccgcagttttctaagctttttactggcaattaagtggttttcctgaggcttagaggggattcttgagttgattgagctaaaagctaagattcagagttttctctactattctgatctccctccattcaattgacaacgataataaattgttcataaaaattgctgattattccccccacttgggtagttagagttgaagagaggagggaagttctgaaggaaagcagtagaaaaaagtaatgttcttaaagatttcagttatgcagcaaaagagttaagcattagatttcctgccacatcttttctttttgtcctttttaggttactgagagttttgatgtgatgcatatgccatctgtgtccttaaaagagtcaccaattgttcagtaatgcctatatgtattttaaagagtcctgtttatcacaagtagctgttttacagcacagttgtgcactgctgtaaacccagtttgggagcttaatggctgttatcgttctcaccccctcctgtgagttgtggcatttatgaccacggcatggagcttcggtcaacttctgtgcaatatgtgagacccctatggaggagtaggggttgaggatgactaacttatggctgcttggagaaatagtcaaagcctctaagctgatgagaagggctgatgatggccccctttttcctccacatcttcatgacattttcatatagccagggtggaaaacacacagctgctaaccccaatgagatttttagtataaagcagggtttgttcgcacaattgacattttggactggataagtctttgtggtgggctgtcctatgcattttaagatgcttaagggcatccctggcttccatctgctagatgccaaaaatctccccagacattgcagaaggtcccctgagggtaaaaccacacccatcacttcctcactccaccacgccctggtgggaaccgctgctataggaacagaggttctctgtaactgttagagaatgcaagttcatgtctgaaaacaaagccttgaattagagataaatttgggtttcattttgttttgcaggatttaaaaaatgtcactaggtactgctatacatcatgtgactcttaaaggttttatctaaattagcttaatgataacatcatcagcactttcacgtggcaattagtagtgttttcaggggatttgttgcagttgatgtgatttttttttttttttttttttgagatggagtctcactctgtcacccaggctggagtgcagtggcgcaatcttgggtcactgcaacttctgcatcccaggttcaagcgattctcctgcctcagcctcccgtgtagctgggactacaagtgcatgccaccacacccagttaattttttgtatttttagtagagactgggtttcaccgtattagccaggatggtcttgatctcctgacctcgtgatccacctgtctctgcctcccaaagtgctgggattacacgcgtaagccactgcgcccagcccgcagtttatgtgaatttaaggttagaacagtggctttcaattctagctgcatgttagaaatgccttggggcctgaaaatgagcaaatgtacactgtccagagtccatcccagactatttaatcagaacctttggaaggtgagggaggggactgggacctgagttatttaaatatacaactaatttagaggtttttgttttttttttttaactttctaaaaatcttgtcaaagctatcagtaaaaggaaacttaaaacttctcaattagagaaaatggaaatgaattgtttctgtataatttcttttcatttgctattctggcattctccccctccctgcttttagtagcagccttgaacaagattatttaattttcaaaataacattttttttaaaaaaaatgactgctattgtcactatcctgcttccttctcccttcatgggagtacaatatccatctacctcctaccctccttgccttggaaagtggcagtggaactctacagagctcctcatgggatgaagtgaggtaagagagtgagaaatggggggacaagagtgtcagatttaacattagaaaacttgggtttgaggccaggcacagtggctcacgcctgtaatcccaccactttgggaggccgaggcaggtggattacttgaggccaggagttcgagactaccctggccaacatgaaaccttttctctactaaagatacaaaaattagctgggcgtcatggcacacacctgtaatcccagttacttgtgaggctgaggcatagaattgcttgaacctgggaggcagaggctgcagtgagccgagattgtgccattgcactccagcctaggtgatagagcaagactccatctcaaaacaaacaaacaaacaaacaaacctgggtttgacttctgtctttggcagttactaagtcatatttacttggtgaggtagggacctttctgcattccattttcttactggaatccctatctggccttccttaaaagttacgtaggtggttccacatgaaagaatgtatgtcacagtatctcgctaagtttcattaaaatgttatagcagcattaatacttttcttgcattaacaggagaaaaagaggaatatttcgactgatgtgatgaaaaggttttctgtctcagaaagaggatctttgtggcctaaagcctctgaagtccagtctaactgttaatttcttatgccattgtctagggctggagaagtggcttaaaacatattatttatgatcttattaatgatatatgtttatagatgatcggatataaaagacctagtctgtatactgatttatgacccatatattcaccattatgataccacagcttcttcatttgcttaccttccacttgtataaatttctagctcctacatgttttgccttattgttaatactgttatgtgaaatccacatcttattatattcagccttgaatataaaaggcagacaagccattcgtatttgccagtgtaattatgtgcttatgatattttcatacagtttaaaatagttgatgctatatggatttatcacagtattttgtaatacatttttacttgctgcttaatttgaggaggaaatattttgaagtttctcttttctttgttttccctcagagctaccaatccatcctttaaggaagtattgtcaaggattgagtcccatgaagactgtaggaacttacccatgatctcttttctcattctccccatgcagagggtgacccgccttcccctgctgatggatgtaagacatgacggtggctttttcctctgtggatagctgtgcttctctaaatctgatttagaaaattattattattccacttaaattgatgcatatttaaaggtctaaaaatcccccaattaagtgagaaggtgttgtttgttcagaaagtctcacctgtatctgatatctctggaaattatctttcatttaggcttctatggtcattctgaagaaattggatctcatcacccacttactcagcattttttgaaataggaagagttgtggcttctttatgtcaggaggcctggattccaattctagctaagccattaggcatgtgaccttgagcaactcagtctctttgggcctaagattcctcagactgatcactgagatcccttcatctataatgttccaaggtgccctgggccttccatttcatacaggaatgagagtctcttcagcatgacaaggcatagtactgcctgtattatgcattgtgcgaagtgagtgaggaaagcccagcttccttcttgtgttaggcagcattcatgaggaaagcaagtgtttttgactttgaatcacggcaagacatgactgggaaaagtgagtagagtctgcctagtagtacgtgcagctggaaagacaggtaggctatgggcaggagagcctgccactggctgcactggagctgctggggcagcaaaagagaaaagtggggtggctcgacacaggtgccattctagcagtggatcacagagtgtctttttgatctaattagaaaatattttgttatgattttcctactttaaaattggatcataatgttgatataaggtcaactttttacatacctgattttgactaatcaaaacaaagtaaaatatatattaaaaattatgattaaggttacaaagtaaatttcacattctgtatcccattgtaaattctaaaatacattctttaaaaatgctgaaattttgaaatgtgtaaaagcatggaatcatgagcatttagctgactgctgcagttttggagacgttttgtcaggtatttcaggattcatagcaccttgtgctcctcaagtttacttcgatctactgcctttacaccttctccacccatcacctgtaattcaggaacttcccccctgtgtacatattgggaagcttgcagttttgaacatttcactttctgatttttttttgagatcagtatttatcatgtttaaagatagaatgtggctaagttatcagaatcgaatttttgcttaagaaggaaactttggtccatataaggaagtattatttcaaacatgactatttttttaagcaagaagtgaatgccttgtaaatacaacatttcttgtaatattagacttttgaattttcagggttttcttcttctgaaaatgcattttattcctctttgagaattgaaataaaagaacaaaaataaataaaatgcattttaaacatgttttccagattttatatatgctgtgatggccaagccttttatatcctctttaaatttgagaaaattacttgtatggaatgggactctaaaatctaacacattatgttatacagtgttggagattcatgccatgattgctcagtaggctttaaactttttttaagccacagacccccccttgagattctgagtaaagctatagcttttcttcccagagaatatgtgtatgcacaaaattttacataaaatatcaatatatggaatccagctaaggatgcctgctctcagggacataaaccagtatttttcatgctgctttcatacccattagtgggccataaaactgatttttgaattatgagcatatgtacgttgctcataaagtggttaaatattgtttcataaaatcctggttcatttatgtgtgcatgtgtgctggttgcagtgtaaaagtatttcttacagtgagtcatagtcaaaaaatataagaacctccacagatggtgcactctgtgtttctcacatagcagatagttaaaaatcttgatgcctgactttcagatggcttggcttggtgcttctgtacatttaagggaccagtgacttgctagtagccaactactttctacctctgcctgatgcctgttgctctaatctgtttctcatgtgtggaaatctggccatttaggcagaatgtaaatgtatttaaaatagtgtctcttcaattttacctcatttggaaattcagttaagcttgttcattaaaataaacactttcagtaattaaagtggttccctgggctttgaatgtgtgtgtatagctttaaagttatatgtaattaaatttaccgtgaattgaccctgtttgacctgattttcctatcacaaatgaaatttctcagtataaatatatcaacagaaaacctagcaggctttttttcctttgctggtttttttgggtttttttttgactgttttttctttgagatgctgtcacccaggagtgcaatggtgcgatctcggctcgctgcaacctccacctcccaggctcaagtgaccctcccaccttagcctcctgagtagctgggaccacaggtgcacaccaccatgcctggctaattttcttttagtatttttgtagagatggggtttttccatattgccctggctcctggactcaagtattctgcctgccttggctttccaaagtgctgggattacagacatgagccactgtgcctggctgttctttttattcaaaatgtatcatctataaatataattgcctctaataataatgattataatggtgataattaaagtaactcttatttattgagggcataccctatgccaggcactaataaagaactttacataaattatcattaacacttctaacaaccttgtgatgtagctggcatcaccccagttttacagatgaggaaagagaggcttataaagatagagttagtgacttgctcaagatttgataactagtaagggcagacctgggatttgaaaccagggttacccacctctgaattctatctttcttaaccattccctggatggacttggatcctgtgtttaaagattatttcctggtttttaaattgggttttaatattatcctcatactcatccgtaatatcgtgtttggcattgtttgctatgagtaaaaggatatggctggacattggttttattttacttaataaaatagatcaataaattttgttcacttttatttcattacagactatctgtcaaaaaacacctaaggactctccgaagtatgaagtctgcaaaagagccttgaaggaagttagcaaggtaactgttgggtgacagtttgtttgtaagacaggaaaccattcagttagctcagacacaaagtgtgtcttggcttgatgctgaaaactggtagagtctcacagccatttgtacagcgttctttaggtagttgcaaaacaaaatcatatttgctatactcaggtgaagttggtatttttactgtttcagacagttttgttttaagagcctacagatacctcattttcttttggtggctgaatagctgtttattcatttctcgttcagtaaatgtttattgagtatcaaccactgtgccaagaatgatgccagttcttggaaatgcagtgatgagtgaggcacgtgtagtcactgtgctcgtggaatgtgcagtggaaagaggagggcagacattaaacagagttacaatgaagggtagtgggtgatgtgatagggaagtccacagtggtgtctaagctgagacctaacacaggagtggctgtgagcccaggattgggggaagagagtgtctcaggtatgtgtagaggtccaaaggcaagaaaatattggagattttgaagaactggaatgttctccatgtggctaggatgcaatctgagagacagcactagggaaccagctgtgtggggccttgttatacatgctaggctgttgggggcctgatcgtaagatgatgtagaggctaaattcatgtattatgaagatgatagtggtgatggggccagttctgaggccagtgatagttgattaggcaagggatggcagtggcccctattgacatgatggtaaggtggtgagaagtctacctgtatactggggaggcagacttggaaactgattgggtgagcacatttcaggacagaagtcaaggaatattgtctgtggcttgggcagcgaggtagatgctcttccttcatctacgatagaaacatagggagagtggataagttccatttgggttgtgttgtcattgagattcctatagaacgtccaagttggctaaataaacaaatcagaagctcagagaggagacctgaactggagacatggatttgggaatcatcagcatatggacaatagttgaagctgggtgagtggatgaggttacttagggagactggaatgagaagggcagtgagcctgaggaatgaccatgaggaatgctagcattcatagtcttattagggaaaatgagccagtggagaaaactaaaaagaacaaaacaaagtaaaacataccagggaagaggaaggaaaaccgtaatagcttggcaaatggcagttaatttggtggttaactctgttgaatgcttctgaaagataaagtgggataatgattgaagttatccttaggtttatcatcagtaggttgtatactggggttggggggcggggatagggaacctgagctgagtgtattgagaaatgagagggaggtgtgaatatgcagccagccggcagtggtagctaactgtctaaattcagggagtagaaagagaaagagctgtagctgaaagggaagtgagagagggtcttcgttagtgtatttgtttaaagattagaaaaatgtaggtagggttagctactgatagaaatatctagctgagaggaagcaatagaaggtgtaggtgtcactgaggatactgtatgaggttggcacagaggagcaaagataatggtagcatcagaagcttcctaaatgtctccagttacatagccctatatgaattgggtatggctttgtaccactttgctatgaagtactgtttcttttagtcaatttacatcgagtcaccattttacttaccctcttccttgccaataatatttacaaaatcatgggttttattagttgtttatttttctaacatttttgtagtaaaagtaagtgtatctgtgagccacttaaattcatctcttcatcccatcagtggtctgcacacctattttgggaacagtaagtaaagaaagcctgacaagtgagaagttacctaaggtactattgccagtggtgcttcctccaagacctcaagtcctgtgctgctttcctagaggaggaactggggagggaaacgggggaaggtttttaggagaaactactagagaagttctagtcttggacataaatgggattttgacaaattttgcctggttgttactaagaaattgaaaaaaaaaaagaatttgcacagagaaaaaaataggaaggtactagtagttggttgttgaattaaacctggaatgttacttaatttttttcaagaattttacatctcagttacagtagattactacattccttcaggcatctcttgttcacttgatttcatactgatactttcaggaaaggctggcaaaaatgtaatagaccagtgagttgctttaccttgatactataagtatacaaaaagctatcatgtgaagagatgtcattccagtgacttgctttctctgaagggcatcattcctttctctctattgagcatgaatcatgaatattagaaatattccttcagtctcccagcgttacagggaaactgaaatcgttgatatagtcagctcaataattaatcttcttttttatttgtaaaggttactgatgaggttttatagaatctgggaaaacaatatgaatattttcagcagaaagagtatgcatagagagcatttatggtttagaatgaaaatgtagaactacacttgtttgctttatcagagaaattgggagttcccaatattttattttagagagttaaatttggtatgttgaggcccaaggtttagaaccagatgctgccttaatgtcttgggtaagtctctctaggtagttactcattcttggaaaaaaagagtcataccattttggtagttaaaataatgcagtttatttgcaagatgcgaataatactttgctgaaattgctcatgcatgttgccttaaagactgtgacaatttctttaatttagggccttggaaagacttactgacctaatcaaacaactcaaaaacaagaacaacatttctataaaatgaaaatgtgcttacctcctgattttctgttaacatgctggggggagaaattctagggaatctgataatttccataggaatctggtaattcagctcatctagagtgatgtgtaccatgtaaggaatagtgatcaagagatggtcttatgccaaatgaatcttccctgttatttccttctgtttactctcccatggaaagagaatgtctgctttaactctgacctcatcaaaattccgtttagagttggagatagtgttacattatgagcctttctcccagaggcaaaatagtcaagctctatttaatcttttcgtataacgtattgcttcagccatttacaaagaagtacatgtgtatgacaaatggccaacaaacgtgaaaaaatgctcagcatcactaactataaaggcaaattaaaaccacaatgaggtaccaccttactcctgcaaaaatggccataattcaaaaataaaaaatagtagatgttggcatggatgtggtgaaaaggaaacacttttaccctgatggtgggaatgtaaactagtacaaccaatatggaaaacagtatggagattccttaaagaactaaaagtagagctaccattcaatccagcaatcccactactggatatctacccaaaagaaaagaagtcattatgtgaaaaagacacttgcacactcatgtttatagcagcacaatttgcagttgcaaaaatatggaactaatccaaatgtccatcaaccaatgaatgggtaaaggaaatgtggcatatatacaccatggaatactactcagttgtaaaaagaaacaaaataatggcatttgcagcaacttggatggagttggagaccgttattctaagtgaagtaattcaggaatggaaaaccaaatatcatgtgttctgacttataagtgggagctaagctatgaggatgcaaaggcataagaatgatattatggactatggggacttggggagaagggggaaaagggcttgggataaaagagtacacattgggcacagtgtacactgctcaggtgatgggtacaccaaaatctcctaaatcaccactaaagaacttctccatggaatcaaaaactacctgctccctgaaaagtattgaaataaatttttttatagataagtagatacaaaagtatttttattattttattaattttgtgggtacatagtaggtacatatatttatgaggtacatgagatgttttgatataggcatgcagtgtgaaataagcacatcatggagaatggggtatccatcccctcaagcatttatcctttgagttaaaaataattcagttaaactctttattttaaaatgtagggggttattattgactgtagtcaccctgttgtgctatcacatagatcatatagtaggtcttgttcattttattttttttttatacccattaaccatccccacctcctccccagcccccgactacccttcctagcctctggtaagcatcattctactctctatgtccatgagttcatttttaaaaaaaatttttaaatcccaaaaatgagaacatgtaatgtttgtctttctgtgtctggcttatttcatttaacataatgacctccagttccagccgtgttgttgcaaatgactagatatcattctttttcatggctgcatgatactccattgtgtgtatgtactacattttcttcattctttcatctactgatggacatttaggttgcttccagatcttagctattgtaaacagtgctgcagccaacatagaagggcagatatctctttgatatactactttcctttattttgggtatatacccagcagtaggatttctgaatcatatggtaatcaatttttagttttttaaggaacctccaaactgttctccatagtggttgtactaatttacatgcccaccatcagtgtatgagggttctcttttctccacatccttgccagcatttgttattgcctgtcttttggatataaaccattttaactggaataagatgatatctcattgtagttttgatttgcatctcgctaatgatcagtgatgttgaccttttcatatgcctgtttgccatttgtatgtcttttgagaaatgtctattcaaatctttgcccatttttgattggattattagattttttttctatagagttatttgagctccttatgtattctggttattaatcccttgtcagatggctagcttgcacatattttccttctattctgggggttgtctcttccctttgttgactctatactttgctctgcagaagccttttaacttgttgtgatcccatttgtccatttttgctttggctgcctgtggttgtagggtatttttcaaggaatttttgcccagaccaatgtgctggagattctccccaatattttcttgtagtacttttatagtttgaggtcttagatttaagtatttactccattttgatttgatttttgtatatggtaagagataggggtatagttttattcttctgcatatggatattcagttttctcagcaccatttattaaagagactgtcttttcctcagtgtatgtttttggcacttttgtcataaatgagttcactgtaggtgtgtggatttgtttctaagttcttttttctgctccactggcctatgtgtctgtttttatgccagtaccatgctgtcttggttattatcgctctgtaatataatttgaagtcaggtaaagtcattcttccaattttgttctttttgcttaggacagctttggctattctgggtcttttgtggtttcatatacattttaggattttttatatttttgtaaagaatgtcattggtattttgttaggatttacattgaatctgtagaattctttgggtagtatggactttttaataattttaatttaataatttaatttaataattttaataatattgattcttccaatccatgaacatggaatattttttaattttttagtgtcttcttcaatttcttttatcagtgtttcatagtttttcttatagagatctttcacttctttggttaattcctaagtacttaattttacatgtggctattgtaaatgagattactttttaatttctttttcacattgttcactgttggcatatagaaatgctactgatttttgtatgttgattttgtatcctgcaactttactgaatttgtttattctgatagtttttattttgtggagatcaaatataagatttttttttattatactttaagttttagggtacatgtgcacaaggtgcaggtttgttacgtatgtgtataaatgtgccatgttggtgtgctgcacccattaactcttcatttaatattaggtttatctcctaatgctatccctgccccctcccccgaccccaccacaggccccagtgtgtgatgttccccttcatgtgtccatgtgttctcattgttcaattcccacctaagagtgagaacatgaagtgtttggttttttgtccttgagatagtttgctgagaatgatggtttccagcttcatccatgtccctacaaaggacatgaactcatcattttttatggctgcatggtattccatggtgtatatgtgccacattttcttaatccagtctatcattgttggacatttgggttggttccaagtctttgctattgtgaatagtgccacaataaacatacatgtgcatgtgtctttatagcagcatgttttataatcctttgggtatatacccagtaatgggatggctgggtcaaatgaaatttctagttctagatccctgaggaatcgccacactgacttccacaatggttgaactagtttacagtcccaccaacagtgtaaaagtgttcctatttctccacatcctctccagcacctgttgtttcctgactttttaatgattgccattctaactggtgtgagatggtatctcattgtggttttgatttgcatttctctgatagccagtgatgatgagcattttttcatgtgtcttttggctgcattaatgtcttcttttgagaagtatctgttcatatccttcacccacttgttgatggggttgtttgtttttttcttgtaaatttgtttgagttcattgtagattctggatattagccctttgtcagatgagtaggttgcgaaaattttctcccattttgtaggttgcctgttcactctgatggtagtttcttttgctgtgcagaagctctttagtttaattagatcccatttgtcaattttggcttttgttgccatttgttttggtgttttagacatgaagtccttgcccatgcctatgtcctgaatggtattgcctaggttttcttctagagtttttatggttttaggtctaacatttaagtctttaatccatcttgaattaatttttgtataaggtgtaaggaagggatccagtttcagcttcctacatatggctagccagttttcccagcaccatttattaaatagggattcctttccctatttcttgtttttgtcaagtttgtcagagatcagatagttgtagatatgcggcattatttctgagggctctgttctgttcccttggtctatatctctgttttggtaccagtaccatgctgttttggttacagccttgtagtatagtttgaagtcaggtagcgtgatgcctccagctttgttcttttggcttaggattgacttggcaatgtgggctcttttttggttccatatgaactttaaagttgttttttccagttctgtgaagaaagtcattggtagcttgatggggatggcattgaatctatgaattaccttgggcagtatggccattttcaagatattgattcttcctacccatgagcatggaatgttcttccatttgtttgtatcctcttttatttcgttgagcagtggtttgtagttctccttgaagaggtccttcatgtcccttgtaagttggattcctaggtattttattctctttgaagcaattgtgaatgggagttcactcatgatttggctctctgtctgttattggtgtataagaatgcttgtgatttttgcacattgattttgtatcctgagacttcgctgaagttgcctatcagcttaaggagattttgggttgagacgatggagttttctagatatacaatcatgtcatctgcaaacagggacaatttgacttcctgttttcctaattgaataccctttatttccttctcctgcctgattgccctggtcagaacttccagcactatattgaataggagtggggagagagggcatccctgtcttgtgccagttttcaaaaggaatgcttccagtttttgcccattcagtatgatattggctatgggtttgtcatggatagctcttattatttagagatacgtcccattgatacctaatttattgagagtttttagcatgaagggttgttgaattttgtcaaaggccttttctgcatctgttgagaaatcatatggtttttgtctttggttctgtttatatgctggattacatttattgatttgcatatattgaaccagccctgcatcccagggatgaagcccacttgatcatggtggataagctttttgatgtgctgctggattcgggttaccagtattttattgagatcttatcatctgcaaacaggataatttgatttcttccttccaaatttggatggtgtttatatcattctcttgtttgattgtactagctaggattccagtactatgtcaaataatggtggtgaaagtggatatccttgttatgttccagatattagaggaaaggttttcagttttctccattcagttgatactagctatgggtctgtcatatgattttttatcatgttggggtatgctccttctatacccagtttttgagggtttttagcacgaagggatgttgaattttatcaaatgctttttctgcacaattgaaatgatcatttttttttgttcttcatttggttgatataatgtattacactgattggtttgcctatgttgaaccatccttgcatcccagggataaatcccgcttggccatgataatctctctttttttttttttgataatctttctaatgtgttgttgaattcaatttgctagtatttttttgaggatttttgcattaatattaatcatagatattgtcctgtagttttcttttttgatgtgtctttgtctggttttggtatcacggaaatattggccttgtagaattagtttggaagtattccctcctcctctatttcctggaataggtggggtagggttggtattagttctttaaatgtttagtagaattcagcagtgaggccattgagtgtcaggctttgctttactgggagacttgttattacagcttcaatctcattacttgttactggtctattcagctttttgatttcttcttggttcaatcttggtaggtggtatgtgtatgggaattttccatttcctttagtttttctttattatttgttttctaccaattttgggtttggttgagtttcattgttagtttatttttcttttccttttttttttttttttttgagacaagagttttgctgtatctcccaggctggagtgcagtggcatgatcttggttcactgcaacctccgcctcctgagtacaggcgtatctcatgcctcagcctctcaagtagctgggactacaggtacatgcctggctaatttttgtattactttttagtagagatggggtttcaccatgttggcaggctgatctcgatctcctggtctccagtgatccccccgcctcggcctaccaaagtgctgggattataggcatgagccactgtacccagccttttcctcttttttgatttattcacttacagctataaaattccctctttatactgcttttagtgtatcacataggttttgatatgttgtgtttccattatcatttgtttcaagaaatttttacatttccttaattttttctttaacctactggtcattcaggagcatattttttaatttctatgtatttgtacacgttccaaaattcctgttactaatttttagttttatttcattgtggtcaaagaatatgcttgatattacttcagaatttttgaatattttatgacttgttttgtgacctaaatatggacagttattgagaatgatccaaagaatgtgtattttatagctcctggatgaaatgttctgtaaatatctattagatccatttggtctatagtgcagattaagtctgatgtttctttgttgattttctgtctggaagatctgcccagtgctgaatgtgggatgttgaagtctctagctattatggtactatggtgtatctctttctttacctttaataatatttgctttatatatctatgtgttccagtgttgagttcatatatatttaatattattatatcctcttgctgaattgacctcattatcattatatagtgactttctttgtgtcttcttgcagttttttctggaaatccattgtgtctgatataagtatagcaactcctgtttttttttgttttggtttccattgacgtggagtatctttctccatcctttgtttttagcctatgtgtgtctttataggtaaagtgtgtttcttgtaggcaacagatcaatcagtcttgttttttcatccattctgccagtctgtgtcttttgattagagagtttagtccatttacattcaatgttattattggtaagtatggacttactcctgcccttttgttatttgttttctggttgttttgtggtcttctattccttctttccttcctttttgtcttcctctagtgaagattatttcatctgatttagttttttgctttttattttttgtgtttaaggttatcatgaggcttgcaaatattataacccattattttaacacaataacagcactatttgcataagcaaggaaacaagcaaacagaaaactaataagaactctatgccttaactttgtacccccacttttaatcattttgttgtttctgtttatatcttattgtactgactatgccttgaaaagtggttgtagttactatttttgattggttaatcatttactcttctacttagggtaggggtagtttacacaccatagttacagtgttataatattctgtgtttttctatgtatttactattaacagtgagttttgtaccttcaggtgattacttattattgattaatatcattttctttctgattgaagtacttcctttagcatttcttgcaggaaaggtctagtgttgatgaaatgcctcagcttttgtttgtctgggaatgtctttgtttctccttcatgtttgaaggatattttcactggatatactattttatggtaaaagttttttgccttcagcacttgaaatatgtcatgcccctctctcctggcctgtaagctttccactgaaaagtctgctgccagatatattgcagctccactgtatgttatttgtctcttttctcttgctgcttttgttttatttattttttgtagagatggggtctcactgtgttatccagcttgttctcaaactcctgggctccaaaagcttcttaagctgataaacaacttgagcaaagtctcaggacacagaattaatttgcaaaaattgccaacattcctatacaccaagagtgggcgatccaagagctaaatcatgagtgaacttccattcataattaacacaaaaagaataaaatacctaagaatacagctaacaagggaagtaaggacctcttcaaggagaactacaaaccactgcccagagaaatcagagatgacataaacagatggaaaaacattccatgctcatggatgggaagaattagtatctttaaaacgctaatactgcccaaagcaatttatagattcaatgcttttattattaaactgccattacattcttcacagaattagaaaaaaagtattttaaaattcctatggaacaaacgaagagcataaatagccaaggcaattctaagcaaaaagaacaaagctggaggcatcacagtacctgacttcaaactatactacagggctacagtatccaaaacagcatggtactggtacaaaaactgacacaaagaccaatggaatagatagagaaaccaaaaataagaccatacacctacaatcatctgatcttcaacaaatctgaccaaaacagactgtggagaaaggatttcctattaaataaatggtactggaagaactggctaactgtatgcagaaaattgaaactggattcctttcttataccatatacaaaaatcaagatagattaaagacttaaatgtaaaccttaaaactataaaaccctgaaagaaaacctggtcataccattcgggacataggcatgggcaaagatttcatgatgaagatgccaaaaacagtcgtgacaaaagcaaaaattgacaaatgagatctaattaaactaaagagcttctgcacagcaaaggaaactctcaacagagtaaacagacagcctacagaatgggagaaaatttctgtaatctatgcatctgacaaaggtctaatatccagcatctataagaaacttaaatttacaagaaaaaagaataactcttttaaaaagcgggcaaaggacatgaacagacacttctcaaaagaagacatacatgcagccaacaaacatataaaaaaaaagctcaacatcactgattagagaaatgcaaatcaaaaccacaatgagataccatctcacgctagtcagaattgctattattaaaaattcaaaaaataacatgctggtgaggttgtggagaaaaaggaatgcttttacactattggtgggagtgtatattagttcaaccattattgaagacagtgtggtgattccttaaagacctacaaacagaaataccatttgacacagcaatcctattactgggtatgcaccgtaaggaataggaatcgttctgttataaagacacatgcacatgtatgttcattgcagcactacttacaataacaaagacatggaatccagttaagtgcccatcagtgatagactggataaagaaaatgtacatatacaccatggtatactatgcagccacaaaaaagaatgagatcatgtcctttgcagggacatggatggaactggaggccattatccttagcaaagtaatgcaggaacggaaaaacacataccacatgttctcacttataagtgagagctaaatgataagaatacatggacacaagggggaaacaacatacactggggcctattggaggatggtgggtgggaggagggagtgaattaggcagaatagctagtggattctgggcaatacttgggtgatgggatgaactgtgcagtaaaccaccatggcaaatgtttacctatgtaacaaacctgcatattgggcatacatacccctgaagctaaaataaacgttggaaataaaacaaaaactgggctcaagtgatcccttgccttggtccctcaaagtactgggattacaggtgtgaccgctatcctcagcctcttgctgctttcaggatcctttctttatctgtgaccttttggtgtttaattattaaatgccttgaggtagtcttttttgggttaaatttgcttggcgttctgtaaccttcttgtacttggatacttatatctttctctaggtttgggaagttctctgttatatccctttgaataaagtttctaccccgtctctttctctacctcttctttaagcccaataactcttagattttcccttttgaggctgttttctagctcctgtagccatgcttaatcattttgtattcttttttctgttatctcctctgactgtgtattttcaaatagcctgtcttcaagctcactaattttttcttctgcttgactaattctgctattaaaggactctggtgcagtattcagtatgccaattgcattttttttttttttttttttgagatggagtctcactctatcacccaggctggagtacagtggtgcaatcttggctcactgcaacctccgcctaccggattcaagcgattctcatgcctcagcctcccaggtagctgggattacaggcacataccaccatgcctggctaattttttgtatttttagtggagacggggtttcaccgtgctggccagactggtttcaaactcctggcctcaagtaatctgcccacctcggtctcccaaaatgctgggattacaggcgtgagccactgtgcctggccgccagttgcattttttggctccagaatttctgcttgatttcttttaattatttcaatctccttgttaaatttagctggtataattctgaattccttctctgtattatcttgaattccttgagtttcctcaacacagctattttgaactctttgcctgaaaagtcacatatgtgtgtttctccaggattggtccctggttccttatttagttcatttggtgaagtcatgttttcctggatggtgttgatgctagtaggtgttctttgtgtctgggcatggaagagttagatatttattgtagtcttcactgtttgggcttatttgtacccatccttcttgggaaggctttccagacatgtgaaagaacttgggtgttgtgatctaagctgtatctgctttaggggcacccaaagcccagtaacgctgtggttcttgcagattcatataggtaccaccttgatggtctaagatctggaagaattctctggattaccaggtagagactcttgttctcttcccttactgtctcccagatacatagcctctgtctttgttctgagtcacctaaagatgagggtggagtgacacaagcacccctgtggccaccctcactatgattgcgccgggtaagacctgaggccagcacagtgctggatctcgctcaaggtctgctctaaccactccctggctactgcctgtttactcaaggcccttaggctctacagtcagtcgacggcaaagccagccaggcctgtgtccttcccttcaggccagggaggtcccccaggccccaggtgggtcgagaggtaccgttcacaaacggtctaaagtctaaaacctcagaagtctacttggcattctgttgtactgaggctgagctgccactcaaaccacaagatgcagttcctcccactctaaccttccctttccaaagacgggagcctctctttttagccaccaccaccccaggccacaaggagtactgcctgactactgttgatgttccctgaagatccaagggttcttaagtcagcttgtggtgaatgctgcctggcctgggactcacccttcagggcagtgggctcccctctgacccagggcaggtccagaaatgccatccagaagtcaagtcctggagtcggggaccccaggagcctgcttggtgttctaccttcctgtgaccatgctggtacctgaatccaggaagtctcagaggctgactcagggccctcggcatagtacctgggtatccaagctgtttattcagggcccaagggctcttcagttagcaggtattgaatactgccaggactgggttcttttcttcaaggcagcaggttcccttctggcgattctcatgcctcagcctcccaagtagctgggattacaggcactcaccaccaagcctgactaattttttgtatttttagtagagacggggtttcaccatgctggccaggctggtctcaaactcctggcctcaagtgatctgcccacctcggcctcccaaaatgctgggatgacaggcgtgagccactgcacctggccgccaattgcatttggcgccagggtatgtctacaaacgttgtctggggccaggcacaatggctcacacctgtaatcccagcacattgagaggccgaggcaggcggatcacctgaggtcaggagtttgagaccagcctggccaatatggcgaaaccctatctctactaaaaatacaaaaaattagctggttgtggtggtgggcacctgtaatcccagctacttgggaggctgaggcaggagaattacttgaacccgggaggtggaggttgcagtgagccaaggtcgcaccattgcactctagcctgggcgacagattaagtctgtccccccaccaaaaaaaaaaaaatttgtctgggaggtggggcctggaacgggggcctcacaacagtgagcattaccctctcccactgtggctgagctggtatccaagatgcaagacaaagcccttcccattttttcctctcgtcttctcaagcagaaggaaggggtctcttttggagccccagctgtgcttgccagcactcacttggctgccacagctggtgtctcagtatgtcatgtgagcccccattccattgtctctgggcctagttcagcactaggacttgcctaattgtcacagtccttatggcctaaactgcctttcaagttcactgagagtcacagagtgctgtaggccttggtggtgagaactcaagttcagactgctgggataagtgattcccttctgactagggctgatttaaatgctccctccatggatgggtatcagctgagtttggtctttttttttcctgctctaacaggacagcattgagttcagtgtgtcacaattgctgtgttttctttcccacagtgcccagagatgctctctgcaacatgccgctgctgtaggagacgggggtgggtggggggtggcatcagggattcaagactgttttttctatctctttagtgcctcttttcagcaatacgaagataaaaccaggtactgagagctcacctaagttttggttcttatgaaggtgttttctctgtgtagatagttgttaaattggtgtccttgaagagggtagtggggaggatgatcagtggagtcttctattccattatcttagttggccttgggccaatatatatattttaacatgcaaacaagctgtattggtcagtgcagaaaattaagttgcagaacaatataaatagtataatgacacctagaaaataatgtatatgtgtgtgtgtatatatatatgtgtgtgtgtgtgtgtgtattttattgatatgtagaaatagtcccagaatcatgcacattacactttcaaccattgttagctgtggtaaagggaggagagtttggaagggaggaagtaataaggctaagtacagctctgtaagaacgtatttaagttgacattggtatattttaacagtgcataaagtggccaagtgcaatggctcatacctataatcccagcactttgggaggctgaggtaggcgtattgcttgagcccaggagttcgagaccagcctgggcaacatagtgagacctcttctccacagtaaatcaaaaaattagcctggcatacagctgtggttccaactacttgggagactgaggtgggaggattgcttgagcccaggttgttgatcatgccatgatagaccctgtgaccatgatcacaccactgtactacaacctgggcgacagagcaagaccctgtctcaaaaaaaaaaaaaagggaaaattggatacaataataagtgtacattgcagaatatttggaaaacttaagagacagtaaaatgcatcagtaattttatcacttaaaggtgactactgtcattctattttgtatccttctggttggctttctgttccaatattagcatatgactgtaaaggaacacttaaaagtggtctccaacctttttggcaccccagactagtttcatggaagacgatttttccacagacgggtggggggctggggggtaggtgggtggtaggtggtttcgggatgaaaccatttcacctcagatcatcaggcattagattctcataaggagcacacagcctagatccttcacatgcgcagtttacaataaggttcacactcctatgagaatccagtgctgtgactgatctgacaggaggaggaggcagagctcagccagtaatgctcacttgccctccactcacctcctgccgtgcgctggattcctaaccaatccatggccctgggggtgggggatccatggtatatatggtacctatttcatttaacattctaagttgtgctccattgaacattgtcttacctaaatgattgtgcacatctaaccatttctaaagataaattttcagaagtgggttcatgggaagaaaaacacaagaatgttttaaattcttttgtatataatgccaaagtgccttctagaaaagttcatgtccacatccaccagtagtatttcagagtgtctatcttactgcatactgccaggatcagatattctattaatctttgttaatttgatggatcaaaaagactttgtgttttaatttacatttctttacgagtaacatagagagagagagagagtgtgtgtgtgtgtgtgtgtgtgtgtatatatatatatatgcttttgttccaggcctaatatatatttattaggcctgggacaaaagctttagtgaaccaaatttaataaagctttggcataaattgaaggaaggtacagtaatatactgaggctgctttcaataaaaacagcagaacatgtatgttcaaattaatgcttgtcccttcaaaatactaattaaaatcaactccattgatgcaccattgcttaagacatcttgggaatcttgtgtttggtctgacttctgaagcacctttggtttctttaggatttccctagtggtggcatgactccagcttttgctgatgggctcagaatttggaagtttaagaaataagataacccaaacttaataatgccattttttcttttcattttatgaagggatagctattggcctggtgtgctggctcatgtctgtaatcctagcagtttgggatgctaaggtgggatgatcacttgatgtcaggagttcaagaccagcctgagcaatgtagtgagaccccatctccacaaaaaaagacgggaagataactatgaataaattgtttcttttttttaaaaatgacttacaaataggctctgaaggtggtttgtttatgcagaaacatttgcagaatatcccattgggcgttaggtgctatattgggctctgggcttacaattacagaaattttatagtctgtgctctccagtctttttggagaggtagtgcccacattgagcactgaaagacaagtagggggatataaatctagataaggagtcagtcggacagagtggggtgaaggatgttcagacagggaaacacacatgcaaaagagggaaggtgggacacagcatatgcatccaacatttggtagggccgaggccccacatgggagcagtgagaggttagggatcaaggaagtaggcaccagatcatgaagggtcttgctaagactttattctgaaagcttcagggagccttttaaggatttctagtggagttgtttcatgatcagatctgaacttagaaaaactgacatcttatttttggaggactcataagggtagggcagaagtgaggaaaagaattaagcagccagtaatccaggcagcaagaggtctgagcctgagttcagtggccagggcaggtagagagaagtgaacagcaggacagcatcattaaggagacttggattgtatgtggagggcaaagcagagggaggggtctgagtggtgagggccaagttttggaggaaagtggatgatgctgagttgagtcaccaggatagacagtgtggagccagggacaagagcgtgatgaaggagatgctcaggtttggtcatgctgaatttgaaatggctctgggaaatttaagaagaggtgccgtgtagatagttggatcagagcctaggatgtagacaaagtctgggaacatagatttgggagctatgaacacattccccaggagaagtcacaaaaatgtcccaagcagcaggagcctggtatggtgcttgggtttcaccctgatatgccctgttcctttcagggtattgcagtttcaggttgctcctgtctcacacctagatattttggctcttagctttgatcagatatagctatcaatccctgcatcagtgaactcacaggccacagctaaagatatgctgtcattgaagacaggtttgccctctaaatctaaaaaccaagtgagcaattagaaattgtttaagtgcccattaataggaaatagaataaatatattggggaaagtccatataattattatagcataaattggatcatgtcattcccccactgaaagcatgctggtgactttctttttgcacctggaatacaatccagacaccttaagaccttgcatgatctaaccgtggcctatctcttttggcttcatcccatgccaccttccttcatgccaggatcttctttgactcactcagtcacacactttctcatctcatcctttgctcatggtgtcccttctctgtgaaccatcttatcatttagtagtaactacttctccttcagctttcagcttaaatgacctctcaggagagggtcctttggatccctccccacttcccactcccctactcacctgtgtttttactttatgatctcagtctgtgatttttttttttttgccttttgtctgcccttccgtgaggttagggattgtaagtattataaccctagtacctgaaacatagtaggcactaaataaacttttttttttaatgaataatattttagaaggggaaatatttttgtcttaattcaagctgctgtaacagagtaccataaactgggtggtttaaggaacagatatttattgctcacagttgtggaggctgggcagtccaagaccaagatataggcagaaccagtgtttgctgaaggctggtttcccggtttgcagatggccaccttctccctatgtcctcacatggtggagagagagcagagagaagaagaaagctatcctgtctcttcttataagggcactaatcccattcatgaggactctactctcatgacctaataacctcccaatattatcacattgcctcgtaatattatcacactgaggttaggatttcaacatgaatatgggggagacacaaacatttagtctgtaataattgataagtgaaaaaagaaaaaagacatacaagcatagaatgatcatttccaaaaaagaaaaatttctgtacatatatgtgtgtatttatatgttcatatataacataggaaaaaaagagaaagtgtatgacccagtctgtttccaactacatctgtgcagtgggagtaggtcaggaccttttatggcctattttatttacttctatattatagtatttatttttatagtgggtatgtttatattattaaaaataaatccaattaaaatttccagtccttttaacaatcacatttgtttttatggcaaatgactctaatatgggcatttttttttccagattttccagttaatgagatacttgagatgcaaaatttgttttgatttagaccagtgaattaagattaggtactcattaaacgactgtgaaagtcctttatagataattttgctttatagataatttagtgcttctagtgaaacaaatttaactgatggccttagcttggctattgttgaagaatccttcactgttaggctcccctgcaagacttccctcttcagcacttgtttttttttttttatttttttttattttttattttttttttatgtctatacaaaatatttatttttttattatactttaagttttagggtacatgtgcacattgtgcaggttagttacatatgtatacatgtgccatgctggtacgctgcacccactaactcgtcatctagcattaggtatatctcccaatgctatccctccccccttcccccaccccacaacagtccccagagtgtgatattccccttcctgtgtccatgtgatctcattgttcaattcccacctatgagtgagaatacgcggtgtttggttttttgttcttgcgatagtttactgagaatgatgatttccaatttcatccatgtccctacaaaggacatgaactcatcattttttatggctgcatagtattccatggtgtatatgtgccacattttcttaatccagtctatcattgttggacatttgggttggttccaagtctttgctattgtgaataatgccgcaataaacatacgtgtacatgtgtctttatagcagcatgatttatagtcctttgggtatatacccagtaatgggatggctgggtcaaatgaaatttctagttctagatccctgaggagtcaccacactgacttccacaatggttgaactagtttacagtcccaccaacagtgtaaaagtgttcctatttctccacatcctctccagcacctgttgttccctgactttttaatgattgccattctaactggtgtgagatggtatctcattgtggttttgatttgcatttctctgatggccagtgatgatgagcattttttcatgtgttttttggctgcataaatgtcttcttttgagaagtgtctgttcatgtccttcacccactttctgatggggttgtttgtttttttcttgtaaatttgtttgagttcattgtagattctggatattagccctttgtcagatgagtaggttgcgaaaattttctcccattttgtaggttgcctgttcacactgatggtagtttcttttgctgtgcagaagcttcagcacttgtttactggtcacatgctttacacagcactctgcttagattttgcctttgaggttggccatctcccttcagctgctctgatttggaagaagggcgagggttgcagctttccctgagatagggtgacctttttttcccttctgtcttcacatcctaatcacaccacttctaactggatacgaatgtcttaactgtgaaaaactgtgagttctctgtcagaaatgaatctctagggcttcccaagtggtaattatttcctgtgagagttctgcttttgaaagtgaggtttctctccttgacctttaaccctcgttactcttctgtgttcccagttggttcgactatgcaatgagggcgcccggaagatggaaaggactgagatgatgtacacaattaactcccagctggaatttaaaattaaggtattctcgtaccttgttcattactgttcttgcctatgtttttctctaaatagagagagacagttgagggcaacaaagtagataggaaattgcttttcaaagaagggtcataaattgctaagagggagtagcagatgcttcaggcaattttgcttttgcttgtaccagacagagtgaccttcctccaggccctgaagccaggcattatctaagaagcacttttttttttccaggaagacaccaagcttaggggaataaataaaataatagaatagggtagttaaaataatagaattttagaattgaaaggagattccttcattattctcaaaatgttctgaaaaacagtaatattccatgagctggaccagtgttctcctaaattaaataaggacactccttttctcgtttacaaaacagatcgttaatggataatttttttcaagtttgtttttctctcataatttttttgaatatgtgctgcttgttattccttgtctgatactgctcttgagcagatgacaagatgaacaaaaaagaagaaaatgacagctaatggcaaatctaggtcatggccattcttttgttggctcatggctgagtttttaatgggaagtgagtgctcacgattgtgactctattgttttataacttgtaaatgtaattaaacaattttaaatgactggtcatatttttccctagtaaaagtgtttctatttcatgcagtcaaattatagtgatcagcatttcatggtattctgtaaagagcagattctctgccatgtcatgtagtttgaggattactgcatgcttgctttggcagcatatatactagaattgaggatcactgatatagtccagctacacccttttattttatgaatgaggaaaagaaacccagagaataattgtcagcagagtcacttggctagtggtgataaaatcaggactaaggtctagatgtcctgacttgcaggtcagtgtaaactcttctactgtaacattctgactctaatggtttagatgcagaaacacaaactgtaaaagggaagaagatgggtatttgccaaaaaccagacacacatgcacacacatgcatgcacgcacactttaaatagttttaatgttcttgtacagaattttatagcaattaaaaaacccatctttctcccaactctcagaatctcgttctctctaatttgtttctaaatattttggaaagtatatctgacaagtttgttttttgttttttaatttcctccttttgaaagatgaaaaattccctaaccatttttcttttcccttcttcactgaaagtcacttggtataagattactttaagaaactctgtctaggccgggcgaggtggctcatgcctgtaatcccagcactttgggaggccgaggtgggtgaatcacctggggtcaggagttcgagagcagcctgaccaacgtgatgaaaccctgtctctactaaaaatacaaaaattagccgggtgtagtggcaggcacctgtaatcccagctatttgggaagctgaggcaggagaattgcttgaacccaagaggcagaggttgcattgagttgatatctcaccactgcactccagcctgggcaaaagagcaagactcttaaaaaaaaaaaaagaaaaagaaaaagaaactctgtccagtacccaaaattaatttgtaattgaaaaatgctaaccccaaggatcattaaaagtaagtgattaactgaggtcaggagatcgagaccatcctggctaacacagtgaaaccccttttctactaaaaatacaaaaaaattagccgggcgtggtggcgggcacctgtagtcccagctactcgggaggctgaggcaggagaatggcatgaacccgggaggcggagcttgcagtgagccgagatcgtgccactgcactccagcctgggcgacagagcgagactccgtctcaaaaaaaacaaaaaacaaaaaacaaacaaaaaagtaagtgattaacatcagttgagttcctgagttttggttgttttcattcaatgattaaaatatttgcgagcataaagtatggatttacagtggagcacctcatttagaacacttagaattactaattattactaattggaaatactcgtaaaatcttaggaccttataatactatatgaataacagtggacatttctatttaatttattttaatgatgataaaatagaggttcaatgaggttaaatgatttatccaagtacatggcaagtattgtaagaatagagcagatttactgagcatcttccatgtggaaggcagtagataaaaacgtgatcatccctcccctcatagtctagtagaagactgctgaaaatcaaaggagtcagcaaagtctacagctgtcacagtagctagaagactatggaaaatactggaaatggaagggagatggacaactctaagagcaagagacagagagggctgggggacttggagcagtctggcaaggcttaatgccagaggtgtgtttgacctgaatcttgaaaggtgagttaagaagggccttagagcagaaacaaatgcacagtttccactcctgtggcccaggaattgtaagcattcagtgtgggtagacttggggtgcaagaggagcagggtggagctacagtagcaggcaaacactcctgcggacagccctgtgtaccaagaggaggagctgagtgaggtcatttgggagccaccgaaaagttctaagcagggaagtgaagcaatcagatgtgtgtttagtaaagacaacttcagcaatggggaaaggcttttccaacttactccaaatccagaagtcattaaaagaaaaaagtcctaattaatctatataaatttttaaaaaatttctctatagagggaaaaagaccatgaaaaaagtgaaaaggcaaatagcaaactggagaaaaaaatagttgcaactcacatatagacaaagggtaaatatccccgatgtataaaatcaaaatgataagagaagacccactagtctacaagccaaggagcaccaaagattgccagcaaactaccagaagctgggggagaggcctggaacagattattccctagcaccttctgagagcctggccttgctgacactttcatcttggcctgtcttccaaaactgtgagacataaattcctgttgtgtaaaacaaaaaaaaaaaaccactagaaagttgcaaattagaaaactgctaccagaaaaggaaatccaaatgatgacaaagttttgaagatgctttatttcactcagaggaaaattgctaattgaagattagcagataaagataatgaacttcaccttttagatttataaataattcaaaagtttgataccccattttattgatggaattggagaaaaaggcatttttatatgttgctggtgggaaagattgttttaccccaatggtgtgcaatttggcaataactatcaaaattacaaatgcaagttactacaactcagcaattttacttctaagaattctacagatgtactcatgaatgtataaaattaaacacacactgagctattattatagtgttgtttgtaatagtgaaagatgaggaaaaacatctaaatatctatcaaagaggattaattaaataaattatagtatacgcaaataatgtgataccactcaaaagaataaaggagaattttagatacctatatggaaagctttcttatatattattaaatgaaaaaagtaaggtttagatataaaaaaatacagtttgcttttgcagatgaaatatttggacagatgcagatgaaactagttattggtcattacccgtgaggggcagtggtcagggagtgggccttgtcgggttgactgggtggagagccacccactcactcagataggaaattcaggaggaggaacaagttttgggggaaggtaatgagttctattttggccatatttggtttatggtatggccataggtgctactactatgagaatattggttgcaaatttactaagtagtgccattttcacatttatctgatttaattctcacatgaaccctataatgtacccttattattaacttcactttatagatgaagaacctgaaactagagagattaaattctttgctcaaggttatacaccaagacgttataaagtctagattcaaatctttgactccagagtccacattcttaacaatgactgtatgataatgataatatggatatttttctaatttggaggaaagtaaattttgtagggcatgtgtgtgtgtttttcattgtcatttcacacgttttttatttttaattttgcttatgattttctggaagactgtcaagtgctaaactgcagtaatatgagaggagatggaaagcatccctggattggcactttggaagctagtgtaaagttagagcacaggctccagaactgacctgcctgagttgcagtagaagctccaccacttactagctgtacaaccttgggcatcacttaccttttcatgtcttggttttctgaaccctaaagtgaagctgatgatagtactttccctcatggaattattttgaaaattaaattatttaagagatataaagggtttaaatagacctgatttatagtaaacaagcagcaaacattgttgatgtgttttatcagagtagttaaatagatgtgggtgcattgaagagtgagtgggatgtgaagcagttgaagcagattagacttttcattccagaagcttgactatcaagaggatagggcagtgatgataactagaggattcacaaagtcaagggaccattttttgtgaatagtcttcaggatagtttgcagaaagggagccaggagggagagaatactaatgagaggggaataaatcaagggaataaggccttagagctgaaaacagggtgttgaagacaggagagcttatcctctgagatgggaggaaagaaaatgatggttgtagagaaaaagctggtcactaaaccaagaagatcgaaaaccagagattagtttgtgtctcaaatccagtgttttttctccactagaaaacagctttctttaaaagttgcctctacagagttgggaagaattttgtttttttgtcttgcgatggaaagtttgaccttatgaataagcacatggagaagttgaggtttctcaggctgctttaggagacatacattcagtgtgattgagtggagtggtggtatgttagttgacagaaggctttgctggttgccatttgggggccttgctaacaatggaaatccaagaaaaatctttgtgctgtagaggacagtttgttagtttcccaaaaatctaaacataagagttactactatatgacccagcagttccactcctaggtatatacccaagagaactgaaaagagatgttcaaaaacatatacacaaatcttcatggcagcattgttcataatagccaagaaagtgaaaataccccaaatcaacggatgaattgataaacaaaatgtgatatatgcatatagtaaaatatttaggcacagaaaggaataaagttcttatacatgccttgtggatgaaccttggaaatgttatgctaggtgagagaaaccaaattcaaagatcacatattgtataattccatttatatgacacatccagtatagacaaatccatagagttagaaagtagattagtggttgccagatgcttgggggaggaagagtggcagatgactgctcaatgcatatggggtttccttttgaggtaatgaaaatgctctggaattacataatgttgattattgaacaatattatgaacatactagaaaccactgtattctacaccctttgaagtggtgaaatggtgaatttcatgttatgtaaattttatctcaacattaaaaaaattatttgctcttcagcagctctctcttttcttgctgccccataaaattagttacattttatgccaaggctagctttctaggatgccaggtaatagaaaaaaaaaaatgaaatgtctgtgctccataggcacagactatttcagtactatttaggatagtatttcagtactatttaggatatatctttgttcatgaatttcttttctagtttctggttcacacatggattctagtctcagcatttccttactaggggaattcactcatgctcactttgggctgttctgatttcctttatttggatcattttaatatctcttctttaataaaacctatctgattgagttcagtcttctaacaataaatctgaaacataaactatatataaaatgttgggcttttgttttcaaaagaagcatagatgtattgaaagcttttgtcaattttaggtgtttataggtagaaatttagttttgcccctagtggagtatgaggactccataaaaatgaatctgctttaaaaacaataaaacaatttaaaaatctttctttctccaccccctaaatcagaacagtcacagggcagcatgtgcactgaaacttaaccataatattgtccttggttcatcttgtagggttatacgcaatagcaagatagtcctgtgtttcctgtaattccggcccttcagccggacctaccctgacacaaggtgacctcttgtatgtgctgcctagtctgccggagttatctaagcaatctgtcgacctttaaggtttcagctgtctctgtagggtaattgtctgatttcgagattttgggggttgggaacttcataaactcccttagcagccagttttgaaaagtttggggttagccataatcttttatcttcgttttttggaccttcaggaaaatagtatataaatgataagcaaccttcttataaaagctctttataaagtttaaaataaatatgaaatcctttcttagccttctcatttcctctctaatatcctcaatttcctttagctatttttaatcattatttcctgaaaagggtgatgtttgattgcatcacatttctgcattatgttttgtgtgtccaagaacttttgcttattttatggatgtagtcttttaaatcagagttttggcagtaaacatttctggtaacttaaaaaaaaaaagctttcaagggtaaggattgttctgtagttttgagagttttccagttggcttgtacaagactgaataaagaaaataaaaaagcagtatgtaattttttggatacagccttttctatgatattataatgattatgatggattattttggaagaacctcattttcacagccagaaagtagtatgatgctttcaggtacaaacttccatgaagcaagctaccatgatcttaagaacaggtgttctcaagaatatggctaaatagataatttgtagacaaaaaaataagcatgtaggtttttttctcttgaaagaaacctttttacttcatgaagtaaatgtagacttttatatttgtctcgttaacctatagttgtgtttttctgtatgtttagattctgatttgagatatttaaaataactagttgattctgatatattttattactaggcttttcaattgtaaataactccttactttctttttcagttaagagttaatagaagggtcataattttttattgatccaataacattttctcattgagttttagtttcatattgggaagttaatagttttttatagtggaagatatattgttctttttcattttttcttgaagaatgcactgtacttctgtatttatagttcagttttatatgcctataaaacaatgatgcatactatgataagtatcatttgtttgaatgtacgttttagcttttactttcagtaaacttaaaaggatttcaatttagctttggtcactgggtttttctccttttgtagccttttcctttagtctcctcttcccggtggttggtaaaaagaggtgaattgacagcctatgttgaagacactgtgcttttctcaagaaggacatccaaacagcaagtctacttctttctctttaacgatgtgctcattatcaccaagaagaagaggtaagtctttatctggtgttgctgactagacattccagttttaaagttctgtaattcagatgcctgttagggtgatcatcctttaaaagctagaaatgttggaagtatagtttctacatactgaatcataattgcatctatggttcattttctttaaattgcttatgtagtttcagacgaatcattatctgcatcataattcttgccaacctctattgagccactgttctaagcattttacacatttatatcattcaattcttatgatatccctgagaaggtagcactgtttttattctcattctgtgtttttcagactccttctaccataaaatttttgtgtaaaacagaaaaaagttggtccagttgagaacaggttggggagcaactctagtgctccttttaacttaatttaaaatgcactgcttttaatgatccttagtctaaaacattcccctgtgactgggaaggtgttagccatactcccttctgaagggaatgaagtaaatcatttgattggcagagtgtttgttcttcttactccaggcttctagttctgtgtttgtgtccagctctggtgagatgtccatgaagaatattgtagaaaccttttctttccagtatttcttctgtcagactgtttctgttctacacacacacacacacacacacacacacacacacaccccttcagctctgcctttctctagggaacatactttattaaatgcacccaacacatgtaaggtcctatgtaaatattccgtctttcctagaatatgaacttagagtgaaaacttaaatctgtgggctgttatttccacatatgagggaaatgatggtggcctgaattgatggcatatggtgggatcaggggtggtcctggggtgcaatttaggcaaggtgaagagaattatagaaacagatctctatgaaaatacaaaataaatgtccaaatgtatcaggcatatttaattaaatgctagttctgagttgctgactttatagcttgaaaattcaaactaaattaaaacagattgagttcttctttttgctccttttaatcagaccatattatgaattatttcagctgagtggctgtctagctgaaatgaaatgttagtatggtcttccctgagaagccataatgtgacaatgatacatacattaaaatgctgatcattatttttcatacttaggaaaattctatttccatatctccaaggagaaattacttctcttacctggagtagtctaaatagttctagcagctaagtaaaaatttttttttttttttttttttgagatagagtcttgctgtgtcccacaggctggagtgcagtggcgtgatctcggctcactgcaggctccgcctcccgggttcacgccattctcctgcctcagcctctcgcaggcgcccgctaccacacccagctaattttttgtatttttagtggagatggggtttcaccatgtcagctaggatggtctcaatctcctgacctcgtgatctgcctgcctcagcttcctaaagtgctgggattataggcatgagccactgcgcccagccgtaaattttataaagaaagatgggagaagaattataatttttatgtttttgtgttttgttggtttcctatgagatagcatttttccttggctttctccaggatgttttgtttttaggggagagtagttatatatgtctcttcaaatgccagaactcttgacttttaacatcttccagctgttgaaatatttgttctgtctcagtagaccaagagctttaactaaaatttgatttaaatggtaaaatgtacactgacagtaccaagccaattttaaatataaatgtaatttcgattatgatgactttggtgacttaatgaaaatattaaaggtatttaaaccagtacagtgcaacttttgttcttgaatttgcacagacctactcaataaatatagactattgaaagtcagaattaaggtatatgctcttctacttagtagcgtactttgcccttcacagatggtgttgctctcctagctatcccacatttatttgctcaggtaaatttgaacttgtattattaataaagagcaatgccattgggagtctttgagaattttttttttttttttgagacgggcgttttgctgttgttgcccaggctggagtgcaatggcatgatctctggttcactgcaacctctgcctcccaggttcaagtgattctcctgcctcagcctcctgagtagctgggattacaggcatgcgccaccatgcctggctaattttgtatttttagtagagatggggtttctccatgtttgtcaggctggtctagaactcctgacctcaggtgatctgcctgtctcggcctcccaaagtgctggaattagaggcgtgagccaccgcacctggcctttttttttttttctttttcttttttttctttttcttttttttaagagcaagatacacagctccaatggagaggacaacctgagtacctaacttggcctttaccaaaactagaattttttttttgccttaccaattagttcattatatttctagggtgttcttaggtaatagtattggagacctaattgtttatgacctgaatatgtggtgaggttacatgcaaaccacagaagcttcataaacagacttggttaaaaatgtacactatgcctgaccgtatttacatgatagcttcaaggaggcgaactgcaaatgctttgcatgccagaggcaacagtaaaggagatacaacaaccctgaacaaggcgataatttaggcttggccacaagttacagataaaggaaaatcacctgtgccagcgcttgaggactgatctagccacccactgcctaattctaattccaggtttcagtcaaggaacttagcagctgggcttccagtggttttcctcttcagggaggtttttcagctactgagaaaagctgctcgggaggacagttactcttcctcctccgatccagactggcagaaggtttatactgggcacattccatagattgctgaggtgtgtggaccccctccacttcacagtgcatgtatcactgcttgtgcttgtaaagctggcttgatgagtggccatgacactgtctttgtgacaggaattttcacttttttagaacattaaaaacaagcttattttaattattaattttttttttagagacgggaccttgttatgttgcccaggctgcagttcagtggctattcacaggcatgatcatagcacactgcagcctcacactcctgggctcaggcagcccttccacctcagcctcctgagtagctggggctgtgggcatgtgcctttctctttacaagaaagtttaaagttttcattagccctggctgctagtgagtcactctgttaatagcctggttctaccagatttcaaaaggatacatgattgattactctggatgagggatgaggacatgaacactttggtatttgaagctttgactagaagttatctgggtactgcaagagcagacttctcaaccttggcacgattgacattttggggcctgatgtttctttgttgtagaggactgtcctgtgcaataatgtaggatgttttagcagcattcctcgtctctatccactgttcgctagtaacagcccccttacaccctagttgcgacaaccaaaaatgtctctggacgtttttgcctaatgtccccatggagcaaatccctgctagttgacaaccactatactagcatggtagtaaactaaactagctttgcctttggagtagtgaaggtgtgaaaatctatcagactgacacagcaagaatagtaatattgtattataaaagtaatttattgtcaagttatactcatagattaacaaataacattataatatccaatatgtgcctactgataacttattataataaagatgaattacagactgtaccttcatgtataacctatggtctaaatactgttgttcctagttttgaaatacaaaactgaatccaagatctaactaggttcaagctactaaaagatttattttgtaagatatagtcccttctatctggcttaggtcttctctaccaatatcacctgaagctgaaagcaaaattttccttcctgtatttgtttccttactgtgttagtttcttacagctgctgtatcaaagtgccacaaacaaagtgagtggcttaaaacagtcagaatttattgtctcacagttctggaggccaggattatttccatttcacagatgaagacgctgaggaaaagagagataaaatatctttttcaaggtctttcagcagagccaggattctaatctgagtctttgtttccagaggctcaatttctttatgttcattacttcttcattttatttttctagaatatttcacttttcccctcatcctataaagttattgggggaaaaaagcatagaaacttacaacttttttgtttgtttggagaaacatcttttccaaagtaagcttttgttgagtatttttatagttttactggttgtaggagaaaactagaaccagtaccaaatcatatttgtgagttttcctctgccattagctaatctagcatcagaatctggggaagagtttccctttgttaacatttccttcctgcagacatttaagacaggagatttctacttcctgatttctggttccataaatactgtgtatagcttgagccctggttacaactttctaggttttataaaaaggttttcaaaatttttaatttttttttcaggttttataaaattttctgtaatagcaaactactaggtcattatcataaggtcaaggacttaagttcaaatttggattttcccaaatagtttgaacacccagtggctcaaagctgtgcaggctcccttgaaaggttcatggcctggtttggttccattttttgctttttccatgagaatgctctttcctattatagaaagctgaaaatcacctgatacctgtttcatctgcagaataaactcgttcctagggaagtcaagagtatcctggctaaaggaaaggcagtaaaaatgattgcaagctcctttgttcctgaaacacatgaagcttgcttatttctgaccattttggaattgagttctaaattcaagatggcaagatggggtggaaaagaaatgggagccctgtttcctttttgctcctttttttcttccgctgtcatttgcagccttgattcctctgatgttatgaggtattgtttcccctgcatctgtaaggagagttggcattgctgttaaatgttgaaagctgccactactgagaagcacaatatcgatgcctggggtcagaaaactgagctcaaatcctgggcaaattacttctcgtctctcagagcctcagtgttctatctgtaatatggggataataacatcatcttcatcatggagtttctgtgagaattaaatgagataatgcacataaagctcttactacagtgaatatgaatagtcctgctaagtaactgatacatgctatcattaagattatttttggtattgtgttctctctctaaagattttgccgtaaatcaaattattgcccttctgcttctagaatattttattgtttttaaaaaatgattttaaacctttacgtaattgctacatagctgaaggtacggcacgctctaggaccagacatgaatttatggcctccagaacatgagcagtttaggaataaatgcctttaactctatgcctttccctcctcatgaaacccatgtcaggcggcaagtgagtgaggaaaaactattggtcaatttttattctttataaattggtgtaaatcatgtgtacacgttgtagtagcagttttttttttttttcactattcctaaatgactaggagacactataacattgttgctgaaaaatgtgaaataaatagtatatttttcctttttattgatgtcgtcagtagtgtggtactcctgaattggagtgtggggttgctgtataatttggataaccttgttacccacttaagaagctgtgcctgctcttcagggcttgcttagttcagcttatcccagggagagagcttcagaaaggtggtgacagcctctcagaactgtccatctcctctttttcaaggactatgggttcagagcatcccatgagcagccacagaagtgctgggctgtggcatctggtgacccttggtgacagggatggggcttcctggcccttttctgggtcactggccatcttttttggtggcagtcatactgatgaatggggatcctcatctccactatttgttatattattaacaatgaaataggatgtatgtggcatgtttgttagacttcagaattagcttgaggaactgagcaagtaagcctatttgaaatcagtttctggataaatattgtgccttgttttgctggtctgagcacttgccaaattgtggatttcttgacatgggtatttagctctaattatgcttggtccacttgtgcatttgcaaaacatataattatcaggcttttaacaaaatgtcaggcaatttaaatggatggcgttctgttaagaaaataaaaaaaatagctgacatttactgtaagtcaggcatgattgtaagtgccttacacacaatgaggtaataaatgtattatctcatttaatcctctcaacaatccagtcaagttggtactgttattcccactttacagatgagaaaactgaagcacagagaggatcagtaacttgctttggttcacaaagccagtgagtgagtgggtttctttctttctttttttttttttgagacggagtcacccaggctggagtgcagtggcatgatctcggctcactgcaacctccaactcctgggttcaagcgattctcctgcctcagcctccggagtagctgggactacaggtgcttgccaccacgcccggctaattttttttttctatttttagtaaagacggggttttaccatgttagccaggatggtgtggatctactgacctcgtgatccacctgcctttgcctcccagagtgctgggattacaggtgtgagccactgcatccagcctagaattgggtttcttaccagacattccaaatcatggctctactcttacctgctgtgccatatttcattcctttaaaattgtatattattccactaaaaacatgttagtagtataattctaaaaccaaattgaaatggaaatcaacctcagtcaagtgaaaaaaaatttttaactccttgacttaaaataaatttcagcataaattcaatgtccttcatcccagcaaagtttgactagagtgtttctgttccatttaaacacacgatcaagtgcgacggtttaggaatcatgttttttagaaggagaagggaaacaagttgaaatctacagaacactttttctcatacatatattggaggaaagtaggaagaatttcctttgatctcataaaccccattaactcctgtgtatcagtgctactgggggggaatgtcagagccattaaattcctcagagggatttaatgcacgacagtctagaagaggatcttggagagtgtccccaaagaagaatgacttagaaatgtcacagaaggcattagaagatagagtttcaggattcacagttgctcagtgtcactagattctgtatacatgcaaagagaaataatggtgaaatccaggtgtttaatttggtggggtgatgggccatggtggccttcggaagccatttcactggcctgtaagcacaagggtctgaaaaaacgcaggcagctgctaactcaggaaacatttgttgtggcaccagcacattctagtaaatatttttttcgggacagaaaagctatgtgaatgttctaaagcctatggaaaggaaactactgaataggtaaaaaataaatgtcactatcttgagaatatatgccaaaaatcatatgaatatcaatgatgtgataaatctcaatagcatcttttcttttaaattaaacctttttacaaaaggaagaactggaagtgctgcttgggtttccatctgtcggatttgggccataaaacagagttttaaaacaatgtaagcgggtacgtgagagttacacctacagctggggctgagagacgtgggttgtgggaaagctggcttgtgcagtctaaccctttcccttgcctccccatcaccatccttcctttcactatcctgggtgcatcttggtaagctagcctattttccattcctgttcatccgtattaagtatctaaaatgcttgctaataaggattaagatgagaacttgccctaaggtatgtacatgtttaacagcacctctctgaccacaaggcaggccgttaaaggtctgtatccagcagaaagacctgtcttgtcacttagtttttcttcacaactctttatgtacccagagcttgggtccaaggaaatatcctggtttaaggagtgagattgggatcaacattttaaaaaaatatttgatatgtttccccaaatgtcccaatattatttattgattaacccattaatttttttagagatttgaaatgtcacctctatatccccagacatgtctgtgtcaactcgcaaacccactattctgcttcacaattcatcagtcaactcgtgcccttgtcccagtctttgaatttctgcagctttacagtatgtttattttttaattttttaattttaattttaattttttttgaagcggagtctcactttgtcgcccaggctggagtgcggtggcgcaatctcggctcactgcaaggtccgcctctcaggttcacgccattcttctgcctcagcctcctgagtagctgggactacaggcgctcaccaccgcgcccggctaattttttgtatttttagagacggggtttcaccgtgttatccaggatggtctcgatctcctgaccttgtgatccgcccgccttggcctccctacagtatgttttaatacatcataaggctagtttattcttttttttttccacaatctttctggctatttctgcatgtttattttttttccgtgttttacaatcaactcaactatttctactccctgccatctctcaaaaaacccttgcttgtgttttcactgggttgtgtttaaattatgtattaatttaggaggaattggtatcttgataatatcaagcttttctattcattaatttgggccttcttctaaagttgtttaaggttatctacatatagaagaaacctgttaagtttaatccatattaagggttttgtgggttttgtcataaagtgggttttgtcataaataaagtgacatcttcattttatattctaactgggtgttattcatatatacaaaagccattttttaacacctaatcactttactgaattcactctcacttggtagtatattttcagtcaatgatgtcatctgcaaagagttagttgttagagggcagaaaagacattccactatcaggtagtcacttcagttgcatccttaagcagccacagacacctagagtgatgatagctgtcatatctatgtatttttgatgaaattcttgttttttacttttacttgtaaaatggttcaaccttgcagaaaattatcaaacatgaacatacctatcatccatacttaacagatactttttgccgtattagtgtcagatccctcctttttaaacaaaaaaaaatatataaaacacttcagattacccaaagtccttccaccctcagcccttcttcctcctcttctccagagtacctgctccgctgaagttggcatctctttattcttgtgctaactactgcagatacatatatggagctttagtatttttaaaatgtatgcaagttgtatgcaaatttttaaatgtcttcctgatttcaaagtaataaatatatgctcagaatgaaaattctaacctttatagaaattatgggacagaaacttaaagggcttcataataatctccttaagaaagccactgttgataataaggtatatcatttttctgcctttgatgttatgttgcgtatagtagaaccaaacactgacctgcttaacaaagaatgccctccagagaagaaaaaaacaatcagaatatgtatttaccatcatatcctgttctctactagtagttctttattttgttaaaaacaagaaaagaaagaaatctcaacaaaggttactaggaccttaagtggatttcaacagaggaacccatcactgtttacacttcaagcaacagacttatatagatttgattcagttgaagcacctgataggagctgctgcttgcacaaagcagacgccttgatgagcagctggtaaacttggagcacatataagacaatcaaaggaagtctccatataaacttctccatgcaaggaaagatggtttttccatttgcccttttctgagcactttaacttcctcattacatgttccaaattgtttcagagactatataaaccatatgtttgttaaacgatagagacaaacatggggaagtctgattagcatcagcttccctcaggaagggggtttctttcccaaccctgtttagcctgctccatacttattggacatggggtaaataagcagagatgggaaacgggctttaaacagctgcacctggctatagagtttctgctcctctttctactgaagcactactgttaaatggaattgtttctttttatagtagatttcctaaaagagcagtaaggaaggtgtaaagacctacattatttattgcataatgcagaagtttactggcctagacgaagtaatgatattggatattgggtgatagtaaattactttaaaaacaaacaaaaaggccaacatgtttcctgcattttgttttggacccagaagtccagtgggccaagttccttgttcaggcatattcaatgacacaactatgcagatgtgtggaaataaacacttgaggtgaaatcatatagctgtgattagggcagccacagtttatcattcaaactggacatttgagaggactacaggcataaactgagcccagcagccatcctgggtcttaatcagtggcattgtagttgtcattgcttaagagaacaattaataaacattttaaaaaagtatctacttctgtctttatcccccaaagacaagaaattaaagcatttatgactgaaaattgaaaaagaagctggctgggtgtggtggatcaggcctgtaatcccagcactttgggaggccgattacttgaggtcaagagttccagaccagcatggccaacatggtgaaaccctgtctctactaaaaatacaaaaattaaccaggcatggtggtgcatgcctgtaatcccagctacacgggaggctgaggcaggagaatcacttaaacctggcaggcggaggttgcagtgagctgagagtgcaccactgcactccagcctgggtgacagagtgagactccgtcacacacacacacacacacacacacacacacacacttaactagtttattcatattagcttatattcattttctgtgaacccttggttttgaattctattgggatgacttgataggtgaaaccactttatgttgacaacattttcgaatttgagtcatctcaaatgatgactttatagcatattcatttctttgacttttatttctttggaaatacctacaacgcctacacacatgtcattgtttagggccttaccccatgttcacaatattaggttgcttccatttctctttctgaagcagaattgtttttaaacagaaacaggtgcctttgactaacaggttttttaacttgtaaattggaccaaaagagtaatcataaggggcagagagaaaatagtaacaaagaagcctcagttcatcctctttttctcttgtttttgatgctgttgttgttgaggttttgttatgtttgctgttttatcctggttttggtttttatcctgagtcctatgctgttcaatgcatgtctgatatagtatctatacaacatgataaacttgttctgtgttgctaaaaattgactgctttgtttctagtaaacatagtcttttaaaaaatgaccgtatttgtttgtaaagcgtattattcaccttcctctttttataaacatcatgtctactttgataagtctcattttggatgtgagaaatatttgacatatccaagtgtgggtgtgctggtctgtaggcagtctcaggagaactttggagataatcgtgccacacaatcttttaattaatacagattactatcctaggaacaattaggcttgatcagaaggcaatattttgcttttatagataactgcatttgctgttttttgagggcagaatctatcaaaccaaattttagaaaagattataaagtttttcaaggagcatgacaaaagagtggttgacaggtagatgtccattctgaggaaaataaattccaggaaatcttgagcaaagtggcctgttctgaaattcctcctagtgtactggactaggcacaaggagttttcttttctctaagctcccctgacatcattcatttgcatttattattaaatgaggtaattattcgatattcctagcgtatattagaatttattgcatattcatccacttatgtgacagttatttattgagcactctcatgttcactcgcaagggtgcaggtgcagagtagaggaaaagctgtatgtcaccaggttcgggatttgccaggcaaatacaatcaaggagatgaatgtgtatgcaagatgtgatttaactgggtaccaagaaatgcaagctagctaatttaatatgcatgaacaagaggacatgagggaattaagggggggaggcggaaggttgtagagtcaatgggttgtaagaactggtgagttaaataatggttggtgttgaggattagaggaggtgagttggaaagaaaggccatgctggttagagagtggtatgtttgacactgggattacagagagtttgtagttgatggtaatgacaaggactaaggtataaccatggatttgtggctgaagtagggcagaaaacaagatcatcggaggagagtaaagtcggggaattgagggtacagggtaatggaaagatcctttacaggagacttcaagaaagaagtagtgttggggacttgatgtaaatgaccgagagagagagggagagagagagagagagagagagagagagagagagagagtgtgtgtgtgtgtgtgtgtgtgtgtgtgtgtgtgtgtgtgtatgaagaagtattgttggagagagacagagagccagcagtgaaactcaagggagaggatcggaaacgatccaggggtctatagatgactgtagttatgagttagagactgatgccatgagcttcaaagctgatgatgtttcaggaggaggaagtgatcattgtatagaagcaggaataaaaagcaagcaggcagagagctctcaggagacgccttgttctctagggagagccaggtttcttttaaggcaagaatgtgaagggagggttcagagacgaggccaagtatttagaagactttactagtttcttaaatgagggaattgcattcccagagggtacagtggaaggggttcaggaaccagctgaggagtggaaaaaagtggggccagattgggcatgttcacagtgcgatgggaatgggagtgcaggagaaagaaggatattggggttcctgagcctaagcaggaatggagggcataatgagattagtcctggtggtttgtgaaacaggtggtgaggctctgagtgtgggacacaaggatgggttgggtgtcttgccagaagcaagcagacctctggggctcttctcttcaatgcatggtcatttggagatggggggtttggggggtgaggtcttgttacccagagcatgagtagaaggctcctccttcattctgcaaatagagatgtggaagctggggaggtacacctgctggagcatgaccaagatgcatgtaaggatgcaaggatcacttattataacagttccaggatgatgtcaatacttgagatgcaatttagtgtgttacatccataaaaatagtaattaggtttaattggagggggttacattgattcataatcagtagatagaattcaaattccaattcatagtttaaaataagtcattctttccctctccttcctgcccactccttgctgtttccaccaaaatgtgcctcgaaaactgacaatgtcagtcttatctgctgaataattgacgtgttcttttccctttcctttacagtgaagaaagttacaacgtcaatgattattccttaagagatcagctattggtggaatcttgtgacaatgaagagcttaattcttctccagggaagaacagctccacaatgctctattcaagacagagctctgccagtcagtcacctctttactctgacagtccttagtaaccacgcgaatgagaaagtggagatgctactaggagctgagacgcagtaagtatatgtggggaaaagattggaatagctgatagtatctccctgacctgattttctttggtttacagacttcctaaaaacagcagctactattcatgtttttgttgagcacctactgttcgctaagcactatgactgggtaatttttacagatgttgttcttttcattgtaatcttcttacaggagaaggatgttgttattttttccctataagtcctgatagatgcactgtgctttaggtgatgtctttatttttatagagtggtttaaaaatcattttacttttttcattgacaaaaatatgatacactatccttaaggaatatgactcaactggtattttgagtctaggccataagccttcttaggtaatggaattcaggtcgtttctcagtcacctaccttcaaccagagagcagaaagcccaatgatttctgtcaaaagagctacccagtttacggaaatatactgataaatcctctttctaatccagagtttatgcacgaccaaaacaggcgtcctgttggtgcctgcagtttcgccagcagttagtgtgcacttagttctcacattggatgagtggcagtgagggttaactttcaagtccaccttagtgattttttggtccacttaaagatgactgaccaatgtttttgtttagaaactggaaacttcctcttgcaataatcatcatgggcagatattatattgggtcagagagtggaacagtggagggaaaggagaagttccctaattctttgtcctctcagattcctgcctccaactccatgtctgccagggttcctaaatggtgtggttaaaatggatcagcagctgatgaataacaaccctaaaattgtagcaagatcttagagaaagtgatcccaaagaggtatcttcaccttaagactgattttaacagtgttcctagatgattaacgagaatattcaagaaaagttattgaaggacacttgctaaagcgcagtaagcttcgcagcctttatgcaaggtcatcttaacaggcgtaaggaccattgcagcaacgtctccagtaggggagagagattgggctcaacttccaacacagcatgggcaagtgggaattcatagccatagggcaggatggaggtcagtggatggaaacttactgagaggaaatatcagagataagggctattctggctaaactaaccaaacaggattcttgctgaagacaggccagggtaattagacatcataacctctgggatgatggagaataatgaatcttatcagatattgaggatggggtaggggatattcttgccaaattgacttagtagggttctttgctaaaactggattttacgaagaactgtacagatgagcctaggagaaggtacagaaatctaactgaagtttggccaagccaagaatctttgtcaagagacataagaaaaatgtgaaaattacaaggcacccacataaaatgtcaaattatttcatatcttttggcactagaagtagcatttcacaggctagagaaaaaaccaaggacaggttggtgaaagctgtagcatattccaaatgagctggagagttcaccaaggtaatgaaaaaagaaatatatttcataaggctacagctaccatagacagtggttcctctgatggatctgggcaaagtaaattaaaagccttctggaaaagattcaccatcgtagatgtcattaaaaacattcataatttcatgggaggagatcaacatatcaacatgaacaggagttgggaaaagttgattccaactctcatggatgactttgaggggttcaagacttcagcggaggaagcaactgcagatgcaatggaaatagcgagagaactagatttagaaatggagactgaagatgcaactgaattgctgcaatctcataataaaacttgaacaaatgaggagttgcttcttcaggatgagcaaagaaagtgaagttgctgtgagcattgtggaaatgacaacaaaggatttagaatattccgtaaactgaattgataaagcagtggcaaagtttgagacgattgactccaattttgcaagaagttctgcagaggataaaatactatcaaacagcattgcatgctatacagaaatctttcatgaatgaaagagtcaattgatgcagcaaacttcactgtggtcttaagaaacggccacagccacccaaaccttcagcaaccatcaccctagtcagcagccatcaaaaaaaaaagggagcttcatcttcatgtgtttgtttacaaaacaaacaaatgcctttctctgagatcccagagttcttcccctaaaggtgctgaaaagcgctgatggcattccaagcatgcccctctgtgtttgcggctgtggggaggtgagcttgggtgggcgtgtgcttgctgatctgtgaggtgaccagcaagtgacacacccaagaccagggtcaaggggaggcattacttgaactccaaaagtggtttaaacctcttggccagtgaggacaaactagacttcctttgtgtggggaaacttctcctcaaaacagaatttttagtatgcctgtgctttggattttatatgactttaaggatgagaatgactttaacactttggaaatcagtaattttccagtgttccagagaattctcagaaactagagacttccctttccccgtatagttagtaatggtgaaagtgttgctggttttgccttgtgttttccttttctttggtttacaaggattgtttgttctttattcaggccttgccaacatctcaacagagattttcctgactgtctcattcataatttatgtagtctccaccactcatttctgagatgattccaagagagtaggaggtgaactgacatgtccagcttatttcacgccaaggctagatcctttcctgggacattctgtagcatttgttccatccttttgccttttaatcttgccaaagactgaatggttgttcgtttcctcaatcagacatgttctcagaatatttagtcatgtcacttggaaacccataggtctgactcatatttgtagttatttaattaatagcaagagaacattccagaaggggcatgggacagaggtctccttgggtacagagggagtgactctctcattctctttgctctccccacccccaccctcaattacagttgagaagtaaataaatggacatgctttcaagacataaaatagtattggtgttgaaaaaatatatttaacaactaaagacgcactttccttaaaaataaaaaagactattaaaaaacctggcaaattgttacatgccatgtttgcaaatatgcaggttagctttgggctaccgagttttgagcaattagagttttgatatgcatagaatgtgttattttcttccaacatttgtgaaatgcatcaataagtatatattgtttaggttttctttcttttatgtctttttggttaatatggttcattggcaatctagttgaaaaaacaaggtttgcactaccattctagccttaagtaattgaagaacttagagtcaggtatataatttcactacttactctttgacctgaaaaataatgaattttacacctaaatctttactttctttgaaaaactgttgtcactaaaggccacctgaggatatacaacatgtaaaatcagcagtaggaggggtgcagctgtttggcacaaggacaattcaacttcataagacagtgaaattgtggaagaaaaatcaatggctttgattacgtaaagaatgcagaaatgctcaccaaaaggagttggggcaaacagtgagcatctgggatatgccaggcactgagccagctatagaacatgacgaagggacccatgggtgtttctagaggaggacagaattttgagctgaagaaagcatatagggaagtgatcagacatcttggttttcccagaatcagttgttcaagtttgggtccgttgtcctggtgaaattatgaatgatactctttttgactctcaaaaggtcctcgtttatacaatgaaatatatggtgaccctaattatatataattataatattacataaaacaaaatattatcaataacaaattataaatatatacacatatttataattatatacatggtccaactctctcattttcttcccccatgtgaagtgactcacaaaggccatacaggaagtgagttattgccaaagctggaactagaatctggccttcctgacagtctagcagtctttctagtaacaaattttattctttttacggagaagctgccaaccagtaggctgttccacccccactttgctgctcagtttggcttgttctggatttggaaggaaacctccaggaagtcagtcgctattaactgtgagaaactactaaaatatagaattttttaagtccaaagactttattattttttattttattttattaagacagagtttcactctgtcgccggggctggagtgcagtggcacgatctcggctcactgcaacctccccttcacgggttcaagtgattctcctgcctcagcctctcaaagagctgggattacaggtgcttatcaccatgcttggctaatttttttattgttagtagagacggggtttcaccatgttggccaggctggtctcaaaactcctgacctcaagtgatttgcctgcctcagcttccaaaagtgccaggattacaggcgtgagccattgtgcccggcctcaatccgtaggctttaaaaaggaaaaaagattgtggaaacctagatgttaaatttaggatatcatatgggttagaatattttatgataaaatgctaaatagatattgcatccccaaaattattttccatgttaaacttccttttttgttcctttgcctgtgtttttcatacttcctggaatgccctcttcaggcctcctcagatggccagatggctcctcttagggcccatgtcaagcctttcctctgctgaggagcctctcagtactgcacactgcagtctcatcttgagaatgcccagtgctcgctgtgtgtgccactcattagttcacttttcccctcatgttttctgtctcacccaccctccactgtatgactccaaactcccagcctcctgctacatccttcctttcctttacagaacttctcaagagagtggccttcatttctccagattaattcagtggatttttgtcaggcacctacttcccatcaagtgttattctcagtgctgggatgtagcagtgaaccatacggagatcagatctctgctcttaggcttatatccaagtgaagaaccgatccccttgggcttcctgctcttaggaagggtgactttggatggaagggagctttggccagtctgcctgggcaaatggtctgcaatgagctaggatgatgggaaagtatttcttcatgatccagttaaaaataaaggatcatttcaggtagtggtaagtgcagtgaagaccctaaagctggtgatgtgatccggagtgagtgctaattggggggtggtgaggataggtactctaacttaggtggtgcagaaagacctctcttaagaggtgatatttgagccttgagtgaaaaggaggagtcaacccttaggaaaatgcagagtcagaatgtttcagccaaagggaacagcaggtgcaaaacctctaaggaaacgaatttagtgttctcaaacttggcttgaacatggagaatgtggctggagcagaataaaccagggagaggggtggcagtcaatgggcaacaaagtccagtttgtcttcagagctaccccagtgctgtctgtgggccatcagtcctcaagtagttaccagcctggtatgtaggaagcagtttgacatttctgaggcatcaaaacttgtgattattttaacaattaatttatttttactgtatttctaaaaatgcttggtctgcaatggattcaaggggtggagactggttctctaccagagatatctcgagaaacactgatttagaaccacataagccatagcaggaagttccaggaacaacaggggccctggggacagaagtttcagtggggcaaacaataagaaccctaaccctaatcctgttggagtagtcgaggggagtcccgatgttggcttggaccgtgatatgtaggaggagatagaaatgttatattttggagacaaaaacaacaggaccaactgatggattggatgagttgaggtggcagtaagtggaagagaggaatcgatgatatttagatttttggcgtgagctgctggcgtgagctgctagcttgagttgtttcttaatcaaggtaggggtacgtgcagtgagttgttagctagttgagttgtttcttaatcaaccttggcgtgacttcttcctctggcaccctgttgaggcctctccatcagattaacaggcttcctagtttcacacccagcagtccaatcttcctttctttacctctagtatcatttagttttattgaccatccagctctttcatgctaaccctttttttgagattatgtttttctcagcctcttatctatgctcttagtttgcctctcacacctatgaccattcctcttctctgtctcttcagaaatgcagcctgtccaaaaccaaacatcaacactgcccgtggctttccccgacacacacatttctgtaaatggtactattgacactcttttgcgttatccagtctggagacttggtgctgtttttgatgcttctgtgtcagaacagatccatcacctgccagttcttcctgtgtaaaagtctatttcatctttccccatctttccattccactgcctccttcctaggtcaaccacatggcttttgaactaccccaatggcctcctagccattctcctctcccatcaatacagtagttttatcactaatccctaagctcagctctagttttgtcctttccttgctttgtacatagcgagtaggttcccaataaatatttttgggattgacccataattattataactagcttttctctatctgagacaaggtagaagagtaaccaggtgtggagaaaaactgcttcctgtctctatttactgccctttttgttactgctggagcaggtttttcccaaattttacttgtttttcaattttttgctattaaggattcagtcaaatgttttttaggatgtacgtcgaagtcatgtatactgtgttatatctgtttgtccatgacaggccctaagtcatggtatcgtcaatgagacaatactctgtgaaaaatacagaagtctaccctttataaaaggacaaaggaagaatgttttaccactgtcattcttttttccctctgggcctttcaagaggaatgtgggagccagagagccccctttgtctgccttcattaaaatgaagcacagacagctgcagctggcacacacaacaggctgtggcaagtggagtccttggcttcctgcatttgcagtaaaatttagatgtcatttgggtgtagtgtataccgtcatgaaacatctaggacatgttcagtgatgaacacaaactttcctcactcattatatgtcagttataggatatgatgaccttagcccataatcaaatatccttctcaaaatttctccctcacagagctagaagcataatgaatgtggttggtgctgtcaaccatccagacaccaattcctgggcctcctgataaaggggcattgtttgcagggagtctttgagcttttcctgcttctgttaatgatttaattaacaacaggaagtacatggaatggaataaaattgtaaatagtatctctgacatagtcatatacttcatccttttagaaaaatcacaacataaagacagtatacatggaaacattttatttattgtagggtatagcatttttttccttgttaaatctaaattctaagtccagtcataatcttacatttatctagtgcctgtcaaaggatctgatcttaatgtggtcctcatcaccaaccccaataggacaagaggtcttttatcagcaggaaaacatcattgacccgcttcaggttaactgaaggactctggaccagattttttaggtctgagctaatgtaatatgataaacaagaaataattgatttaactatatagcatgtgacaaaaatctaaattttagaactcttagtgggctagggatattattttgcttcagttagattttttaaaatttggcaaattgaactgatatctagttttttaaggcctggtctcagcatttttaatgactttttttcacgctatggggctttctttcatggatcagttttctgaactaatctagttgaattgagtttgtgagggaatgaacagaaacaactatcttcacaatcctattctttacaaaggttcgaaggactttagagaaatcaaaaggaaccacaggtaaatgtgtaggctgtaaaaagaaacacaaaaggtaactggtcaaatgccactttgggagggataaaaggaaggttaaagagcaactaagggctatttttttctattgagaaatcagaaaaccctgttagtgatggagtcctcagccaatgttctgttctgtgcagcctcacctgcagccctgtctctgtgatttcaaagcctacttcctactttctcagtatgtatctatgttttgtagctgatgcctggtattccataagaagtgagactttgctgtatctttgaccttcatgcaattaagttaaacctactgtgcataatgaattatatgagagacaggacaaggtgctaccatagctgataggaaactgtagaaacatcatttcatgccatgcatggagaacttgagggttatgaaaagactacatttatagacatttaagttaaaagagtctcttttcaatttagtcgtctttctctacgtaggtcaaatgttttggtagagtgttccatttcagcacactgcatgctgtattggattttgtgagtgttttctgctctgtgtgttccctcatactgagggcggtaaaaagcaagggactccagtgtatttgctgtgcacctctccaagctagcccagggcctgtgcaaagtgaatgtgggtagaggaaggagtggtaaggcgagtcttcaaagttgatatgccacagatgggattcagtgcagcattgcttactcttgtcactttgtgcaaagggaaaagtctgtgaactggctgtgtggtagattgtgaattcatctcaattgttttatatcgatacgtccctggagaaaatagatgtctgtgagtgagccctagacttcatgtctaaatttaatcgtgggtaagtctatgccctggtttttcctgtccctagaatccatcttataacaacttagttcctgctttagagatgtagtactttctgcttcatagctgggggagctccttagcaggctctttttttttgagacggagttttgctcttgtcgcctaggctggagtgcaatggtgcactcttggctcaccgcaacctccgcctcccaggttgaagcaattctctgcctcagcctcctgagtagctgggattacaggcgtgcaccaccacgcccagctaattttgtatttttagcagagatggggtttctccatgttggtcaggctggtctcgaactcctgacctcaggtgatccctgcctcggcctccaaaagtgctgggattacaagtgtgagccgccccgcccggcctcttggcagactcttgaaagccccaggggaagtcctgtggatttgacagcatctaagaggggggggtgggactcactcaattgaaagtctcaaaaagctgctccttttagtgatagcaacaaggagtgtcttgttctatcctctggagtccctgtgaggggtggccatgtctaagagatgctattagcatccaggcagcatgccacagaagtgaaagatttcatctggacttctggaaactggctgtagggcaaagccactgctgatactggccactcagtgccagagacggtgtctgtgtacaggaagatctgcctcactggctccaagttgctctaaattgctccagaagacagcagtataggctatgtataatttgtttcagtatggcatagagagacacaaatggatcattttagatttctcttggtgagcaacacttctattcatgaggtattttgttttcgattggctttgtactttgcaaattccacttgagcctgtgtaaaaaatagatcttattcccaataaagacatcatagcaaagatacaagtgtttgcctgggaattattttacatgaagttgtgctttgcttatttcttacagaactattgtaaagccctttgtcctgtattagagagagagagagagagagaggttttaaaagcaagacaggagccttggcttctatataaattgtgcatattactacttgacacaccatcttgatcaaggcccagcctcatcttaatctttgaaaatgcctgtctttcaagataccacagtttccacccttcctgccttccatcattattttgtaaacacctgctgcgtaacaccacctctttgatttcagactgcctgggttaggtgcttaacataccagacttgctttgtcctctgaaaaaaatagaaataattttggtaatattttcttttcaagattgttgtaaaaattagattagatgatacttgcaattgtttagtaccatacctgacacataggtgcttcagaatattatttagaacaaggcccaattcctgccattctggagtttatagcctggtaagagaagcagatgagtcagtaaatgattgggctcaatatgtgatgagttatataattcattcattagcagacatatactgagcccctgttacgtgttgggcaatgttgtagagataatgcagtgaaccaaatggataagctgcctgcttttatgaggcttactgttgaccagcaatataatagaattgtgcagaggggtgccctagaaacaggattatcagactgggatggagatggaaggattggtttatgtatcagaggagcccccactggaggaagtgagccttgtgttttcagcattgagtggatatatgttgagcaaaagaagccaaatacaaaagcatacatactaaaggatttcatttgcaaaaagtacaaaagaagcatggtaatagaaattccatggtaatggaaaacaagagcagtcacctttggacagaggttattgattggaaagggtcagaatggaaatgcctggcgcatctgtgtcttggtaagtaaacacagagctgtacacgcttatgattaactcagtttatgttatgtatgttaagaaattttaatggcaataatgagtgggcttatctacgcaaaaacagggaaggaataggaaaggctggggcaagggtgctatgttccaatgcggtaagtcatcctctctgcctgggttggaaggatgcatatggggatgaaggtggggtgacagcgacaagcatctgtagattcaggctgctatgagagaagagtttttttccccaggtgttggtcatgaaggcattttttcttaagaatgtagagtggcacagtagaaactgactttggtttgaattgcttgcctctgaacttctgtctgatcttagcatccttcagatgggcttttgagaggattacatggaatagtggatgttgagtgcagtgtctgacatgtagcatgtgtttaataaatacataagagagttaaaagtatgtgtgtggcggggcagtatttaattaattgtaattttaatacttggtgctcaaaataaaaaaccagggtgactgcattatgtagagaagtgcttgcttatctgaaacttttgatcctttagttgaataattatttttatgtaattatagcttaatattatattaaaagtattggtcatttttcctgtgctcattaaaccattttaagcatttgggaacagtgtaaaagtggccaaagaatttctatttcagtaagactcatatttggcaaaattagttgtatgagggatgagacaactaaatatgtcaagtttctcaagtttacggaaaggtttgagtgtgtgggaagggaagtggggaggaagcagagaaattagtaggatttttaaaaaatgaaacttaactgcttttgaaatgttaaacatcaaattatgggtatgctaaataccttttggagttataatgtgttcgtgtaatcagctccttattaacttttaaactgtcatatgggaagttccttttaatcaataatgagccaagttcattcagactcttttgacaatgatgactagtctcctgcttattttagactttccagcttatcacttttaaactactctcaccctgttttaccatacctctctagagaatctcttgttttctgggagtgcctttgcattggctgcctagaaaacactccattctgtgtttttacaccttgagtctctcagttggatctgccctctgttttaggagcgagcgagcccgctggataactgccctgggacacagcagcgggaagccgcctgcagaccgaacctgtaagttctctcaaggggaagcccacttgggaacatggatgggctctgccccctgctggacgccgggttactaacgagttatattgccacaatacttgcctaagtttcctccagggcttccttctgctttacaccaaaaatgtatgatccttgctttggaagtcagggggtctgaattcaaatccaaggtgcatttctttgttgtgtaaacgtgtcaaatcattgcttagcattgcagagcctatttaaccatctgcaagtcagttacaccattatatacaacatggggttattgtgaagattaagttaaataatctatgttaaaagccctacttgaactgtaaagcccttaaatttttagctattatcagtgggcaacagttgatcatgtttaaaccttctacatactgacagtctggatttaagctgaaaagtatttttaatctaaaagaaaattacctaagaattctttttgaccttctaagaaagtgtgtttcactattctagagaattagaaactggcgcagtgaaggggggtgttgtatgcctattagcttcctaactttgatgctgtggtttcttagattattacagttgcaaggtcaaatccaaagaattagaacaaaacattgttatcctggaacactcaaaaattatagctttaagcttagattaaaagccaaaatgactggtttgaaagttcccggaaatcaagctttgtattaaaaagcaaattaagaagtcacatgtcagcattttgtttgtttgttttgagatggagtctcgctctggtgctatctcagctcactgcaagctccgtctcctgggttcataccattctcctgcctcagcctcccaagtagctgagactacaggcgcccgccaccatgcccagctaattttttgtatttttagtagagacggggtttcaccgtgttagccaggatggtcccaatctcctgacctcgtgatccgcctgcctcggcctcccaaagtgctgggattacaggcgtgagccaccgtgcccggccacatgtcagcatttctgaggaggtctaacatgacttctcagcttttggttggagctcattttatttctaaacttttttttggaaactttcatgtgctgctgttgggatggggagacactctgatgagagccaggagaactgtgtctgttgcagattttgcatggccttggcacatcagcaactctttcatgtctcagtttccctaatgcagagtggctgttttctgttccattgtgtgacatgactaatgactcctgatcaacctgttattgaggggaatcatgcatcataaaaggcctctcaaatctgagcttctaaaattctaaagcttatagccaagcaagggagttgctagaaaagatgttctgctttttattagaagcccaacttgtttctctcaatgctggccctgaattgcagagaaaaataagtaagtgtacattattggattgcacatgttttttctctgctactggaaacttagtatgtcctcttttggcctcagcactgacccaggtggaaatcgttaggtcatttactgctaagcagccagatgaactctccctgcaggtggctgacgtcgtcctcatctatcaacgtgtcagcgatggtgagtgggagcgttcttatgggacactcgtggtccaggatgcagagtgctatagacccgaggagtgtcattttgtcatcattgcccatattccaaatcttgacatgttaatgtttgagatcacatatatgtactgtcttctcatctctaaggctaaaccatgacgttttcttttttccccagtccctcagtgacccagttcttatctctaaatattcgtcctttcaaaaatagcattcttcctgctatcctttacccaaagcatctcctttcccagctcagcccaggttcaaatactctcagccttctcacttcagggcctctgctcacgttctttccctgccatgtcattcattccccctcgaaagctttccctgtcccactttctcttctcaccgtagcacttagcctggggagggatgctgcctctcagctttttcatatccttggagcctggcacactccaaatacttgttgtttggtgtggactctgttctttttcacaggctggtatgagggggaacgactacgagatggagaaagaggctggtttcctatggaatgtgccaaggagataacatgtcaagctacaattgataagaatgtggagagaatgggacgcttgctaggactggagaccaacgtgtagtctctcagatggtcttttgttactgcaagatttgcacgacacttaccgggctggttggttctgggctagttttattgttaattttgtcacagcctatttaattaaaagaacgaaaacacttgcctttaagcttgccaggttgttctgctctctcatgagaagagcttggatacagtgagtttgcacagctcagtttttacctaaccacacacttgcagacctcctgaggtacacagaatagctgagcagttcacttcagggatcaggtcatctctgctcctcctagtttcaccatgttctggcaataaaaaacacatattatatcctggttttctctatccttgcattactaaggtgactgtctctctttatacatccttgtatggttctcccagtattagcaagattgtatatctgtaaagaatgtccagttttgtaaatatttccctgcctttttttttctttttttacatctgattttaatgcttcgttaacttcaaaaggaactggtagagttcagaaggtgagctgttgtttttctaaacctcttcccaggaaggggacattgacacttgaatttttgtcacctttttcctcattagaaggaaagtagaaagccttactttaggatttttaaaaaaaaatccatctcaccccatattgttcttaaataagtatagactaattaacctaagctacctttaacaacgtagaatttagatgggttcatatatgtgagaaaaacctgaatataggacaggggtcctacttttttccccacctctgtcgcccaggctagagtatagtggtgtgatcttggcccactgcaacctctgcttcctaggttcaagtgattctcctgcctcagcctcccaagtagctgggattgtaagagtatgccaccacgcccagctactttttgtatttttagtagagacagggtttcatcatgttggccaggatggtctcttaactcctgccctcaagtgatccaccagagaggagatcctcggcctccccaagtgctgggattataggcatgagccaccgtgcccagcctactttctaattaattaaaaaaaaaaaaaaaaaaaaaaaaaaaccttcccaaatgagctgataaaaaactgacgtgaggctgctttgccttcaataatacctagttttcagctgttccaactcgtttccaaatagaaattagctggaacacactacagtaatctcaaggaagggaaaattaggccttaaaagataccaagaagtcagcatggtacccaattgaaaccttttgaccttagtgggaattcattctatttgcactaaaagccttaacttgctgtattcagagtccctcttaactgtgagtttctatagaactttactttttccactagtgcacagagagagaaaggttatcttaatagtcggtttcatggagatgaaggatgggagattaagaggggggaaatgatttttactggcagctatattccctctctgttctatttgctttaacaaagggataaaacctggcaaagtgtacattattggaggactcaaatctgtatgtgacatgtcccaactactgtccgctaactagttatccaaattgtaaagctacagaagcccagttgaggggtaagtgtgcctggctcacacagcctgcaccctgtcacctcggcaatgagccagtgtggggcactggggacttctaacccttggattgctctttttgacctgtgcataccttctaattgtaaaatatatttcagaccgtgagtaccttgagatctgagcaactgtgttaatgaagtaatagcaatggtccacagtgaaagatgtgttggggtttgcaaaacaagcattccgtcacctctttaataatgtcacagactttttaaaagagaggctatcaagttgtaatataatctgtcatgttttatttaggaaggaaggtaaatttgtgcttgcacggggatcattttgtattatttttgctaatacccagttgaagctaaaaagcaactatttgaatcctgtgaattaatttataagaatgttaaacagctttggaaatacatgcatcttatgaatcatagccttatttagcaagatcaatgttaaagtgttgttatatggcaagtatttaacacattcacagtgtttgtttgatttcaactgtgaattgtcttaagttttttcaaacctagttgtttctatggacacctgctctgaattgtacattgacttcattactaaagaacaaaaatgttcatttttgtcccagtaaattgagactgcttgtacactttcagaaaaatatgtgaatttataaagattttgtagatacttgtccttttgtgctggtgtgatttattttactctaggttgttttcagttaagtatacagtttcctgggtttttggccaaatcagagctctatttaaaaggtatctgtagctaacatttcagaggactaatcttttctctttgggtacatgctggcatcagctgccctagaagactagaacatttttaggagatgggtcatgctgtttcttctcgtagttggcataaacctgcaggactaaatcgcttatcttacatagtgcacagttcccttatcccctggagcatattctaccattcatttggtcacctcgtatctgaacccttgtgtttgtgaaattttaccaccttgtgaaccttggtagaagtaaaaaaatgacttccttgacattagttttttttttgctgcataacaaattgccacacacttagtggcataaaacaatacccatttaatatctcacagttctgtagtcagaagtctagaatagcatgggtgggttctctgcttagagtttcacaaggctctaagtgttggctggctgctttcttacctggagcttggtgtcttctttcaagctcatttctgttattggcaggattcacgtccttgctgttgctgagctgaggtccttgtttgcttgctggctgtgagctgggggctgctcacagcttctagaggcccttcatatcctcgccacaggctccttccatcttcaaagcagcaatggcatgttaactccttttctcacttggaatctgtttgactccctcctaggctaccagcgggagaaaactctgcttttaaataacttcttacataattaggttagactcatgagataagtcccttatgacactaactcaaaatcaaatgatttgggaccttaattacatctgctaaattcctttgccatgcaatataaaataattatggatgtagtatcagggagggatattgggggacatcttagatttctgcctataacaccttctataaaaccttaagatgtttgaggcttagagtttccagcatctcttgcagctaagatacacctagctatgtgataggaaacagcaatcagctacctctatcttagaatacaccactcaaagccttctttcctggattttcactcaagctagtgatggaagaggaaagaggtaaggaataccatccctggaagtagcaggatgcatcctcctatttgctccatcccctatctgaaatcgctgatgcatttttcctaggctttggcaagtaccagagaggcagagctacttggtggacttgcagtgctaaaaaataatccaggtcagtgtttagtaccattaataacacttctcatggatttggtccctaaagggcttattctcctgtgggagtatgaatctgaaagatctaaaggtttgctttctgagttttcagtatattaaagtcctggaagaagaaaacacatcctgtctctgaaagaaaccagcatcatcagaactaagacttctgttacttctaaaagcaaattgtcaaagtttcagtaaacactaagacatggcattgtgatccagaaaaaaacaaacacagggactctgtatactagaatcattaggtatagacattaaagtacttaccattgctgttgatggagataaagccataacggaactacacagctgtgtagtagaagaaaaaaacctagaaattatggaaccgcgtttaatgccagattaggtaagagttaaaagagatattggggaacgggaagagaggctagaagattctacccataaggaagcatggagagaggagacctggagaatgtagggatttaactggaatcccagaggagagtggagagagaaagcagcattggcaaggggctggacctttataaccctgctctgaccagatatgagaggcaggctatccccaggaaaagagagtggtcttggataaggtggctcccttcagctcaggacaattcccatagagggttgatgggtgaaggctgtcatccagttgcattcccagcacctaaagcaaaaagtccttcagtcctgatggggggtcagggcagaacatcacaacgttcactaaatggagctctatcaatgttacataaagtggtctttagggtaaaaggtatcactagggataaagtgggtgcctacatagtgatgaacgtttcatctaatcaggaagatggagtaacttaaatatatattctagcaataacctagcatatttaactatatggcctcaactaaataaagttggcagaaatataagaaaaaataattaaaatcatagcatgagacttcaacacatctctcagtatttgataggaagaatagatacaatcaggaaaagaatagaaaattttaatgaaatagtttaacataatgggaatatataggacactctgcaaacaatttcagcatatacatacttttcaagcacataaaatatttacaacatttggctattccctgggccataaggcaaattccaacaaattttaaagaactgaagttatgcagagtgagttctttgatggcaacataagtaggtcagaaaacaaaaattaagaattatcaatttatttggaaagttaggcctttccaaatgcaaaattataaaattccttgaagatgacataggagacaatctaggtgacctcgggtttggtaatgactttttatctacaacataaaaagtatggtccatgaagaaaaaaaattggtaagttgaacttttacagtaaaaacctcagttctgtgaaagacactgttagaataaaaagccacagacaggaaatatttgcaaaacaaaggattggcaatcaaaaacatacagaaaacttaaaactcaacagaaaaacaacccagtgttcaaattcaggggtggcggggggggaactaggcaactcaccaaagataacacaattagtaaataaacatatgaaaagatatctaagatcatacatgagggatgaatttaaaggagatgccactatattcattagaatagctgaagtctaagaccctgaaaataccaaatactgatgaggatgtggagcagcaggaactcttactcactgctgatggaaatgcaaaaacaacttgggaagacagttgggcagtttcttagagaaatacacacctaccatatgatccaacaattacactccttggtatttatccaaatgagttgaaaatatgcccacaggaaaacctgcacataaatgtgtatagcagctttactcataattgtcaaaacttgaaagcaactaagatgtccttcaatagatgaatggataaactgttacatctatacaatgggatattaatgagcaataaaaaaaagttatcaagccataaaaagacatgaagtaaccttaaatgcacattgccaggtgaaagaagccaatctgaaaagcctacacactttatgactccaaataaatgacattctggaaaggcaaaccacatagagtggttgcctgggactcaggggtagggagggaagaataggtagagcacagaggattttttagggcagtgaaagtgttctctgatacggtgatagtggatacatatacatgtgtcaaaatgtacaacacaaagagtgaaccctatgtaaactacggactttaataatgaagtatcaaaattagctcattaattataacaaatataatccataatacaagatgttaatttaaaaaaactggtgggagggggtaaaggggattatgggacctctgtaccttttgctcaatttttctgtaaacctaaaactgctctaaaaagtgaagtattaatttttaaaaaagaattgctgaagaaagtttttcaaagtaaggaaataacagaatgaaacttggaagatgaggaatgaagaacagaatgggtaaacatttgggtaaatataataggctatccttgagttttaaaaatgtgagatggctgaaagcaaaattatattatctgacatggttgtcaatgtatgtaaaggaattatttaagaaaataaattataaagcagtaagctaaatacctaagtggctgtaaagttcttacatttcactagaagtgtcaaactgttgatactagtcaactgatgttatatatgtatactgtaatccactgagcaacaaaaaatgtatacgaagtgatatatttaaaaacacaatagacaaggcaaaacagaacagtaaaaaataagaaaaaaatcaggtacccacaggaaggcaggaaaagggaaacaggaaagaaaaaaatatataaagaaagcaaaaatagaacagcagacttcactcctaacatgaatgaatatataaaatttgagtgtctaaattgtaattagaagacagattcacagaaactttaaaaattaccggaccatatgctatccattcaaaacacatttcaaatacaataaatataggtaggtttagaataaatgaagggaaaaacatgtcaagcaaataccaatccaaaaaaaaaaaaaaaaagctgaaatggctatactaatatcagacaaagccttcagagcaaagggaattatcaggcacagagggggacaatatataacgatacaagggtcagtatgccaagaagacataaaaatcttaaatatgtatgcagcaagtaatacagctttaaaatacatgaagtacaaactaggacagaatacatgaactagaatatatgaagtacaaaacagaactaaaaggaaaacatagacaaatgacaatatagtgttaagagtatagaacaggatttcgaagatggccgaataggaacagctccaatctacagctcccagcgtgagcgacacagacgggtgatttctgcatttccaactgaggtaccgggttcatctcactgggacttgttggacagtgggtgcagcccacagagtgtgaggggaagcagggcggggcatcgctgcactggggaatcacaaggggttggggaattccatttcctagcgaagggaagccatgacagacagtatctggaaaatcggaacactcccaccctaatactgcacctttccaatggttttagcaaatggcacaccaggagattatatcccatgcctagctcagagggtcccaagcccatggagccttgctcactgctagcacagcagtccaagatcaaactgcgaggcggtggcgaagctggggaggggcgtctgccattcctgaggcttgactaggtaaacaaagcggccaggaagcttgaactgggtggagcccaccacagctcaaagaggtctgcctgcctctgtagacttcacctctggggacagggaatagctaaacaaaaggcagcagaaacttctgcagacttaaacatccttgtctgacagctttgaagagaatagtggttctcccagcactgagtttgatatctgagaacagacagactgcctcctcaggtgggtccctgacccctgagtagcctaactgggagacacctcctagtaggggcctactgacacctcatacaggtgggtgcccccctgagacaaagcttccagaggaaggatcaggcagcaacatttgctgttctgcggcctctgctggtgatacccaggcaaacagggtctgcagtggacgtccagcaaactccaacagacctgcagctgagagtcctgttagaaggaaaactaacgaagagaaagaaatagcatcaacatcaacaaaaatgacatccacaccaaaaccccacctgtaggttaccatcatcaaagaccaaaggtagataaaaccacaaagggggagaaatcagagcagaaaagctgaaaactctaaaaaccagagcacctcttctcctccaaaggattgcagctcctcgctagcaacagaacaaagctggacaaagagtgactttgatgagttgagagaagtaggcttcagaaagtcggtaataacaaactttcccgagctaaaggaagatgttcgaacccatcgcaaggaagctaaaaaccttgaaaaggattagacgaatggctaactagaataaacagtgcagagaggttcttaaatgacctgaaggagctgaaaaccatggcacgagaactacgtgacacatgcacaagcttcagtagccgattcgattgagtggaagaaagggtatcagtgattgacgatcaaaagaatgaaataaagcaagaagagaagttgagaaaaaaagagtaaaaagaaacaaacaaaacctccaagaaatatcagactatgtgaaaagaccaaatctatgtttgattggtgtacctcaaagtgacggggagaatggaaccaagttggaaaacactgcaggatattatccaggagaacttccccaacctagcaaggcaggccaacattcaaatataggaaacacacagatgccacaaagatactcctcgagaagagcaaccctgagacacataattctcacattgaccaaggttgaaatgaaggaaaaaaaaatcttaaagagcagccagagagaaaggtcaggttaccataaagggaagcacatcagactaacagcagatctctcagcagaaactctacaagccagaagagagtgggtgccaatattcaacattcttaaagaaaagaattttcaacccagaaattcatatccagccaaactaagcttcataagtgaaggagaaataaaatcctttacagcaagcaaatgctgagagatttgtcacaccaggcctgccttacaagagctcctgaaggaagcactaaacgtagaaaggaacaactggtagcagccactgcaaaaacatgccaaattgtaaagaccattgatgctaggaataaactgcatcaactaacgagcaaaataaccagttaacatcataatgacaggatcaaattcacacataacaatattaaccttaaatgtaaatgggctaaatgccccaattaaaagaaaaagactggcaaattggataaagagtcaagacccatcagtgtgctgtattcaggagacccatctcacctgcagaaacacacataggctcaaaataaagggatggaggaagatctaccaagcaaatggaaaataaaaaaaaagcaggggttgcaatcatagtctctgataaaacaaactttaaaccaacaaagatcaaaagagacaaagaaggccattacataatggtaaaggtatcaatgcgacaagaagagctaactctcctaaatatatatgcacccagtacaggagcacccagattcataacgcaaatccttagagacctacaaagagacttagactcccacacagtaataatgggagactttaacaccacactgtcaacattagacagatcaaggagacagagtgttaaaaaggatatccaggaattgaactcagctctgcaccaagcagacctaatagacatctacagaactctccaccccaaatcaacaaaatacacattcttctcagcaccacatcacacttattccaaaattgaccacatacttggaagtaaagcactcctcagcaaatgtaaaagaacagaaattataacaaactgtctctcagaccacagtgcaatcaaattagaactcaggattaagaaactcactcaaaactgcacaactacatggaaactgaacaacctgcttctgaatgattactgggtaaaaaacgaaatgaaggcagaaataaagatgttctttgaaaccaatgagaacaaagacacaacataccagaatctctgggacacatttaaagcagtgggtagaaggaaatttatagcactaaatgcccacaagagaaagcaggaaagatctaaaattgacaccctaacatcacaattaaaagaactagagaagcaagagcaaatacattcaaaagctagcagaaggcaagaaataattaagatcagagcagaactgaaggatatacacaaaaaacccttcaaaaaaatcaatgaatccaggagctggctttttgaaaagatcaacaaaattgatagaccgctaggaagactaataaagaagaaaagagagaagaatcaaataggcacaataaaaaatgacaaagaggatatcaccactgatcccacagaaatacaaactaccatcagacagtattataaacatctctacgcaaataagaaaatctagaagaaatggataaattcctggacacatacaccctcccaagaccaaaccaggaagaagttgaatccctgaatagaccaataacaggttctgaaattgaggcaataattaatagcctaccaaccaaaaaaaagtccaggaccagatggattcacagccgaattctaccagaggtacaaggaggagctggtaccattccttctgaaactattccaatcaatagaagaagagggaaccctccctaactcattttataaggccagcatcatcctgataccaaagcctggcagagacccaagaaaaaaagagaattttagaccagtatccctgatcagtcgaggcaaaaaccctcaataaaatactggcaaaccgaatccagcagcacatcaaaaagcttatccaccacgatcaagttggcttcatccctgggatgcaaggctggttcaacatacgcacatcaataaacataatccatcataaaacagaaccaaagacaaaacccacgattatctcaacagatgcagaaaaggcctttgacaaaattcaacagcccttcatgctaaaaattctcaataaactaggtattgatgggacgtatctcaaaataataagagctatttatgacagacccacagccaatatcatactgaatgggcaaaaactagaaccattccctttgaaaactggcacaagacagggatgccctctttcaccactcctattcaacatagtgttggaagttctggccagggaaatcaggcaggagaaagaaataaagggtattcaattaggaaaagaggaagtcaaattgtccctgtttgcagatgacatgattgtatatctagaaatccccatcatctcagcccaaaatctccttaagctgataagcaacttcagcaaagtctcaggatacaaaaccaatacgcaaaaatcacaggcattcttatacaccaataacagaaaagcagagagccaaatcatgagtgaactcccattcacaactgcttcaaagagaataagatacctagcaatccaacttacaagggatgtgaaggacctcttcaaggagaactacaaatgattgctcaaagaaataaaagaggacacaaacagaatgaaagaacattccatgctcacgggtaggaagaatcaatatggtgaaaatggccatactgtccaaggtaatttatagattcaatgccaaccccatcaagctaccaaagactttcttcacagaattggaaaaaaactactttaaagttcatatggaaccaaaaaagagcctgcattgccaagacaatcctaagcaaaaagaacaaagctcgaggcatcatgctacctgacttcaaactatactacaaggctacagtaaccaaaacagcatggtactggtaccaaaacagagatacagaccagtgtaacagaacagagccctcagaaataatactacatcctacaaccatctgatttttgacaaacctgacaaaaacaagaaatggggaaaggattccccatttaataaatggtgctgggaaaactagctagccatatgaagaaagctgaaactggattccttccttatgccttatacaaaaattaatccaagatggattaaagacttaaatgttagacctaaaaccataaaaaccctagaagaaaacctaggcaataccattcaggacataggcatgggcaaggacttcatgactaaaacaccaaaccaaatggcaacaaaagccaaaattgacaaatgggatctaattaaactaaagagcttctgcacagcaaaagaaactaccatcagagtgaacaggcaacctaaagaatgggagaaaatttttgcaatctacccatgtgacaaagggctaatatccagaatgtacaaagaacttaaagaaatttacaagaaaaaatcaaacaaccccatcaaaaagtgggcgaaggatatgaacaaacacttctcaaaagaagacatttatgtaaccaacagacacatgaaaaaaaggctcatcatcactggccatctgagaaatgcaaatcaaaaccacaatgagataccatctcacaccagttagaatggcgatcattaaaaagtcaggaaacaacaggtgctggagaggatgtagacaaataggaacacttttacactgttggtgggactgtaaactagttcaaccattgtggaagacagtgtggcgattcctcaaggatctagaactagaaataccatttgacccagccatcccattactgggtatatacccaaaggattataaatcatgttgctataaagacacatgcacatgtatgtttattgtggcactattcacaataccaaagacttggaaccaacccaaatgtccatcaatgatagactggattaagacaatgtggcacatatacaccatggaatactatgcagccataaaaaaggatgagttcctgtcctttgtagggacatggatgaagccagaaagcatcattctgagcaaactatctcaaggacagaaaaccaaacaccgcatgttctcactcataagtgggaattgaacaataagaacacctggacacagggtggggaacatcacacacggtggcctgtcgcagggtgggggaagagaggagggatagcattagaagaaatacctaatgtaaatgatgagttaatggatgcagcacaccaacatggcacatgtatacatacgaaacaaacctgtacgttgtgcacatgtatcctagaacttaaaaaaaaagaaaaaaagagtatagaacagaacaccaacacatgggatataattgacatttacagtgtactatccaataacataagattatccattttttaaatatagctaagggatattcaccaagataaccatattctgagtcatacaacaaactgaccaatttacaaggactgaaatcatacaaagtattttctctgaccataatggaatcaagctaaaaattaataatggacaagaaaatctccaaacactaggaacttataacagcacactcacaactaatctatttattaaagagaaaaatatataaagagggaaataaaaaatacattggctaaatgacatgaaaatacaaaatatcaacatacataggatgcagctaaagcactgcttagagaatttatagcacaaaaaacttgtattagaaaagaaatctaatctttcacctcaagaaatgagacaaaataaactcaaaagagcagtaagaactaaataaggttaagtgtagaaatcaataaaattgaaaacagaatacgtgagaaaaatcaatgaaaaatgaatatatcattaaagatcccacattacagacattaaaaaaataataaaggggcgttacaaaaaactcaaaaattttttactgcttcccaggcttctgatcaatacaaaaaatctttacatacataaattcaacaacttagagaaaatgaaccaataaaaaccacaaactaccaagacattgagtaatctcataattactaaataaactcacaatttaaaataatttctgaaaaaaaatctccaagtgcaaatggtttcgttggaaaattctacaaccatttaaagaattaatggcaattatgcataatgtcttccagaaaacgtaagaggaagacaacagcttccaacatattttatgaggccagcattacattattaaaacaaaagctactatagatttgtatctttcctgaatagagagacaaaaatcttcagcaagacactgccgaatcctatccagcaatatatttaaaaaattacacactgagaccaagcggggtttattaaagaaatgcaaggattactcaatatttaaaaatcaattgatgtgactgctatggtttgaatgtgtcccataaatttcatgcattggaaacttaatccccaaattcatatgttgattggaggtgggccctctgtgaggtaattttaagcttagctaagttaatcagggtgaagcctccatgatgggactggtggctttataagagacttgagatgacacacactcttgccctctagccatgtgatgtccccatttgtgacacagcaagaaggccttcaccagatgctgataccttggtcttggacttaagaactgtaagaaaaaaatgtgttttctttataaattacccagtctttgatattctgttacagcaacagaaaatgactaagacagcaatctacaatattaacaagctaaagaaaaaaacatatggttactgtgccaattgatgcaaaaaagaatatttcgaaaaaataagaaactatggctaaaagtcatcttcaatattgttttatgccattttttattttgtcattattaatgtgtatctgtcaaaaggagttttttgagacagggtcttgctctgctgcccagactggagtgcagtggctcactgcagccctgacctcccaggcttaagcaatccttccatctcagcctcctgagtagctgagactacaggcacatgccaccatgcctggctcatttttgtaatttttgtaaagacagggtttcaccatgttgcccaggctggtcttgaattcatgggctcaaatgatccacccaccttggccttccaaacggctgggattacaggaatgagccaccacacctggctaaaaggacgttttatttaagtttgttaaactaatttaaaattttaaaatatttagagatctagtatgttggcttccatttatattcttacttcagacaccacaaaaacgttagagataggtctgttttgcctttgcttgaataaacaagaaaaaaattggcttccagaacaagtaaaaataatcaaactctctcatttaacaggagaaacagccattaagagaaaagtgaggtgaatggaagctatgggaaagattaagtattgaaatatttaaaagggcctaaaagataaaagtcaccaaggaatcactttttcattaaattaaagctttgctaaagttaattttattcccaaccatgatgttcactgtgtaaaggtaacataatatactacataaggactcagaaatagaaaaatacaactcaaaaatttataccagaccattaagatatgaatcaaatttaagaaccagaaaaaaaaaggtagtcacaatttaaaagttctctatcatccacagtagatcgcctctacagtgcttccatatcagctgttttccttatctccaatgactttcccaatactaataaatattttttcttatgtcccattcttcacctcatgatgaatacacctcttgccttcataactatataaaactggtgctagtctctcctggcacttaataacactggcttaactctttacactttaccaaccaagtcaagagtaacacatctggccattataaatctcaaggaatgtaaataacaactttttgtatctctaaaattaattagtaatcttccttctccgtagtcagatatatccttaaaactccaatcatttgacatgagatgaaaaatcaaaacccaaacagaaatacataagataactaaggaaaaagcaaacaacatgaaaagatgctcatcattaatcattttagaaacaaaaattaaaccataatgggacaggactcctcatccactaaaggctaaaattaaaacgacagctaaaaataccaagtactggcaaggatgtggaatactctgacccccccaacacacattgctgttgggaatgtaaaatttcagcaaattctgaaaacagtttagcagtttcttatacaaacacacttactataatacaacaaccttaatcttaggtatttacccaagacaaatgaaaacatataaccacacaaagacttatatacatatgttcatagcagctttattcataacagcaaaaaaactgaaaacaactcaaatgtccatcaactggtaaatgaattaacaaactgtggtataactatacaatgcaaatactactgaatagaagataaaacaggaactacctactaatacatgtaacaatatcagtatctcaaaagtattacattaagtgaaagaagctggacacaaaagactggttatttgaaattctagaaaaggcaaaacgaaaagtgacaaaacgcagatcaatgggtttcgaggggatagaagtgggggtgagggattgactacaaaggggtaaaagggaaatttttaggtgatacaaatgttctatatcagctgggtgtggtggttcacgcctgtaatcccagcactttgggaggccgaggcaggtggatcatgaggtcaggagttcgagaccagcctggccaacatggtgaaaccccatctctactaaaaatacaaaagttagccgggcatggcggcgcgtgcctgtaatcccagctactcaggaggctgaggccagagaattgcttgaacccgggcagacgaaggttgcagtgagccgagattgcgccattgcattccagcctgggtgacagtgcgaaactccatctctggggaaaaaaaagttctgtatcaagattgtggtggtggtaattacactactatatgtttgacaaaattcactgaatcatatacttaaattggttaattttattgtatataatatcttaaaatttattatatataaaataatacctaaagtttatatatatcaaaatggaacaatggtaacatgatttactttgctacatttccaaatattgtccagggaggatgtattattttaaaatcagaacaaaaatcccatttaaaagcaattagcatattaaaaatatataagtatacatgatcacaatgacttataaataaatacaaactcagagctaagaacagaaggaaatttaccactatttattttgggtaaaggagtactaaaattcctcctaaagcttttgtataattcataacttttaggggaggactttgttttaaaaatgcagtaatagagaatgccttgcaacaattggtgtaagtttatctagagcttttgcccaaattaattaattgggaaggcatcacatgtgctcactgttcaacgatgcttttgaaagattattcagtagtttaatttcttttgtttttttcctgaaagtttctgtttcaggttttttttttaagagttattctctgcattactcaaaatgatgaatcaaacagattttccttcttaatttaatgtcttattctttaaaatccactaaagaacaaacagttcttagacctggaatgtattttctactcagtaatgccctattttgtaaacaaaagaaacagaatgtaagtagcaccttggattaaaatgtccaacctaatcagctgtgcagaagacataaattggaggtaacaataactgctttaatctctgtgaatgcctcatcaattaaataattcctcaggaacattttccccattcatatgggaattacatactggtttgcaaacacagaaccaactaataatcttttttacagaatctctaaatcctttcttccaagaccattttggccaactgactggatttaaactggataataaaagtaagggaaaaaaaagcacaaacagaaactcttacagagcaagaaagaccagatggtcacctcgacgttagaggcaaaaccagtatgctctaatattgtgacatgactctaatgccagcattcaatgacagacagatcacttttagaagaacagccaagataaaggatttgagacataacaggtaacacacattcccaggattgggagcagtacctgaacaagtgctgttaatggatcactgtagcattatcaatacatcccagtcattgtatgatactattaactctttcggtttccttgcatttattggaaggcacattaaaatttgcattctttggagtgcagcaagatgcttttcctgtttctttctgcagcatgtccagcacttttacaccttctgtcagacaaataggttaaaactcttacattgcaaaatcaagagtataatactcagtgatggatagtgtatgtttctgattaataccctttttgccaagttaaaaataccctactagggaccgggtgcagtggctcatacctgtaatgtcagcactttgggaagccaaggcgggcagactgcttgagcacaggagttttgagaccagcctgggcaacatggtgaaacggtgtctctacaaaaaatacagaaattagctgggtgtggtgatgcatgcctatagtcccagctatttgggaggctgaggcagaaggatcacttgaacccaggaagtcgaggctgcagtgaaccaagatcacaccactgcactccagcctgggtgacagggcaagacactgtctccaaaaaacaaaaaacaaaacaaaacaaaacaaaaaaccaacaaaaaactaacaatatcctattaaaagtggcttaaacaattgaagggtttttattatatcaacataagtccacatgtaaagcagctctagaatgggttaattctgaagcttaccggcattatcaaaggctctggtgagttctatctttccactgagctaacctcagtctgagtccgtgtctccttgtgatcattagttggctgcagcagttccaactatcagagtcagaaaagacaatgtccagagagagcaggatttcctcctctaagcctattagtgagtaaaacatttttcagacacccccttgaagatcacttctcagctgccattcactaggacatgtttatgtactcatgccttatcaattacttataagggggataagaccacatgtgattcatttagaacagcaggattcacccttagggaaagggtccaacatacctggacacagagctgcacagaagggaacaccagaataagcaagcaagaagggagggacaaaatagttgctggccggcaaccaacagtatttatcacaatctgatagggctgaaaatgtacagcatgtgttgttacactattccttggcgaagaagataagtagcaataaaataaaaagtgtaatataatagattgttagacatttacgaaaatatttcagggacaaataacaactaagattcagagagtacaggcactagcctatgtgctttacatgtattaatgtacttcatcctcacaactgttacatgtacagttgtccctcagtatctgtgggggactggtttccaaccccaacccctcaaatacctaaatccatggatgctcaagtcttttataataaaatggcgtagtatttgcatgttacctaggcacaacctcccatattctttaagtcatctctagattatttataatacctaatacaatgtaaatactatataaatagctgttaaactgtattgtttagggaatgacaaggaaaaaagtctgcacatgttcagtatagacacaaccatcctttttttccccaaatatcttctatccacagttgtttgaatccacagatgtggaatgcatggatatgaagggccaactgtatcttacaagataaggaaaaaggagagaagccaagacactgactaactgacagagctgagactggaactgaggtaatcaggctccagaccgtgctctcaattgctgtattatgaggcacagggtgatataaaaagggcacgtgttttaaaaatagtaaaaatatcaaatgaaccaagccataggtgaaaatgtagaaaccaatccaagaggttggctgagatttaacattgtacattttattaaatactggactttattacaacaaattaatttacttccgatagaagtttcattttaaaaaatgtggttgtgttcaaattcttaattgacacttgttttggggtaaacatcctatttttactggtggtatcatcaatcattatgagcagaaagattaattttgtataacagaacaaaggaatttctcaagtggtacaatactcaatatatataaagggaatatactcccaaagagtgggcatgaccacagcagagtatatgatcagagaacatattgcttttatggtatatatatatatatatatatatctctacatataacatcaagtcatgcacattaagtctttactacctactgaaggcttctaccttacacatgaaaattgttcatgtcccagggtttggcatccagccaaaatttaaacaatgatgaagaatggctgtcaaactggcttttcagaccacccctgaaaagctgtcagctgtaatatccatcctggaatcgtggcggaaagttcctgggagttgccttttcctgtgttttgatcaagtctataatagctgacagtactgcacagtctctggatttagtgtcattccagtctacaggatgaggactttcaatcttctcttgcagaagaatatctagttcctttcttaattcctaaggttggaaaaattatacatgttcaacaaaggcagatatattaccaaataacataataaatgaaactaatttacctgatacaaggagtttcacaagcgatggctcaaaagctaaaacatttagtgagcaatcaactaaagtgtggttatgagtgaataactaaagtgcagttaaaattcacactgcaatcacactgagccatttagaatggctggtctgttaccacctcaaaacacaattcagaaaaaccaggaatcattttttcaaaattatttgctctgctgaaatagagcaagaaatgttaatctatttaacagttagaacaaaaccacatgaccacatgctgacttacatgtagatttaagataatcacataaagtcagtcaccttaacaagatgggcaattcttgctggagactgaaatacaatccactcatctacagcaatagtttcctgatcgttatccttctggatggaaatgtcacctccaaaaaacaagagacagtatggggaaacctctgtgcagtcatacaagtatatctgtaatgaaaattaaagtgaattaatacattcaggagtctgaaaagattactatataaattcaacaatattaccagtattaattaatgagtatcttccttctaaaatattaaccttctattgtaattacagagatttgtaagaaataccattttaaatgagccatcttcattattcagagaacataggtattttaatattttttagtttaaactaagcactactctgaacaaaatattttctgagtgacaaaagcaaaacactaatgttgccgaagttatttttatccagttttttataaatcatctcaaattactgttctaaagagaaaaatataaataaacagaatctcaacatgctgaacaatacttataaggtatactgacatgctaacaaaactttctatacaatgtaaactcctgtacaccataaaatatgccaatatttcttgaaagcaagttctgaaagaaaattatgcaatcaaataactgtcctaactaattaaaatacaaagatccatcattacagacctgaaaattaaaagaataggttatttgttagagggaaaaagttactcacgtcacaggaataagacacaacaaaaaaaaaattttgtatataattgttaaaactacacaatcataaaaatacaatgagactgataatcagatccttaattattttaaatgttcacttacactgcttgttctcatctttaggtgatagataagccagttgtagtgaaagtctgtttgctccacattaacagatttaggatgaacagcaaccaggccatcggtttttgtgtaaacttttaccctttaaaaaaagttaaaatgcagtttgttaaaaagaagtcttctagaggattttctttttttacactacttgaaaaactgatagaagagcttggtaaaaaccaaacaaatcccggaatctaaaaaaattccagagaataattcagtttatttttgcaaaaaaatatatttatatttgaggacagagcataatttccttaaaaatatatgaaaaaatgctatcagtatgaataatttaaatcatgtaactaatcttcttcttgcaggtataattactcaacattttagaaaaatggcagaatattcttttccttaatgttaatgcacactataccactgaagaataaataacaaaaaagtacctaaaataattaagtgattcataccaagagtttatacattttactatgacaatcataatactgataaacagcccttgatttacaaaataactgtaaaattatcaacttaaaaattttacagagtatgacccagatgaataaaaaatgaaaagttaagaattctgtttaaattcatgttgacagttctaattcaatctctcaattcctaggtcattttttttttgatagtcatacacattttatctcaatttgtaaaagtctttagtattattcaacagggagatgtttaataatttatttttaaatagttaatgttaattacctgtattaactaacagcataaaagctaataatccactaatctttcctatttgtttttacgagtgtctctttcgaagtttttttttttttttttgagacggagtcttgctctgtcacccagactggagtgcagtggcccaatctcagctcactgcagcctccgcctcccgggttccggcgattctcctgcctcagcctcctgggtagctgggattacaggcatgtgccaccaccatacccaattagtttttgtattcttagtagagatggggtttcaccacgatggccaggctggtctcaaacttctgacctcaggtggtccgcctaccttggcctcccaaagtgccaggattacaggtgtgagccaccacacccggccacttctgaagttctaagaattcataagacttgtaatcaaaatcatgaatcatggttatgaatttacagttttaaatacttagaataaaaccagaaattattttttctcacttcaagtcaatttaccaatgccatcctgccaccctgcataactagagcagtagaacttcacaaatttcttttttcttttttttgagacagggtctcgttctgtcacccaggctggactgcagtagcatgatctctcaacgtgcagtggtgtgatcttgactcactgcaacctccacctcctgggctcaagtaatctaacagcctcagccaaccaaagtgctaggattacaggtgtgagccactgtgcctggcccagcaaatttctatacaggaccagagagtaaatattttagggtctatatttggggctctataatttctgtccaactctgctagtgtagaaggaaagcagaatagacaacatgaaaacaacatgtttgtgttccaacaaaaaaaggacaaaaacaagtttttggcctataggtcaaaatttgctgacccctagtctggaccaaaacaatgcaccagtccaaagaaaactacattttttcagaaagccctcccaggatggcagagaggaaaataaaatgaatttcaaagtgactcactgttaagctacctgtaaagttaggtacacacatacaaaaaaatttctggccaagtattattttgaaaaagtacttaggtcacttaaaatgtgaataatccaaccacaatgattaaaattcatcagctacccattactttataccttggaatagggtttcttgactttagtactactgacacactgttatgacaaccacaagtatctccagacactttccaatgtcccctttgggggcaaaatcatgccagttgagaaccactgcccaagaacaatgtctgcactttggcctatctttaaagtctttattttttcatgtttataattctagaatatccaactttcatttaacatcagtttaaatactttacatgttactacacaatgactgttttaatgcccacctatggagatgcattacagtattataaaaccacaattttcccatggctactagaaatctatattatttacaatatagctgttagaaaacatttgaaattacttccttaagacacatctatcaaattaaaaactcatgcactgggtcactgactattttaatgattcaatcataattctaatacagagtgtcttccaaaatagcagcaaccacactactggccatttgtgactcttagtttctctgtatcctttagctagaatgagctcattctagctcatgcttcactgttgtctccaattactactgaggctacctgtaaatatattattacactttatttctcaaaatagtgaaatcacaatgttattcaaagagctaagttatccatttataaggcaagaggaaaaaagtttctgaaataaaatctactctaagcaatttttatccagccactggtatttactagcaggctggctcttctaatatttacactggtatcatgtggtagcattctttgtgaataatgggttatcaaagaggtgattccaggatgtgttgtgagggaaagtgataccaatggctaaacagttcaccttctctgaaatgattaaaagaacaagaatataacccacatatgaataagaacaaatttataatataagccttgttacatgagcagatttcaaaagtttaagaagagaattacgagtaattaataataatcttcaatgcttacatttttctttttttacccaaatttagtcgaattttagcaactttgggatataaaccagcacagatgacagctttaattatcttctcattatctatggggggtgagaaggtagaggggaaaagaaaagtaaaatactgatacaatagacaaaagatacttatttacactgtgtttcctgctgtacctgaatttatattagattctggatctttaggatttctactgcttacaaatccagctccaagaagatgctcagcaaactgtcctttcatgttatgcagcatctagggagcaatggtaacaaatagaactagaatacctttcacacattgaggctataaaccatacactaatagataaattgagttgtaagctatccctgctttatgaaaacactttagcaaacatgttttaaagcaagggttggcaaactacaaaagctgtttttgtcaataacattttattggaacacagccacacccattcatctacatttggttgtttttgcactacaatggcagaggtcaatgcttgtaactgagatcttatggcctgtaagcctaaaatattacccgacttttcacagaaaaagtttgcatgttgtaaggaatagccactgatgtttaaggattactctattttgtgaaagactaatagaatttttaaaattactttccacccccattttttaaaaaatatagaaaagcataaagaaaataatccacatccatatttctattactgagaattaaatatggttaaaaatggcaggtaagcttaaggttttgttttttttttaaataatgatacatggcttattacaaagcattcaagtaacatagaaaagtacttcccttgcctcaatactcagtcttctaaataaataagattgcagacacccattaagtatatatactgatagaagaaatgcatcctaataacagaatcatagtatagaaattctttataaaacaattaactttagtacaatttaaagaaaagttaaatagaaaggaaagtgaatgaccagatgaatcttgtattttcataacagaaatatttcctaaggaattccttttagagattatgaaacataaagttggttatatttaagtatatatcccttttatgaaaggtgtgactttccccacctaatttttctgacacctgactttcttagacacctcctggtttttactgccattattttatactgttcaggataataatctttacattctattttgcatgtgtaattcctaacaccattttgttattagctctatatttaaatacttctaatgtatatacaccagctgattaagcatgcactctccattcctgaaatctccactgtgattccccttttaactaacagcatttcaccgtcaatgggcttttcaagaagagctcaggggtacagtatttcttgaatgcctgttgtttttctttacacctgaattcatcctgactggacatgacattctcaaacacttggattcagttatgttttcatgcttctgttcacttctctgttcatttcattatttccatttcaaaacgtgttcttacatacatctcaaaataaacgttcaattacacaggatttgtatgcagacactaatgtctactgttctcataatggatgagtcctgtcttcctgtctttaagattttacttattgctttaatttttgtctttttcaggtacctccataaactgtgattacttcaagcttttttcctatggcaataacttgtttttaaggggtgtccattctgttccttgtgatttcttttgatcttcaatttgttttcttagctcaggtgtcttttcattcactctactgtttattttctaacctatgttttgctgaattcatattcttattagctattccatattatgaaacagtttaaaggtgttttctactgaaacatggcattccactcttttttttttcttttcctttccttccgaattgtggtgatcctttttttccattttgctaatgactgggcacttctgatttggtatgttagatttttttgtttactaatttgtagatctgttaaatgtccagtatcaggcctcatgtcacatagctggagtgtatgtgtactgggagaagatgaggatatttctattctcactggcttcgaatacccagttcagtgtagtctgaaatgtgatggcatatgccctctttactgttttcttctgttttacaaatgcttgcctgtggtgtttcactatactaaaccagaaaacttacagatatctatcctatttgatacttttcaacagattttagtagtgttagcaaaaattctcagtttgaatcatcaaaatagcaactagaatgtggggacaggaacagaaatcgaaccctactgtgccttgctcttatcctctggaaccatgtttcttttccttgttttgttgcagttgatttcagaaagatcccccattactttgtgtatatatacaaatatactcaatttccatatatttgacttttttgctatagatctaattgtacaaaatggatgtatatattctctaatctagcatatatgataattactgcaaaacattcaccattacctgcagtgtgtttgaagacagaaaatattcccagcaatagtccttttcgtatctgaaaccacgtcgcctagcctcttcccagccctatggggcaaagaaatgaagaaatctatatttctcccgcaaacaaagattactactggtttccctctttactttagtaaaagcttaatattctactaatatttaattttctttgtaaaaaattcaaagaattttataactgataaaactaaaaacacatacactccccatgatcctagtccttaagagacaaccaccactgaagttccagacctttatacaattaagtatatagtaatatattaattatgtaacaaccactcttcgttttacacaaaaggcatcccaaactgtacataatacacttttcaaaaagaaccactattaaactgcacttaaatgctattatatattttcaaattcacagattttctttatagtttgcttttttttttaagaggagggaaatggggaaaaaggaaagacaagctgaataagctcaaagacaaaaaaacattttttttcccataatatgtcacatgaaacagaatgtagagccacagaaaaaagatactgcctctaaaaaccaaattacatttaaattttaccaagataggtgataaatgtttaccctcagatacacgtggcttttgggagcagaaaatgtctctttaatctgaattatgtacatgattatgatcctctattacatgttaaatctgaatacagggtagtttattaatgaatagaaagagactgtcattagcgttaataagccaaagatacaaagaaattattaaatacaaaattttaaaataaactattcacttgttcattcttaccagaaactattatttccccaaaacggtaaatgtaatgaactattacaaaattaaaaatgaattataacttttttcaaatgttcagctaaatttcaacattctcagtaatttactcctgatacctatgataatatagattttggttttttggtttttttgagattgagtctcactccatcgcccaggctgaagtgcagtggcatgatttcagctcactgcaaccaccgcgccccggagttcaagcaattctcctgcctcagcctcctgagtagctgggattacaaatgcccaccaccacacacagctaatttttgtatttgtagtagagacagggtttcgccatgttggccagcctggtctcaaactcctgacttcaggtgatacacctgcctcagcctcccaaagtgctatgattacaggcatgagccaccgcgcccggccttataacagagatttcaaaaggttaaatatgatccttattctattattagcatttcatttgaataaactatcataatccaggacaaaattttttttttttacctcaaacgcattcacaactgttaagtgatcacttctagtatcctttgccaattcctttcttcttgcatctgcaatcttttcttttcccttaaaaatagcagacatagccaatttaaattgctctgatgctataatggagaatgacattctaataaaacgctaatgaaaaatatatctaagcaactcctgttcacatctaaaataactcggttttatttccatttttcttaccagtggaatgacaaatggatctttgaaactgagactagcagcaatagtgagtactgggtctaagcagcagaacagtgctccaaaaagaatcatttttccaatatgtggctcaacgggtaatcgtgccaagtggactccaagaggtgtcaattcttcttgtttatccaaagcgttctgtaaaggaagagtgtgtgtttaaaatagatcctgtaaagcattacatttaaaacgattttagcttgctttaaaaagagtaacaagccactactctctcttctaagtccaaatgcccaaatattgttcagctttagttttccctaccaaaacataagttgtgaggtcagcaaaggttacaaacttatttaaacataaccaaaattaacacacaacttggcttttctgtgttgagagaaataccagaaatgacaaactttctgttaaataaagtcacctaataaagtataaaagttgtagaaacaaacaacaaaaacaaaagatacactattatacatctggaatacataatgcacactctctagattctagtagtttaggtgacgcgagacagaaaagcaaaagaaaaaggaactatctaaaaccacagaaaatgggagtgacttctgctctgattccctaggtcatctggtccaaccaccccactgtggacagctagaaaagtagcctgaagatacaaggagttaacaaagaattgtaaatcaagaggttagggaatgagagacatctatgggaggtgagtgcagaggttggggcctcttttcctggcagaaaggaacataaaaccttgctgaaaaaaagctaccctcatcccaagcttcaaatttttatctataaagaattttgtaaacagaatttccagtgcacaattaaaataactaggcatatagatgcaaacaagaaataataataaaagaacccataagcatcccatcagacacagatttttactaaacagttttggagaaaatacacttaatttttttttttttaaaagacctctttcaaataaaagaaaatgtaaaaccctcaacttgttttgtgaaccaagaatagcttgatatctaaatcttacaaggacatctagaagaaaactaaataaacttacatatgaaaatcacaaaacaaaataatggcaaattgaatgctggcaagttaggtttactctaaaaagaaaaatttgtttaatatttgaaacatcagtttaactgaatacatgaaccaactaaaatagtcataccataatctcatcagaagcagaagatatttgataaaactgattatccatacaagataaaaatgtcttagtaaacttaacgtaataagagcttccacacaccaaaaaaaaaaaaaaacaaaaaaaaaaaaacaccaacaaacactttactctcaatgacttgctgatagcttctcctttaagaagaataagacaagaaggcacactatcatatcacttctgctcaacattgtattaagggtcccagaaacttaaaaaagaataaataaaactctaattatttaaagatgtgataatatatgcagaaaaaaatctacatgaagttatttgaataaggggactttacagcattaatgaatacaatcattcaaaaagcaactttatttctgtattatcagactcgaaagatgatgaaatatttaaaagcagaatccaaaaataccactaacctagaagattaggggtatttttggattctgcttttaaatatttgaaatctaaattttaaaaaatctaaataaagacatataaaaccccaaagaaaactctaaaatactgagactgaatacccaaataaacagaggaatagatgatgatctttttgctaagactcaatactgtaaagatgtcagttctccccaaactgatttatagatggaattcaatcaaaatcaaactccaaagattctcaaatgtatttggaaaaacaaatcaccaagaaagaccaagacactctgttttaaaaaaatttactattattattttttttttaagagatagggtcttgttctgtcatctgggttggagtgcagtggtgcaagcacagctcactgtgtccctcaaactcctgggctcaagcagtcctcccacctcagtctctagagtcaagacgtttttgaagaagaatgaaagggagtgatttgttccactagaaaacaagatttatcataaagctagagtaattaaggcaatgtgataccagctcaggagagaaatacaggccaacagatgagaaataagcctagaaacagacacacaaatccacagacattgacctatcaaagactgcagaacaaggacaaaaagagatgaacttttctataaatggtgctcagtcaatgctctacatttatttataaaaacttttatttctacctcaaccccaacacacatcaactgcagatgcattataaacaaaacagtaaattttttttaaatgtatctttatgacctcaggaaaagacttattaaagtgtaaaaagcaataacctttgagaatgatacatcttactgcattaaaattaggaatttagactgggagtggtggctcatgcctatgatcccagcactttgggaggctgaggtgtgcggatcacttgaggtcaggagttccagaccagcctggtcaacatggtgaaaccccatctctacgaaaaatacaaaaattagccagacatggtggcaggtgcctgtaatcccagcaggaggctgaggcaggagaatcgcttgaatctgggaggtggaggttgcaggctgcagtgagccgagatcatgccactgcactccatccaacctgcgtgacagagtgagactctctccaaaaataaaataaaataaaataaaataaggaatttatcaaggtattaaaaaaaggaaagttgaaaacagatatgcaatatacaaccaataaaaagcgcagatcaagagtacaaaaggactgtatgatctgcaacctaacagaagacactagcaatttatgagagactacacaaatggataataaacataaaagctgctgaaaacttcaatgacagtcatagaaatgcaaattaaaaccactacatacctaccagcatggttagaataaaaggccaattaataagaaaggttggtgaagctacaaagcaatgggaactctcatccaccactggtaggagtttaagtggtttgcaaccatggaaaactgttgggcgttatctacccaacttgatcatacatgtaccttataacccaggacgtggaggttgcagtgatctgagatcatgccagtatactccagcctgggtgacaaagtgagactctgtctcaaaaaaaaaaaaaaaaaaaaagaggaaaaagaaaaaaaaccatagctaaagcaacaatacatttgaatctcataatattaagtgaaataatccagagctctgctccctcaaagaacaaaaaaaccacacacattctgtatgggttcatgtaaagttcacaaaataggcaaaactgaactctttatgaagatgcatacttgtaaaaaccatcaaaaaaaaaaatcaagccattatagttaaagtcatgatagaggttatctatcatgattgggattaagggacagtggagtgattatgagagggtaggaagggggcttttagcatactgggaatgttcttcttgatgtaagtaattactacatagtccttcctttgtgataaatcatttagctgcatatttgttttactcgccagtaattaaagaccagtaacttaaaaatttcaaattttatgtaatcttaaatcaagcctacaataaaaaaaaatgtgcaaaaagatcctagtcttttaagaattattacgaagatatcactttataactttctaatgcctatctcataacctgatagttctaaattgatagtcaaatagccaatcaaatttggcattggacattattggtctactttgcagtaatgagagtaaacattataattaactggtttacatgctgtagtattctaagttagaattaaaaaaacaagaaaacaaatttaccagctccatcaggtgtcttatggagagtaacactgcctcatttgatggtgggtccattaatctactcagaaaataagcaattccacctagccttaaaatctaagtgggggagacaaatattattaaatacatataatattaatatattagcattacaacttagtcctacctgggctgatgactcaaagcatcaaatttatacatgactttcaagttattttaccaaaatgaattaaaattatatttgtatttctataaaaacatgtttaaagtcctatatatattactactttctaccatcaactctattaataggaaaagtagctggctaaaatctcaatgaacaagttgattacccactatcttcaaaagtagctggctaaaatctcagtgaacaagctgattactcactatcttcaaaacaagtctaactatatcaaaagacacaagatactgaaataagtagtttataatgaaggataacatgttaacatgtaataacagtagctactgtttactaaacacttaccacgtgccaggcactgttctaaggattttaggaggttaatttaaacaacctgcccaatataacagaactagcttttccggggtagaagcaggattcaaacacaggcagcctgcctcctctagagcagtatataatttaaaagtgttgaatatacatttgaaggaagtttaaacacacaatttactaatgcacacatgaaataaattgtgagttaataattgtttcttggagattaatacagtactttgttctacaaaagatgttgaaaatgagatcacttccatttagtttcttcattctcccacctaatttacctttatttgtaaacaaagttcttccaaaggagttctcaaaatttctggcagttgatagtcatctagaagacttgctctaagaccattatacagatgatagcaatgaccaggttgaactcttaaaaaaaaaacaaaacaaaatgaaacaaagagggacagtcatcaatgactttttagaactgcacagaaaatactaggcagggaagtagccaatatcaatttcttacatgccacataatagctaatgtacgtaattattttttcctttttatgaatcatgtatttcttctgtttagaaaaacgttataccctctaccctcatcacagttttaagaaagatacacagtaattcctccccatgccaataatttgcttccctatttctgacagattccaaattactgtgctcagtaacagcagtctacctaggttaaggttaagaatagtaacgtcaagtatgccttgtgatcaatcttattatgtaatgaatcctggcattatgctaacctgtctatattactgaaaaacattttaagtactatatatttagtgagttttcagagggatattaaaagtttctcttttatgtatgtaactagagccatgaatgatatcattttttgaacaatgataagactagatgtaggccgggcgcgatggctcacaccagtaatcccagcactctgggacgccgaggtgggtgtatcacctaaagtcaggagtttgagaccagcctggccaacatggtgaaaccccatctgtactaaaaaataatacaaaaaattagctgggtgtggtggtgtgctcctgtagtcccagtgggaggctgaggcaggaggatcacttgaacccaggaggcagaggttgcagtgagccaagatcgtgccatgtactccagtctggtgacacagcgagacttcatctcaaaaaaaaaaaaaaaaaaactagatgtgaagaggtgaccatattcatgtattctcaagtagaagagatatttctttaggctcttgctgctataggaacaaaaatgaattctaaaaatcttagttattttttccatgagtctacatagacccactgtctattatataatatacctcaatatctctccagtagaaactaaaataagagtacctccattgaggccgggcgcggtggctcacgcctgtaatcccagcactttgggaggccgaggcgggcggatcacgaggtcaggagatcgagaccatcccgactaaaacggtgaaaccccgtctctactaaaaatacaaaaaaattagccgggcgtagtggcgggcgcctgtagtcccagctacttgggaggctgaggcaggagaatggcgtgaacccgggaggcggagcttgcagtgagccgagatcccgccactgcactccagcctgggcgacagagcgagactccgtctcaaaaaaaaaaaaaaaaaaaaaaaaaaaaagagtacctccattgaaagccacatactatagctttttctgatctccaaaataataaggtttgcagaaggaatttttatccatggagcctacaaaagactgttttccttttaaattaaaacagcaattccacagttaacctaccgcacaggagtgaggacgaaggattagtatttagctctattattgtttcatggaacaaatctaaggcttagtatgtttattattcacatataaaggtgtgccaaaacctgttcactatggtgaatactttttgaatcaatatttagaggtgatgggtctacatgggaaaacctcagtctttctgggtcccttatcaagttattccctgataactgattattaggagggtatacttctttgactaaaccacgattttggttcaatagcatcaactatctaataaactgtcttgaaatcaaattatactgggataatgtgcaaagattacagcaagtcagtcagagctttatggatattgtacaaacttaaaacgaggggttgataaatggcctgtaaagttttctttcaactctccttttcttaagtctgtatcgaaagattaatggaaatctctcattctatctgtaagaggcaaaagaaaaaccctcttctgaaaatccatatatggctcttatcactcatatgaataagtgcagaaatactgtgaaatatgcattaaagtccaattctttgtagaagttcaagacagatcatttttcctatcattaagacagagatagttttacttcttaagttattatgacattatgaggaaaagtactttccttgtgctttcattgaaaactactggtgaaaaatcagtactgctataaaattcagtgattaggagcctagcctgtgtagtcagaatgcctggattcaaatcctggctctgtaatttagaaagctatgggactttggacaagtcatttaatttccttgtaccttaatttccttatccgtaaaatggatataataacctacctcatagtactgtagtgaggattaagaaagttaatatggatcaagtgttcaggagatgatctgacactcaaaaagtattagttgctattattatcacacaatatatgctttaaaaaaatgaaaaccaactattataagtaacataacttattaatcaaacttagaaattgaaggcaaaagattcataaaatagaaaacttggcagatacttttccaaacaaactacgattagaacaactttcctatttaaaaatgttttgcaataagctcaaaataataagaaaggtaactcttttaataaatatctttaaatgccaacatcacattttgttacacaaaatttttgtgtgttctaaaagctttggacagagttcccaccttaccttccagctcgaccttttctctgtttggcattagctttactaacccactcagcggacattgtactgatattgttctgagtatcaaaatgcgtctcttttatttttcctccatctatcacataaacgacatcatctatggtaatgctgtttggaaaacagatatataaaatgttaaaacacacacacacacacacacacacacacacacacatcgaaagcactattaacctataaaagaccaataaataggtatttcagagcattttttttttattacatcaaatgattttagccattcaggattttcactactcttcacacccacattaccaatattatagggatcgagtacctaacagtaggcagtgtcaggcactgtaagtgacagcacagtattagttcttcagatcatatactaaattcttacttgcctacagtcaaatatcacaggttgcctcatacctagcactatgggagccccaacagcatggtttaatatcagcttccagaaaagaatctgtttcagtgactaaactacatcttagtacctccaagagaatacaagaacatttaaaggctggatataactaattaccaaatactacccccaaccagaaacaggcgaaaggacaaaatttacctcagctcccacgcttctttaggaaaacaaaacaaacaaaaaccaacacctaaaatgctatttctgagctaaagcattactataggttaaaaaacccccacaaaactggccatgcatggtggcttaggcctgtcatcccagcactttgggaggttgaggtaataggatcattttgagcccaggagttagagatcagcctgggcaacatagtgagactccatctctacaagaaatttaaaaaatcagacaggtgtggtggcacaagcctgtagtacaagctacttgggaggctgaggtggaaggctcacttgagctgaggagatcaaggctgcagtgagccatgatcgtgccactgcactgcagcatgggtgacagaatgagaccttgtctcaaaaaagcccacaaaaaataaaactatgctcactgccataaaaaaggttttatttttaataaattacaaggtatatggtagagaaaaaagattaaggtatataaacacgttatggtgtttaaaacttatgtaatcatcagtatttgatatttaaaactatttttacctagtctccgcaatgttggtagcaattactattttccgaacaccaggaggggttcttttaaacacctgtaaaaataaatacatcagaatcacaaaagtacactaacttctaatacattatatttgtaattagaggaattacctcagatactgttcatttttagcattctatgttcattcactgacatatacatctaatatttatcgatgtatttatgaagtacagatcattttcaatattacaaaattatcttttggtaaaccacattaaatctcccacagatgtcacaatcttatcacaaacaagatttccaatgaggtatcattatttaaatttacagcagttttttaacaaaagctggaggttataaagtagagggagggatatttctgttaggacaagaataatgaagtcaagtctccatgggtaagaacactgaataatcaggcagatgcccaacccagcagaacaaatgtcaactgtgcagctgtaccaaccactgtctactagcttgagatcagattggagtgaaaaaaaaaaatcctctttaaatggagaattctacaaatactgccccacaacccgacaatgtcactaaagtagaaagaagataggtaatcaagtaccactggcgataatgcaaacaaacaaaaagcaaaaacttatcccttcatttacaaaactggtagtcaatacagaaaatgtttcccaggctattcacatactctccagcaaaggaatacataatttactaggttatggtgtggaagatgaatacttccatgctggatactctttcagtctttggaatcaagagttttctttcttgccccctctcttctctcaagtatgtactctgtatctaattcatgactaaggtaccagcaacaaaaatattaaaagggtctcaaagaaaagtatcttgatattttcttataaaaagagaaaaggataaactagaaatggggggaggagcaggttttctaatcaatttcattttgcaagagcctgcaaatactgtagatcataacattatcctgcctctgagaatgtagtgttcactctaattaggaaagcacctgtatctgatggagccaaacattcataatacattattaaaacagaaattttatacctgtgaatatactagctttgtgaaattaaatctcaaatcatcatcaaactgtagtatgtcacagatcattaatttctaggtttggttacttttagtagtactcacagacctttttctcttactcaggaaactcaacgaagttactggtgaaaccaattctttaaactttttcctaatgtagacaaaactaatctgatttgtgggttatctgctgatattcaagtttttgagcaatcatcccctgaagactcatttgcaaaggttctcaaagaagtatttttttacatgaattactatttgaaaatactccttaaaaaaaataaaggaaaacacgtaacaagcagtccttaaagcttgcctcagtttgaaatacatttaacaaatgtatccatttaacatacctgtgtctggttaactgtaggcatcagtgaatgtaaaggtataattaaaaatttatctgaaaattaaagagaattaaattttaagataaagagttgcagaaaagctccatcaaacacatatgagacaatgaattcagaagctgaaccactcaattctttttttgataagacattgaacattatttaatgaaaacagctaaaccatctgagttgacaaactgcccatgtgtttaagtgaaccaaaaattctttatttttatttctacatacaaacagaccaacttaatttctttatagtcttgttttctgagcgctccaagttcaagctaacattttgttctgttagtttatttcatattgataagtattttccccaaattcttaaagaatgctcaaaagttgggagttatcttttcaaattacaccaataaaaactgaatgaataggcaacaattctgtttaacatgaatacgtttgtacactttgggtgatcctatttttttgttgttcagtcagggtctcattctgttgcccgttgctgtggtgtgatctctgctcactgcaacctctgccccctgggctcaagtgatcctcccacctcagcctcccgagtagctgagaccacaggcatgcacaaccatgtttggctaatttttgtattttttgtagagatggggatttgccatgttgcccaggctggtcttgaactcccaagctcaagcaatccacccacctcagccttccgaagtactgggattacagattacaggcatgagccctgcacctggcaatcctcactattttaatcaaaccgataatatctaaatttttagagcaaattacttattaaatacccatgtcctagttagaaaataatgaaatagtccttgttaaaaataatacattccaggccaggcgcggtggctcatgcctgtaatcccagcactttgggaggccgaggcgggcggatcacgaggtcaggagatcaagaccatcctggctaacacggtgaaaccccgtctatactaaaaatacaaaaacttagctgggcgtgttggcgggcgcctgtagtcccagctacctgggaggctgaggcaggagaatggcgtgaacctgggaggcggagcttgcagtgagccgagatcgcgccactgcactccagcctaggcgacagagcgagactccgtctcaaaaataataataataataataataatacattccaaaagtgacccacattttacacatattttgttaaaaatataagaaattcctactttttaagtttccaaatgaaatagctcaagcccattcacaattattagccaacacagaaagtctggtgtaatacagtgatgggtgaaagggagagtatcaagaaagcaagagttaatttcacatttaactatgcttacaaaaatacaatctgacttaaatgcccaaatgattcaagtcagctatacttccccagaaaagaactgttgttatctaaaggatatgatgatccccatggactctgactgtgaagagattttacgaatcttaaaaataaaaagtagtgaacagctgccaagcaactgatgttgctaaaaaagaatcctctgaattacttgtctctgtgacagtatgaaatattacaactataatattcaagccaaaaatacttgaattgaatcaagctttcagatataactttcgagttacaggaaataaaggtaagagagaatcaaatgaaatgatagcataaagagtcacacaaattcagaaagttggacttattagagaacaaatggcctggtcttttccatgactttacattaccatgaggaaaagcagggagtggaggggagcaatgttctagagctagatcaaaagatgttgacactttctatagtttgaacaggctagttgtgaaagacacttttcagaaaaatgggaaaatctgattacagactggattatcagatggtattaaggattaggtatgataaagacatgatggttatatagaaaattgcctttagagattcttgcttatacatttagaaatgaaatgtgacagctgcaattgactttaagaaaaaactaggactgaaaaaataattgttggcactgaagtcgtggattcattaagattctctagttttggctgggtgcagtggctcacgcccgcaatcccagcactttgagaggccaaggcaggtggattacaaggtcaggagttcaagaccaacctggctaagatggtgaaaccctgtctctactaaaaatacaaaaattacccaggtgtggtgatgggtgcctataatcccagctactcgggaggctgaggcagggaactgcttgaacctgggaggcggaggttgcagtgagctgagatcgtgccactgcactccagcctgggaaacagagcgagactccacctcaaaaaaaaaaaaaaagtctctagtttttttgtatatttaaaatgtttcattataaaaagtttaaaagttagccagggataataaaagtaaaaacaattctgttgaagactatataattgggaaaaaaaatttatattgttgacaccatacaactaagagagttaatgagaacaaaatctatactcttatgaaaagaaaaaaacaagaaattgataagcatttaataaactgagtttcaaaactcaatttctcagcacagagttaggccaattttctccccatgatagtggttaactatacaactgattatcaaggctaaatttttttcaacataatttgagaaaaaacactcaagttctggaaagatttcctttaaaaggaattgagctggtagtggaagtgtatacattagcaactctttccttgagaataattaattcaaactagaaagttaacgaagtcaattataataatctataatatacccttttcccactctccatcacatacactaaatgataacgttatattttggtatatatcttatcttcattggtaaatatatgcacacacattttttaaaattataagtacactatacaataatgtttataataatgggggaaggaaaggccagagttagatttagccaataaaaaaattctagttgtttgaaaaattcagctgtctaatcatgacaaatttttctataaagttatcacacaaaaagaaaacagaaagcagtatttctttatagagaagtcaattagatcaaaatactttgcaagctagatagtaaataattttaattacagagaatgctttcagagcataacaggatttaacaaataataaatatatacatttattattttagtcaatacaattagatcaaaatattttctagtgcctataaattttgtctggctgggcgtggtggctcatgcctgtaatcccagcacttgggaggccgaggcaggcagatcacaaggtcaggagatcaagaccatcctggcttacacagtaaaaccctgtctctactaaaaatacaaaaaattaggcgggcgtggtggcaggtgcctgcagtcccagctactcaggaggcagggcaggagaatctcatgaacctggaaggtggaggttgcagtgagccgagatcgcaccactgcactccagcctgggcaagagagtgagatgctgtttcaaaaataaattaataaataaataattaattttgtcaaaagcacttcaacagagtagggttagaaattatattcagaggccacacgtggtggctcaagcctgtaatcccagcactttggaaagctgagatgggaggatcacttcaggtctggagttcgagaccagcctggtcaacatagtgaaaccccatctctactaaaaatgcagaaagtcagccgggcatggtgtcacatgcctgtaatcccagctactctggagactgaggcaggagaactgcttgaacaaaggaggcggaggttgcagtgagccgagatggcatcactgcactccaacctggcaacagagcgagactccatctcaaaataaaaaaattatattcagaactgtaaaaattaaatagaattttctttgtagtttttatatttgaagttaatgattgctgaaaatactctaaattttatagaaaaaaaggttctcattcatttctctagagtttatatgtttcaaaatatgctgttcatacaggatcaaaatcacttgaggaatttttaacaacttcagatgttcaggtcgcattcttagatttggggtgatgatggggtctaggtatctgaatcttaaagaagctccatgggtgactctgttgtatactcagaattcagaaacactgggccaagggatttcttttttgcagcagtaagtgaaaaaatgaaaaacctcacatacctatgctttaagagccaattttattaggcaaattgtgaaaaagaaagaaaatattctcttcataatactaaataaaaagcttcaccttcatctgtgacctagtagaagcaacacttctttgaataaaagaaaaaaatacacatcatatataattcaaataccactctttgaattacagtaaaatacatttacatagtacttgatttaaacattacttgtgacatcaagagatcatgtaaagtgctgatattgtcccagcctggcagaaagaccagtatcgcaccatcctatatgaaggggaaataaccattacaaaggatcacatcaacaaaatgcagtaacagtaaaattgtgtgcacactgaagtctccattaaaattatactagctcaggataattttcgttaataattaaaagtatataagctttttttttttaattattgtttttgagagagtcttgctctgtcacccaggatggagtacaatggcatgatctcggatcactgcagcatctgcctcctgggttcaagtgattctcatgctcggcctcccaagtagctgggattacaggcctgtgtcaccacgcccagcaaatttttgtatttttagtagagacagggttttgccacattggccaggctggtctcgaactcctggcctcaagtgatccacctgccttggcctcccagagtgctgggattacaggcatgagccactgcatccagctaagctcacttttaaaaaatgagatttataatccatatatttgtttagtcttttcttcaaacaggtcaaatgcctaaatcttttgctactatgagatgatttctagtatcaaaagtaatttcttccagtctatttcataagcatttaagaaaactgtatttttcatggccttgatacgttaataaaattaaaattatgttaactgaagaaagaaaaataaaactaacctcttcttccaaaacaatgtatcggatgagggcaacaatcaaattcagatcaactttatcatcctccatcatttctataacatctacagtacttgcagaatacctatcaaagttaaacacaaagtcatgaaatacttaatcaagttttctgttaacttgctacaaaagcttaaaattaactcaatctgcaaatggaggaacataatctacagatcggagagaattactggggtaattactgcttaaaagtcaaatcagcacaatatttagctcgaataagagactcacaatgctctcctttaagtacgtacagattcaagaagatgcccccagcctctggctttttgttttatttagccactgatttctcaccttcagacaaaataaacttaccttcttcgcagttcccttacataatctggccaacgttctttatatattgcttctttttcttctttttcttgtctatttacatgcccttgcatgaaacccctcttaaactggcatctgtgttctttttgttctggaacatacctaaaataaaaacattcttgaatatcttcacttttttgaaactctagttttagctaaaatctgtgacattttatatttaggattttcaaaaaggattccaaagaacattttcattatgctttcaagtgaatgctagctaaaatatcagtttgtgttcattaacttataaaacctgatattttggataaaaatcattcttctttattgaagtatataaacctatagatcatttttagtcaaaaatttagaaaaagactaaagtaagtaacttttaccttctattttaagtttgctttagaacaaaagttaatattaatgttaagtccaaacctgactgcacgtaagaattgaatccctcagagagcttgtaaaatacagactcctaaatcccatccctgatgatttggatttggtaggtatgccttgggtctgttaatctaagaattttaattagtgcctgcaggagattcagatagtgtatccagatctacagacccacgctagagaactatttaattctgctcagtcacacagttgtagttaatggcagatccagaatcagtattcaagtctctcatatgtcaattgagtgctgtactatgattctactaccatcctgtagtgattgctaaaaccatagagggcgcatctggacaataattctacctatcattgtcagtcctgagaggcacgaggtgggaaaagacaaaaatgaacccacactttaaccccaaggcatctctgagctcaactagaggacagcatctagatggaatgggggaggggctggagcatggactcccaagtcagaatatccctcctctgctactgactagctgtgtaaccttagacaaggcattaaacatctggcctttagttatcttatttgagagattaatgtttgtaacagtactggcatgagatttttaaaaatgtgataaagtaaaaaaaaaaaaaaaagtgataaagcctcatgtatagcacaaagagtgcttccctaagagtgaagaacatagtaccaaaagaggaactattgtattagcacaggagagatagtaaggaccttagcaaagaaataaaaatgagaaggcatgttcaagaagaaagttcccagagtttgtgtgtgtttgaaggcagtacaaaatgacttggattaacttggttactcactgtgtaaaacagttgccataccctggtacataactgcctgatacacactaactttttgatttataggtcagaaaactaagtggaggataattattaaccattataaagtatgctgggcaagacacattgttttatttttttggtgggagaatataagataatgatttaggcttgagaaatgttaggttcaaggcatctgtggtactagaatactattgagcagaaagccagttcgaaggtcaggagaagcttcagttctgaagctacactactgaaagctgtgaaaatacagaactacagttagggatataaacaggtttgcacagtgaaaacataaatgattgagaagactgggggaaattatatttaaaggttcggcaatggaagccaacaaaggaaagtgaaaatcaggcaggagaaccagcaaaagggttcaaacactaaagacaaaggttcccaaactttgctgcccaggaatcttcaaaaaacactgacaccagccaggcgtggtggctcacacctgtaataccaggactttgggatgctgaggcaggcaaatcacttgaggtcaggagtttgagaccagcctggccaacacggtgaaactagtttctactaaaaatacaaaaattagctgggcatggtggcacacacctgtaatcccagttacttgggaggctgaggtgggagaatcacttcaacctggaaggcggaggttgccgtgagcggagatagctccactgcactctaggctaggcgacagagagagactctgtctcaattaaaaaaaaccacggatgcctggctactacctcagacactgtaatgtaatttaggtagggagtataaatcaggcatctggattttaaaaagctccaggcaattttaatgtgcagccaagtgtggctaattcccagaaaaatgttttacaaggaaatagtcaatgatgggtttctgagactaaagtttgacatgaaaaaagtgatatattagtactttttaatgttttttatttcctaatgtttacttaccttattttttcaattacatcttccaaaagatattccacaaccggaaaggtaaaaccaggtatatgtatcattggacagttacctattacggcagacaaaatataagcataaatttgtactcaaatgttaaaaacattaatatactgtaaataggacaatgactctattacttactattaattccagaaaatggtcctgtagcttttacaattctaccctacttttccacacctactttaataaaaaacagcagtctagtcttcactcaataccattttactgctaccaaactgtacacacatctcacagttctacaaaataacacagaatatcaaagaatagagttttaagttgaactcaaaatccattagttagaagtctattttctcttcatcattaacccagatggtgccataatagaatatccagaatatcaaagttttactgaattctagataagcattactacttgtagcacccggaattagcggagaaaggtaatcaaaacaaaacctaaacaaatagattgttactatttcaaaattactaataaaaaaatcacttcggtactgttatttaaatgctctttacatttcataacaagcgaaacaagcagtacacactgtaaaaagcaaacatcacatcagaggtcaaaatacctaagtaggtatcactgctctacccatgatgtgcacacatttgagcaaagtactcaatgttagttctagaagtctcatttaaaaataacaataataacacctaccccaactaatcttacatggttttcagtattaactgggatgtattttaaaggacttttaaaaagctgatgacaagaacatttattaaacataaatatattacattgtaattccctccctttccccctccttccttcacaagtataagcaggaaagacagtgaggattaattttaaaagaatgtgcttttgcagctggtccaatctagcttcagcttgggaaacctacttaactgctgtgaggctgctttctcatctgtaaaaatgtgaatgataatagcaactacctcataaagtgttataaagactaaggaagacaaagtggcaaatatactacctggaacattgaaggtgttccataagtggtcactagcagtattagcagcaaactgccaccctaacctgtgataaaagccacagaaaaacaacagaaagaagtttataaaattatgcaaatctgtggtttgacttcaatgatgccatcttaattgtgtggtggtagcaacaagaagctacctgtcctcactatgagagatgatgccaccatttaaaaatagacccaattgtctaatccatgaaactggagggtagaataatattaaaataaaattaacagctaaacattcattttgactactctttacctagtaccatattaatttttttaattgtttttctagtaccttttctaatgtaataactatacattttactcaccaaaatattctgaaaacttttctgcattcaatgttgcactcatcaatattactttcaagtcagatcgaaaattgagaaggtctttaacaacagtcattaaaacatctgactgcagatttctttcatggatttcatcaagtacgatatgactaacactggacaaatacctaaggcagaagtgtgaagtacaaaattttaaaaccatttttctttaacaactagtaaaatccaatttaataattacatcttttgataacacttatatttccttaattgaaacatactcacgggtctgactggagccactgaaggatgattcctgttgtacagtataagatagaaccctgtttccttggcaaccgactgtgaatgaaagacatgaattaataagccttggttttctcttctaataattaactaccacaaaggtttatatcttcaattttagaaatgctttcagttttaatgaaaatcttcacacttaattttttacttataagaacacctaccacaatggggtaatgggaaatacttcaagttcattatacattatctttgttgtcattgatataatgttaatttcttttaaaagatacgaccattcacattcagacaacaactgaattacttatggggcctaaatatttggttcgtaattggaaagctcatttgaaaaggcaaatgtgtcaggcatggtggctcaggcttgtaatcccaacactttgaggccaagatgggagggttgcttgagcccaggagctcaagaccagcctgggcaacacagcgagatccaggctcgaaaagtaaaaaaattagccagttgtggtggtgtccgccggtaggcccagctacttgagaggctgaggtgggaggactgcttgagcacaggagtcttcggctgcagtgagttgactgcaccactgcacttcagccagagcaacagagtgagaacctatctctaaaaaacattaagtaaattaaaacataaaaaggcaaatggagtcctaagctccagaaaaggaccaactatgtactgcacagtggagttggatagggggttaagatatcaaaatcaataaaaagtcagtcggaagtatatggaggtggtactgaaaggtctacacaatcttttcagagagagtaatggtctactaatctatgtccaggaaaaatgtttatttttctaatcattccaaatataaaagcatcatttaaaaaaggcaatacaagtctgatgtggggttaaaagataaatttgtggcagcaagtcatctacgctgcagttactttaaatggtaattgtaatagtaataaccatcataaaaatggggaaaatatcctttcttttgaatctccagcttcaaagtttcactaaaatctgcctgtatataagaagtgaacatttcttacctctggagacgaatttgatatccagtactattaccactgccacaagattctgccctttctgcagctactctttccgcaacctttaattcaaataaaacataaagagaatataatttcctttagaacaaatatcctgaatgtccatgaaaatctaggactgctgaaaaattgttcttcagatttctaaatgagttaaaaaaatagatattaaaatctgaggtatctaaaacagtgtgtgcctctcttaagagctgtttatttttcatttcctcttataaagtcttttaaggccaagttctctcatcactagtttcaaagtgcctttctatagcatcctctcattaatttatacttttctggtcttttctaagagttgtaaatcaagatctaaacttgtagaagttatgtgtaatttgaaagtaattacatattgatactcttcccttgtgtttttgtttgtggtagggactggtgttgaatttctagttcttggtcatgttttgaaagttatgactgccaaaaataagatttggaaagatgaaatgttataatctaatactgatttgtacaactaaaagtaaccaacagttattctgtgacagaacagtgataataaggtattagaaatagaaaatggcataatttgtaagaaataatactttacaagtaaaactttccaataagtatatctagtatacactgacagaccacattaacctgtctactcaaattccaacagatggtggaaaaaagaagagaaaaattacctacttagcatttcttcctactatcagcatatacagtaactgctatatattagtgaaaatatttaagtctagctacaaaagtgtgttatgacaaaagtggtttatttttcaccattctgtaattttatgcaatttcctggaatatagtccccataaaagggtgaagactacctgaaactgaaactactagaagaaaacctagggaaaaactcctttggacattggtctaggcaaagaatttatgactaagacctcaaaagcacaggcgacaaaaataaaaatagacaaatgggaattaactaagaagtttctacacaacaaaagaaataatcaacagagtaaacagataatttccagaacggaagaaaatatgtgcaaactattcatccagcagtggacaaatacccagtatatacaagaaactcaaacaacaacaataaaagacaaatcatccccttaaaaggagggcaaaagacaagaacagacatttttcaaaagaagatatacaaatgactaacaggtatatgaaaaatgcacaacatcactaatcatcagagaaatgcaaattaaaaccacaatgagatatcatcttaccccagtcaaaatggctactattaaagagtcaaaaaataatagatcttggccaggacatggataaaagagaactcttacatactgttggtaggaatgcaaattagcacagcctctatagaaaacagtatggagattgctcaaagaactaaaaatagagctatcatttgatccagcaatcccactgctgggtttctacccaaaggaaaagaaatcaatgtgtcaaaaaaaaaaaaatacttgtcttgcatgtttatcacagtactattcataacagtaaagatacggaatcaatctaagtgctcatcaatggatgactggataaggaaaatgtggtgtatatatacaccacaatggaatactatttagctgtaagagtgaaatcatgtcgaaatagacacaaaaagacaaaatatcatatttcacataagtgggtgctaaaaaccaggtatatgtggacatagagtgtggaatggcaaacgatggagactcagaagagaagacaggaggaggacagatgatgagaaattacttaatgggtacaatgtatatgatgtgggtgatggacaacctagaagctctcacttaaccactacacaacctatgcatgtaacaaaattgcacttgtatcccataaatttacacacttctttttaaaaaggggtgaagtctactgctctttctttatagtacttcttagaaaccaaagcttaaaacatatactgtatttactgccaagtgctgtcataattggtaatgtttttaaccacagattctatattaaatgacttagacatgtgataagcagcactgccataaaaccaaagacaaacacaaatctttataatttatacacagaattatatagcataaataaattcactatgcacactgaaatatgacaagaaaccccaaacacctttaaaaaatatataactcacatatttaactaggtcatctaactaaaaacgatgacgacaacaaaatcaatgtacaggctgagtattccttagccaaaatgatcaggaccagaagtgtttccggtttctattttggaatatttgcattatacttgcccttgttaaacatcccaaatctgaaaatccaaaatgtgaaatgctctagtgagcatttccattttgctactcaaacagttctggatttgggagcattctggatttcgtatagtcaacctgaactaaaagttacttataaactgttacttaagtatgccttcccaaaattttggacttgacaaaccagaaacaataccttatttttcctcataaatttcctcttactgagtagctgcattcaaaaatgactgactatggctggacacagagacttatgcctgtaatcccagcactccgggaggctgaagtgggcagatcgcttgagcccagtagttcgagaccagcatgggcaacatggcaaaaccccatctctacaaaaaatacaaatattagccaggtatggtagcacatgcctatagtaccacctacttggggggcggaggcaggaggatcacttgaaccctagaggttgaggctgcactgagccgtgttatcaccactgcgctccagcttaagtgacaaaataagaccctgtctcaaaaaataaataaataaatcactgactacagaaatgcagcttaaaaaaaaaaacaaggtttcccactttcaccaccattcagtgtatttacatactcaaaaaatgacagaagtaaaaaaaaaagttaaataaaccaagtagtaaaatttaaagaatcaaatgatggagattatttgaagcttgtaatcaattctataaatattttatctatttcattcttgtgaacatgtactgaaatttgcctggatatcaattttatcttgaattcataaatatctattatctgttaagagagaggttactcaattttttgggctttattattaaacatgttaagcaactatttgctttcatagtcaccaatcctaagcctaattaagaatcactccacaccttcagaatcagtaggttctagcaagattacttttaaaaagacaatttttaataagttaagagattacttactgaaatggcactaattcttcttggctgagtacaaactattctgcaagcagatccttttcctctttcaatgtagttatccaaaatgaactgagtaacttgagtggttttgccacaaccagtttcaccacttattactgttacctgatggttatcaattaaatttaccaattcctatttcaaaagggaaaataaagaatatcacatgttgactaagtctgaaaaaagatattaatcaaaattcgaccaaactgaacatagctatttttaacaaacatattaatgctttctaaattttgccatatccaatactggcagtttggatatctggatctaccaacctgcaagagataagtgcaccaaattataaagaacaaagccaaagcactgttaaagaaaaacatattgacataaacaagaagagacagcttataagttccatggagaagaattaaaataatgttgatatgtggggctactgagtacagaagcaaactcctggcctaaacaactattgaggacattacaaatttatataattcataaatatggctttgtctgcagaacaagttttgtatgccattttaggagcaaggaagagaatattgtattttaaaattacttcctttcaaataattaaaataaagtcattgaatatctaaaccaaagctatctagaaaacctcatatttgggtttcattcttcctcaaaattgtatacattaatatttttaataataatattcactgtataaacgaagtcatcttactacctcaaagggatgttaggggttattttcatgtataaaacaatttaacttgaaaacctaccttttaaaaattccccacttaggcctggcatggtggctcatgcctataatcccagcactttgggaggctgaggtaggcggatcatgaggtcaggagattgagaccatcctggccaacatggtgaaaccccatctctactaaaaacacaaaaattagctgggcgtggtgggtgcctgtaaccccagctactcgggaagctgaggcaggaggatcgcttgaacccgagagtcgggagtttgcagtaagccgagattgcgccactgcactccagcctggcaacagagcaagactccctttccaaaaaaaaaaaaaaaaaaaaaaaaaaaaaatatatatatatatatatatatatatatatatatatatatatatgtatatacatatatatatattccccacttattctaacacattatacatacatagatgtgtatatatcagaaaaagttttaagtttgaacactgaaattatagctggtaaatactcagaagtgaaatgtgattcatccaatcagaagtttatttactggaagtctttagaatgccaggcactgttctgagtcaagagacacagagtgaacaaaacaaatcctatcctcaagaacttacactggcctgggaggggaagacaaacagatgtcaggtggtaacaagtgctatgaaaagtaaaaaataaagtaaaataaaataaaataaggttgagaaaacagagaaggatgagagatcctattattctacatagggtaatcatatgttaagatatagtgtaataaattaaaattaactgtatttttagtagtactttttttgtacattgattttaattaatacaataatttgtatattatttttaactgaagtatttggtcttgacttaactgcaaggtatttatccaaactaacttataggaggaaattttactttttaaatttcaaagatttcaattatggacaaaaacaggagcaaacatgaggaaaattgtttatgaaccttttttttctttttgtccttaattcaaaagaataaaattaacttccaatactatcctgtaaaagaaagttcattaatttacattttttcttgatatagagctttaaaaaaaattgtgtatttaatttgcaaatcaaattaaatagtggaaaaaagcactttaccttttgcattccatacgaaggcagcttttctctgaaatgctgaaatttaaaaaaagttttaaattttcacagaagatatgtaatcaaattataatcatggtatttaggatacatcacagggtaaattggctagaatccgaaagtatttttattatctcatggcttgtgtaaaaacattataaagaataatttaccaattccttttatgtctgaaacattcaaaaccagaactccattacatccagcaaaatagagacaatgctttaagtcagtggcagtaaaatgaaatcggatctgtcctctaacagtattctaataattgctaaattactttcactatttttcaatatgttttatatattcatcttagatttgatttctatattatgtttttcccacccaacagtgcactatttactaatacattaagtactggagcagaatcaaaaatttcaggatatacttgcctttgagtgtaagagaaaacttaaaacaagtaatatctgcagtcagaaaatctggtactgccattttagagctgtgatctcagttaagtcaaacttaaagtatgaatgcctcaaagattttatctcatacggttgccacaagatctaaatgaaaaacctttatataaaaagcaaataccagtttctgaaacatataagctactcaatgaatttcaaatgtgttaaattacaattagaatactacaaaaggaatgactatttttcctatatttatgtgacaatttcttcctaattctgaaaacttttatggaactctatacccgtattacataaaaacatttaagaagcagtcctgtagtttacattcaactaggtacatataatgtaaaaaaaaaacttcagtggcataaaaataaagtcagctttaataaacaccctttattaagatggaaaaaatcggctgggtatggtggctcacgcctgtaatcccagcactttgggaagccgaggcaggcagatcatgaggtcaggagtttgagaccagcctggccagcaaggtgaaatcccgtctctactaaaaatacaaaaagttagctgggcatagtggcacacgcctgtagtcccagctacttgggaggttaaggcaggagaattggtggaggttgtggtgagccgagatcgtgccacggcactccagcctgggtgacagagcaagactccatctcaaaaaaaaaaaaggaaataattaaaatatatatatatatatatatatatatatatatatatatatatatatataaaataaataaagaactgtctttggtaatctagtattatattattgccatgtttgttatggtcaggtaattcttaccaataccataaaaataacagtcaatgtgaagactgaaatgaattctagtcatttaaaataacaaaagctaccacacttatcttaccttgtaataacttacttatcttgtaataatttttaaattatctaaaaactatttttaatgacataagtattaacaccccaggtagtcaaatgttaccatcttaacacataattatacacaagctatcccactgcatttcaaactggcattaatcgtatttgctttatacatgtaaatgccactggaaagagaggtatagtccaatattctttcccaaggcagccaaagtttctactttgttaacttttgaccataacgaagatgtgagataattcaactataagctctctgaggacaggaaatatcttattactcttcaaaaacagtaataagcataactggctggtgtggctcactcccataattacagaatttggggaggtggaggtaggaggattgcttgagcccaggagttcaagaccagcctgggcaacaaagcaaaaccctgtctctacaaaaaatacaaaaattaaccaggcgtactggcacatgcctgtagtgccagctactcaggaggctaaggtggaaggatcacttgagcccaggaggtcgaggctgcagtgagccatgatggcaccactgtactctagcctgggtgacagagtgagaccctgtcttaaatatatatatatacatacacgcacacatatatagcacagtaactggcatccagtaagtagaaaattaatgtttattaaagaacataaagaaaaaatattgcacatgctaaaaatgattaaaaagctgagttgttaaacacagctgaattttagatctgattctgttatgagctatgcaacctcaggtaggtcacttaaatctttttcctcatctacaacagacatgtagtctcttattcaaggttgttgagaagcttaaataatatagtacacatgaagcatttatgacaacatatgggaaataggaagaccaccaactttttaaatgttttacacatttttctttctctgaactagatcaatcacccatctttagtatatgagttctgtccatcatatacagcaaagagaaagacactaattcctcctgttaaggctgttaaagcagctcttctcaaccagaagattctcaattaattcatcctgaaatttcctccattttcaaatcacatttttacccaacaggcatcaaagagctacacaatttggccctggacaacctcagcttatctattctaatacggaaatccaactgtcatcagtaacagtcaatggatcctttctttcctattaaggaaattcagctttcatcagtgagccaagggatcctttctttcctataggaggtgctatatccttcctttatcaaagacagcagtatgtatttacatattaaagatatggccctcagagtttcctcagtaatttctcttaaacatatacatacatacatgagaccactttattacatctctagaacacccacaaatcacacaattttatgttttaactgaaagggaccttaaaatatcttgcctagcatagaaagaaaatatcagaattcaggagatctcaggtgttgtgatagtcctgtatttaaaatgttagtgaacaaagcacatcacataatttttgaaatatttaattttatcatctataaaaagaagatgtattaagtaatctggaacaagctttacaattttaactgcctttactgcacatggcacctcactaaactggcctagaaaagctgaagagtaagtttttttttcattggcactagcatttctcaaacatttcttctcaccacataagcttctgtggatgagataggatactgtaggttatgtgtaacttccattcccactgcttttctctaccattcgaaaagaaattaattcccacagggatgtcttgttgaggatctcactgatctatgccatgcagctacctctaaccatacatacatttttataaagtgtaagaaaaaaatgacaaaatattttttgacatctttctactacctgcatttcaatataccgaaggtcattttttttcttttgtaaatcttccaataatttttggtctaaagttccatctggttcattttcttgcaagagatactcagaatctcggtcaatatatgatctgttcctgattctaaacatttttttttcttgatttatcaacttcttttcctggatgtcaagtttgttctctgagcatggtgtgttcttagtagaaacttcagtaccgtatctgttttgacaaaataagaaaggaagaaaggtcagatgagccactcaaacactggaacaaaacaaaacaaaacaatacgctgttgaaatatttcaaagtcatccaaatccaaagcttttcttttctcttagtacagtaattatgaaaatatacttagattcttataataaattcaaatttttcttccctttaaatagatattgccagattaagttattccttgtgatagttaaaaataaaaatccacagaatagtcattccttcactgcggttacttacagtgtttctctttttctggatttctcgaacttgttttatgtcacaacatctttttttcttgccaccctttctgagctacaaataggatgctacaatacacagtctttgaaatacttgtactaatttttcctctaaatgatacagttcttgtaatctttctaaaacggtagcaatttcacttcttgcagatctcccagacagaataatttcataaatacaaagaggacaggtagggagaacaataaataacaacttaatacatctcatatccagatacactattattcataccatttagctttcctatggaaacatgccatctaaatttttaaaagtcattttctaaatctgtttaatctacataaggaaaaaaagtacgtaaaggttaaaattcacttatcgaagaaaataaagatgttatttttattattaaagtgttactctttgcctattctttaaaaaaatatttcttgtcgtacccatgatcctcaggagcaaaccaggatatctgtgcttctgactctttatcattcttcgcttgaacagaattcagtaactgtacaatttgttcttctcgtcgttcatccatgtgtactacagctctctagtttgtgcaaagaaaaaagcatccttgtcaacataagaaagcatatgcaaaaattatttgatactgaagaaaataaaggctaagtaatatatgttcaacaaatacatataaaagaaagttatccacaggtgtcctctagcccaataccccccttcctagacctaattaattgttaaaattttcgtacatatccttctagaccttttccaacaagcatttataaaattagccctaatatgattggcaaagaaagctcatttatgtctcttcctacaactctggttctcttaccccaaaccctcacatactaattattatgaatttctccttatcttaaaatttcaaagttattaaaactcaaatggtttacgaaaaaagttgaaaactggaaatagtttggttgtaatgaacatttgaaagttcttacactaaacagaagaataaattggtaagtaaggctgagctcagaaggagtaaataaaattcatcagtgcttataaggtgatccaatgtggcaaatgacgcagttgcttcaaagaatgagaataaaacacaacagactggacaaatataaaggtccttggtgaactatgaaactttgcagaaactttacgcatctaagaaatgtccaaggtgaaaaaaaaaaaaagagaatgaatgccaaaacccaattctttggagacttttatatttagatatagtaagttgaaaagttgaaaaacagattcttcaaaatttatgggactacaaaccttaggttctaacgtgcatataaatccacaggcaaaaggaaacacacgcggagtggtgaaaattagagtgtgttaggttaaagaaccaaaggaggaggaaggtaaaagtataaatggaaagaaaacagtcaaaaatcgaaagaaagaaaccacaggacttaatgactatttggtggaagttggggagagacaaaaaggaagaaagaatcaaagaactgttttcaaattcaagggtggatcctgagagagcagcagtaagatgaatcattaaaaggaagctgctctgtgttactgtacatttttgtgtacatgtggtggtgatggaggtcacaataggatgctaagtttggattttaggcaattaagaacaaagatgaaatttcccgacttgtaataatgactaggtagatgaatatatggaaattgatctctgagaggttttgtttttagagttatgatagaaattttggagtgttctgcaaagttgaaatcacagagacacaggaattctcttaatttacaaataataccacctccaaagatgaggacagacggatgaccaagtctggcattcacggggccaaggcaagaaaataagtcagaggagtaatcaagagaacaaacaaaagactaggagcacacagtgagaaaaccactcctatgaagtgaagaaaggtgttaaaaaaggactcagaagtataaaatggacgtaagtaaggcagagaactgaaaaaattactactgtatccaacaactaggcagttgggaatgatcttcaaggtatttttggtttttgaggtttggttttgatttttggggaaaaaagagggaagcaggagctagggtaaggagactgatgaaagcagacagcaatgtgtaaaatactgtaaaatctagagcaatagatttcaattgtttattttttatagcaatccacagtaaaactaatgacccagtacacacatatacaagtaatttcacaaaatacttcccttactctgtacagtgcaactcttatcttctcttcactgtattctatcccaattaaacaaacaccaaaatagctggtcacaacaaagtttaacataaagtttgaaaacccagggtgggtagaggagtatgtgtcccaggagaacaagacataagcatctttaagacaagagacagggttttgtaagacattctaattctaatcagtattacatgctttgtgaaagctcaaataagtttacatgggtaggaggataacctaatgtaataaatatgagaaatcagtgataaaacaacaaacctgaagaagcaaagcaaatgaactatatgttacctccttttttgaagtgaaaatgagtggctaatttcagttgtcaggacataaaatgtctctactaaaagtcctcttaaggttttttgatgtatctgtttagttagaatataacctatatctgctattcctacagttctcacttttccatgttaactcattactctatattttgtttagtaaacaatttcctagattgacatttcacaatacattgcccacttcctgcccgtaacagcacaaaagattattctaattttatgagatttcacgcccccggaaaaggtgaattactggataacataacagtctactgaaaataaacagatctacacaatcttccagtccaaactatcacaacaaaattcattttcattaaaaagtcaacatcagttggtagactttaagataccttacacaatgcatatgtaccaagtaagcatctgctaatcaataaggaattagttgaattgtagtacacccagtggttaacagtgggtagatctttctgcaagtatataaacaggaaagatgaccaaagtattaaataagtcagttgtgtagtaggatcttgtttttattactattaatttgaaaagaggttattcactctccatatcctatacttcttgcagtgtctctgccagatataattctggtacatggtatgtgccccagagaagtctgtcaatggaaggaatgaacagctgaatcttttacaatgagcatgtatgattagcccttgaaaatgtaatttacactctaaataaaaacatttgtatttttaatgatgttctccccacaatgagtttctggatgctgcaggtagcagagaacataccttaattccaaacttggatcttgcctttttgtaggatgcctctctccccctcaacaaccttcttctagttctaccacgcttcactttatttcactccttgcctggagaatctcaaaacacatttttttcatgactattttcttttatcatagaattttgattatttcccactttcttggacattctcaaataccctgcttctagttttcagttcctggcaagaaaccctaaatgatgtccatcaaatttatgttatcagctttctaattatctgcaactacttcacactgtctccccattctctgtaacaggccaataccacccttttgtttgccctcagcattcacacgcagtttttcacaaaacaaaagccctaagaaaaggtcctcagttggttatcaccaaacctaaacccgcctgtatcagaatttatccttttctcttttctttcttgttataaaagaagtgcattttaaaggctaacccctcaacctgagctctgcagtccagttcctttcatgtcctcagggccacctccttcactgaaatttaccttgctttcctaaatttctaacctctccagtagacattaggcagtcaaccgatattctggtttgcttcttttagtaatgtggtagagaatcaaaccttgcttgttataaaccattaagatttgggggttggttattactgcagcataatttggcccactttgatttgcccactttgatttcctcttcactgggtgcttccctcagggcatgaacatggtcaaatctcttcaccttaaaaacaaaaaaccctctcgtgaattcccctacccctatcagctacggcactatttttcttcctcatcttcacagcaaaactactggaaaatgttccacttctgaatctctgtttcacttgccaccctaccgcaatctggcttttacttccacaatgccacagaaaggactcccattaagatcatcaacgaccttgttgataaatccaatagacattctctgctcttacatcatttgtgcatgcttgccactatcaattacttcttgttgatacgctcttctctcctttaaacactactcttagatttcaaaacaacacacaccttatttttctcttctctagctgatctttcctagattattttgtaaccttcttttcctcagcctgtccttaaattttcattttccgtatttgacagcctgagtgatctacagaccagcaacactggcatcacctgggagcctgtaacaaaagtcgaatctctgatcccaccagtgtcctacattttaacaagatgtcaggtgattcctatgcacattcaagtctgagaagcaatggtctatagaattcaggctgggcccactctatttctgactgttcactcccacactccaactactacccatgagcccattaactgtcaaatacttatctccagtctagatttttctaggcatcagatctacacagccctctccctcctgcaaatcctcatttgtatgccctataacaatatcaaactcatagtgtccatagctgagccttcttccaacaagcctgatccttacagataggcataaaagagtcatcattaacactgtactcgtcccttcagataaaatacatcacaaaatcattttgagtctacctcctaaatcactttaatctgtccactcccctccatctccactgccaacgtgctaattcaagctgtcatttctcaccttagttactgcaagggctacttcactggtccccctgaaccaggattacctctcttcaatccattccttatactgctaccagagtgaatttaaacatttaaaatccagtcatttcattctttgtttaaaatgttttaatgacttgctacagtccttagaaagactcaatgtatctcaaggccccgcgtatttttctagcccagagattttcaaattgctgtttctgaaattatattaaaggatcatgaccagcattaataaaaagagaacagagaagttcaaaagcaaaaaaacctcaaagcaatgtgcagataattaaatattattttacaaaacttttcatctagttatacatatgtgtgtactgggttgtaaattcaaatacattcctttttgggcaaagtggccaacaagtttgaaattgactgccctaacctcatctcaatacactccacatccatgttcttatcttttacagtttctcgaactgaaaatgtgcttccttgatctctatgttatggcacatgctactgcctttgcctggaatcttttccaaaccccaaacttcaaacacacacacgtacattcactttgttatctttcaagtttcaacttaagggttactgtccctgaaaaatcttctaaaataccttgccctgagttaggtgatagcccatattctctaataccttaatactgtattctatttatcgctccaaacacaccacaatctctgtagagcctatatctattttattaattaatacagtgcttaagatactgtcacaaaaataatgtcctcaataaatatttgttgaaagaacatttgttcaagaatgcatcattagaatgcattcattttcagccaggcgccatggctcacgcctgtaatcccagcactttgggaggccagggctggtggatcacctgaggtcaggagctcaagaccagcctggccaacatggcaaaaccctgtctcttctaaaaatacaaaaattagccaagtgtggtggtgcacacccgtaatctcagctactcaggaagcagagggtgcagtgagccgagatcacaccactgcactccagactgggcaacagagtgagactccaactcaaaaaaaaaaaaaaaaagtcttcattttgaaaacacatgacatgactttaaaagtgaaagctaccgaaattctgactgggaaacaatgatatcaagctaaaggtggtcaaagaagagctgggacgagcccattgaaaaatactcctatttaaacaagaaagaaaggtacattttggacaggagaacagtatgacactgtaatgaaaagtaaaaataaagtatgcctaaaaaaactataattatatcagactggagacatgggctcagagaaatgtgcacagcggtaaacctgttacgttgaagccgtattaccaagatttccagagaacatgtcaagatgcaactgaaatatatcagactgagacagaagtgacatgacttccaatctgaagttgtgaattaggtaataaaatgatctaatttttccttttaaaagatcaccataggcggctctgtaaagcacagacaatgcagagcaagaatggaagctagatgactagttagaaggcaagaacagaaaacaaacagtggcttgatctatggtaactattctggaggtaagtggttagattgggatatattaacaaggcagagatttgctgaaatgaaggggaagaagcaaagataaatctcatttggccttgccaagtgaataaatggtcgtgtcaccactaaaaggaggatgggaacgcaagtagaaatgaaaagttccattcataacatccactgcacaactggctatacccttcatgtggaaacaataatgaacattttttcctgacttatttaacttttcatctgtttaggtattattttctcagctagactgtaagctctttgaataccacatttcttcaagtccctggagcaatatgcataaaaccttgtttcaaacagagccttaataaataaaagttgtaaagttacttagacgtccgtatcctgattttcaagccagtatgcccaacgaaaaagttaatttggggctgtaaaagaaatggatttgttttttaaagaaaagtttaaattatgaagataaatggataaggcccccaaaacacctgaatgaacatgacatggttaaaagaaataaaaagaaatggaacggtttaaaaatagtagtctaggcctggcgtggtggctcacgcctgtaatcccagcactttgggaggccgagttgggtggatcacctgaggtcaggagttcgagaccaacctggccaacatggtgaaaccccgtctctactaaaaatacaaaaattagccggaggtggtggcggacgcctgtaatcccagctactcgggaggctgaagcaggagaatcgcttgaacttgggaggcggaggttgcagtgagctaagatcgtgccactgcactccagcctgggcgacagagtgagaccctgtcttaaaaaaaaaaaaagttgcctaaatgatgatctaattacactctataatacattttataaggtgcttttaaaaagtcaccaaaggcctatactaagaaagttcctgcttaatgataaaaattattttttattagaattttatttactagtcactcggagaactttgtttcccttactacagatctttaagacacaaatcaacctgacaatcacctgaagagaggagagtaagccaaatcatctctggagattcctttcattttccttttcaaagagaatctgctcatcaatagaaatttctccaccccaacataaaaaacaaaaacctaggtttgcagataattttaacactaataataaaagctggactatttttctgaatgatccacatccaaaacagtgtctgcctgcttttgttccgcgcaaacctatctcaaatgtagaaaggtcgctatgtgcttcttcaccaggcaaagaccttaaagtgacaattattattctaagggaaaggacggccagagatacgacaacgacactcctaataaagttaatttcggttggaacgtgaacttaacatttgctttgtcacagttctcaagtcctttaagcaaagtatatattcagcctgcataaatcctgcctgtttttggtcagatgagcatggctaatgttacgcagtacacccgctacggggagcgccagcataatatatttgcgcctcatttacatttcacaaaacacgtgcatcacttaagaaacaaaaccaagaaaaagggggcagcgggagagagaagaaaacctgtgctgcctcatcctctccactactgaatccgagattacctcttgcctctccgcttccttgttcttctgcccctgttttttcgcgtaccacatgccgatttcgcggcctttcaggtgcccgggatgccggcccctgccgcctcgaccaccccctccgccgccgccgcctcctccggagcctcggttacctccatgaccccctgctggcccccctccatagcccccaccggagctgcggggacccccatcacggccccagttctgatggtagtcataactcattgtcctggcagactacaacccgtcagaaccagcaaccgctggaaatggcgtccgggcccggaagccactgtgcgcccacttccgttttgcttccgtagcaccgcacaagagggcgggccatttagcgtcacaagcagtggtttctggtgacgtcacgggaggacgaccccggtggtctggagggtggcagggatcaggttctgtctgagcccccgagttgtttatctttgtacctctggagcaacagccagccaaaggctcgtagattttctttccctaggcccagcaagtgagccaatagcttttggtttttactttcttattcctggtaaatccgcagtttttttgcacttaggtcctagggtagtaaacgttgattgaaacaaaagaacccttggatcaattcgccgtcttctaaagaaaagtctctaaaaaatgagttcttctagtcttgaaaacagcctgacaactattcaaatatgtaatttaaaatccccttacctccttgaaagtgttgtcactatttagtacgtttatccaatagtgttaagatgagcgtgtctacccaaattcggtgcagagctcttaggcaatgtaaataaactactttgaagattcatgtgttcatatgaagccacatactgtttattaaccagcacactgagtgttttgtacaagctgttcttgaataatcaagtaattgggccacacaggcttggatgtacaccaggagatatccagctcatgttacagttaactgatgtaaaggtgctgggaatactcactgaacaaagcaagtatggcatgagcttttatttgcctacagtcttaagggaaagacaaaggctatctttgtgcagtgaattaagaaagggaaatgctgtatgccaggaaggggtctacaatacaccattgtggcctaaaaattattttgagcaaagacatttgagtttctgaaatctacctgtctaaatgcagaaccacacggaggaattcaaatcaagctcctccctgggagggaaacccaggaagactgactcttatcactggaggttagaagctggcaacacacttgaatagacattgtcacaaagctatcatatctggcatctgttttaaggtgtcatttatttttactaaaagtcatttgttttttccatacgtgctgttttcccctttccttccctttataagatggtagataagtcagaactctacctccctgaatcacctttttctgtgaactctattatgtatgtggttaagtctgtcttttcttttgctaatctgttttgtcactttaagtctggggcctgcaaacactgaatctaagaaagtagacaaaaagtatttcctccctaagagccaagagatactacagcaaaagaatttaattttggagttaggtgagttatgcaacaacttttgagataagtagacttttgccagactaatgggcagaagaaaagtatggcaggtgaaaggaacaatgtgtaaagacagataatgatgtgagacatcggagaacttaaaacaactaccctgaatcttaaagcctgatggggaaggccaaagaggtagataggggtctgattatggaaaacttatgtgccacttaaagaacagtgatatgtttatgcagagcagtggttattttgactgcttcaattggaaataaatagcggagacaagagtggatacagggaaactagttaatgtgatgtaggggaggcaaaatgggatgacagggcattacatgtggaaagaattggaatcaggagacattagaagataaaattacttaaatttgatgattcattgaatgtggagaattggaagggttaaacgactccaagtttaagatttgaattattaacccatggggaggcacattgtatcctgagatgagaaacacaggacaaggaacattttgggggtgaggggcagggcaagttaatgtgttttatttttacatgtggactttgaggaacttatgaaacatacaaatggagtatctagaaagcaggctgtaagagttaaaagcacagaggccaggtgtggtggctcacacctgtgatcccagtactttgggaggccaaggtgggcagataacttgaggccaggagtttgagaccagcctggccaacatggtgaaaccgtctctactaaaaatacaaaaattagctgtgcatggtggtgcatgcctgtaatcccagctactcaggaggctgaggcaggagaatcacttgaacccaggagatggaggttgcagtgagccaagattgtcccattgcactccagcctgggcaacagagctagactccatcaaaaaaaaaaaagaaaaaagaaaagttgaaacgttaaaagtacaaagagagtagactgaaattatatgttttgggagtccttggcacatgtgattaaggccgtaggaatgaatagtttctataaaagcatcccaattgggcactcctgatgtgaaaaatatgtcaactgtctaagagatgagattgagtaggcatactgaagatgataggggcaaagtgggaagaaaatggtgagagtgttatgggctaaatctttgtgttcatgcaaaattcatgatgaagccctaactcccaatatggctgtagaagaggcctctaaaaaatgtaattaaagcaaaatgaggtcataaaggtgagatcctgataataggtttagtgccctttaaaaagagacatcagagagcttgttcctccctctcagacgaaaggccatgtgaggacaaaacagcagccatccatgctccaggaatagctctgtaaaccaaaaatacattttttttttttgagatggagtctcactctgttacccaggatggagtgcagtggcacagtcatggctcactgcagccccaacatccctggttcaagtgatcctcccaccttagccccctaaagtagctgggaccatagacgcgtactgccgcacccagctaattaaaaaaaaagattggtagagatggggtcttcctattttggctggtctggccttgaactcctgggtgtaagcaatcctcctgcctcggcctcccaaagtgctgggattacatgtgtgagccaccgcacattgccccaaaataaaattggaagccctcccaaccaactgaatggacccgtcctctaagccaaaagcatcctaaagtaaacctgacttggtcaggccatgatgggaatgggaggttggacatgcctcattataccttccttcctttggaatcaggtacagctgaccagtattaacattgaagcagagaccttaagactgacagaacagactctttgtagcaatatgatgtcaacatagtagtaggccctgaaagaaagcattttaccccaaaatatatttatttgacatattttgaaatggcccttcaaagctgtctctcatggggaaaatctacattctgtagagaacctccttccccctttccatttcttctccatgatccagaagaggattaactaagagtctggaacctttttaagttgaataagaaatatttacaatctattctttctgaagcctgcaaccttggaggtcttatcagcataataagaaccttggtcttcacaactccttatcttaacccagacagtcccttctgttgtttccaggtgtttagataaactctttcaatcaatcaggaaatctttgaattcacctgtgacctggaaaactccctcctcctttgagttgtcccacctttccagatggaatcaatgtgcatcttacatgtattgattgatgttttatgtctccctaaaatatatagaacaaagctgtaccctgaccaccttggatacatgttctcagtatctcctgggactgtgtcatgggccatggacattagcatctggcacagaataaatctcttcaaatgttttagagtttgactcttcgctgacagctctcattaggaactggattagctggcaccttgatcttggacttcctagtttccagactttaagaaacacatttctgttgttttagctgcccaggctgtggcgttttgttatgacaacacaaacagactaatatggagagtcagaggggaagagaattagtgtttatttgtcacttagcatttgctaggtattagactaagtggcaggcatttgtggcagaataatggccccaaagatgtccttgtctttttttttttttttttttttggaggtgggctctcactctgttgcacaggatggagtgcagttgcatgaccatggctcattacagcctcgacctcccagactcaagcaatcctctcacctcagctttccaagtagctaggactgcaggtgtacaccaccatgcctggctattttttttattattattatctgtagagatgaggtattgctatgttgcccaggctggtcttgaacttctgggatcaagtgatcctcccacctcaacctcccaaagtgctgagattacaggtgtgagcaactgtgcctggctgagatgttcatggaaactccctggaaactgtgaatatattacatggccagggcaaagtaaggttgctaatcagccgatgtgataattaattttatatgtcaacttaattaggctaagggatgctcagagagccagtaaaacattatttctaggtaggtctgtgagggtgtttctggaagggattagcatttgaattcatagactgactaaagaagatcgtcttcatcaatgtaagtgtgcttcatccaatccattaagggcccaagtagaatgaaaaggtggaaggctaatttactctctcctcttgagctatgacatccatctcctgttcttggacatcagcactgttggttctcaagcctttaggcttggattagaactacaccaccagctttcctaggtctccagcttatagaaagtatattgtgggacttctcagtctccataatcatgtgatccaatctctcatgatatagctcagtttctgtgtatctatatctgtcctattagttttgtttctctgggaaacctgatgaatgcagctgactttaaaacaggaagatatcctgaattatctgggtgagccctatgtaatcataagggtccttaaaagtgaaagagggtggtagaacagaaggtcatagtgatgtgacataaggatttgactagctgttgctggccttgaagatggaggaaggggtcacaagcaaaagaattcaggcagcctctagaaactggaaagaaaatagattctcccccagggcttccagaaagaaatacaaccatactgatccttttgcagttcatgagcatgatgattgggtattcgtgcacatgtgtgagatgtgccaccctcgaaccttgttatgacatcggcacattgctcatctaacaggaagaaaaataaataaataaaaagaaatacaaccatattgaccccttgattttagcccagtgaagactcttgtcaaaacattatgctacagaactgtaagatagtaaatttgtgttagttaagactgtagtaatttcttatggctacactagaaaagtaatacaattccttatctcatttcacacaatcctcatgacagccccagagaaagttagtgttatctctattttctgataaattgttttactgcccttcgcctcatgtttgctgatcctaagtagattcttagttataaatgtaaaattactatgttttccatacttcttcagcatgaagtatttaaggtattgcttgagcctattcctttaggcaaacactttagtacaaatgtcactgtagtaaaaatctgcacaaaaggaagattttcaacgaaagacctgaaagatattgatgggaaggaaaatgtcagttgttacctgctttttcttttttccctgccttgatcagaactgcgaaaatttttacattacctaatgccagaaaacaaacagaatggttcattataattgccattgtttctcttactggtcctctgttgtgtgctgttctttgggcaggcaacaaagatgtctctctcaaatgtcctcttcattaatggtggcctgggccacagaatgcatagccattgctttcaaacccacagcatttggtgtccagcttctgttctccctatcacacctgccattgcatctggaatgcagcaaaggtgagccacacagagccacaccaccactggaaactgtcacaattttctcagtttcagggaatcttttcttcttcatcttttttttttatctgtaccctgggaaacaactcttatataacttattcataggtgtaatattcacaaaggcatgggggtgaaggagattttcttcagtgttcttggaaaatgaaatctttaacttctactttcacttggaggtggggatagggacatgaagataaaagtgaccctacccttctatagaatataaagtctggctatgggctggaacgcctacacatagcctctccatttggtttctctgtgtggcctagtttgagcctcctcacagcatcgcagctggattcaagagcaaatgtcaccaagcaagttggaagtacatgacatttgacatctttatgaactagtctccaatgtcacatagcataacttccactgtgttttactagttgaggcagttacagatgtccacttaggtttaagggtggctagggccttagcacaccgtgggagtagagccaaagtcacattagaagagcaggatgcaggaattagagaccagcctgggcaacatagggagaccctgctctacaaaaaatcaaaaattagccaggcatcgtggtggaaagcttgtggtcccagctacttgggaggctgaggtgggagaatagctcgagcccaggagatcgaggctgcagtgagtgcattcatgccactgcactccagcctggagaacagagcaggactcttgtctcagaaaaaaaaaaaaaaaaaaggaagaagaggaagagcatgtgggatggaaggaaaacaattctaaaatagcactatcctaggtgaatcagatatttgtttgaacaaatgccatgtctgcctactaattccatctgtttcccacaaaaaggaaaacaaaaattgtgacttcgtgaggtcataggatttcaagatccacattaaagaccctcttgagagattttcataacattttccttttaaaactacagaatctcattaaattggtggattttcctcacccaatttaagcatgcaatcttagatcttaggaaaaaatattgtgaaagagtgctaagaaattttatttaatgaacagaactttttaaatttaaaaacgataatgaaaatataaggcctaaagttttcagttagcaagtagataatgtaactttgccactctaactaggcaaccatggctttgtctaaactctaatattttttgaccctgacattagaaagtttctggggctgggcacggtggctcatgcctgtaataccagcactttgggaggccgaggcaggtggatcacttgaggtaaggagttcaagatcagcctggacaacgtagtaaaaccccgtctctaccaaaaattagctgggtgtggtagcaggtgcctgtaatcccagctactcaggaggctgaggcaggagaattgcttgaacctgggaggcagaggctgcagtgagccgagatcgcacccctgcactctagccagagcgacagaaggagactctgtctcaagaaaaaaaagaaaaaaaagaaaaaaagaaaaaagaaagtttttggaagttgtatttctactaaatggtagagaatacaatttacctctgaggcatgttttttcccttattcttgaaaaattacccagtgagactatgcatatgtgaaggtagagcaaagatcctcctctgtaacaaagtgttgcaaaaacgacatgcctccggatatctaaactgctctatatgacattgcaaaagattgtgttcaaagtttttttgtatttggatctttgactgctcaattccggaaagtgactgtgtattcttgagaggaatgtatgtttctatgcgtgtgtatgaatgtttgtgtatgtgtattctctatgtatttgaaattaagacttcaagactgtaggaaagactagtagatatgatcttctttgtatattaaactatgaaagagattgtataaactaacatacatttggagcagtatagtctgaactagagtgttgacgtcacagattcagggttaagaccatacaattcaaagttgggaaaatgtatcattgttcaattaccgtgtgcagtgcctctgcctctgcagcttataaaaatgggcagggagcgctatttacattctgttatggtatagtatgtgcttgtctagttgattacagggcatgtaacagagacaggctagctagctcttcaccatattttgggttcttcttcctgtacacagctagatatatttcctagtcttctctggaaccagctgtggttctgtattgagttctatccaatagcagaagctgcaatgactgaggtgcagttcttccaagccagtcacactaagcactccagtgcagaatccttcatgtccttttcccatctgtcagctgatgcagatgagcataatgatcataagaaccgtacattaaaaatgtaaaactacatgaacctaggccccttaaccatatcttaaagaagaaaggccctactgataaggaacattcatttaactgctgctgctctctgccttccaaatcttgtacaaatgcctctcatttttagatgcgaaacctgaactttgctgaaaagagggtcttggaaataaagttttctgtcttctagcctctgtgatacataaaggagttgagaaacattgagatattgcagagtattgacagaaaataaatgagataattgtttttcccttgagctacagacttcatagataggcttttaaaaaatgtgtaatttatttcatgttaccaaggaaatcctctccacttattgaatcagaatacaattatgacgccatcccgactactaccaccctaaacttaaccaacatcatctctagcctggactattaaaatagcctaactgttctttctgtggtggtctttgtgtctgtacagtctttgacccttgcaatagacaatcatttttgaaatgagatcatgtcacttttttgcttagaaccctccaatggtttttcacttcatttagaacaagactagatgttcatacctggtctgcaacgccagtttcctcctgccattatctgtttgcctttatctccaaccactctctacctctctcactcagctgcattcacattgacctccttaatggtttcacagattacaaaaggcacactcctacctctggatacttgctgttccctttgctgggactatgatttccctagataatcacatagcatgtttcctcactttatttgagactctgatgaaatgttactttatcagtgaaggcttttctgactaaattattgaaaaaagcactcttcccatctttgtccctttattctaattttattctttggccattgttacctctggtccctattttctgtcaacacacttaataccagcatacatatatatgtaccacacacttatcactaccatatgtatatatgtaaatatatagtaaagaacttaacctatccaaagagaggtttggcctttgtccttggctttgggggaggtaatttctaagcccttggaatgtcatagccgaaaatagtatctttgtttgtctgggggccttggaccagcagatagtaacaatgtgtttttgagaggggagttttgggcattctgtatcaacttggcctcctggagagccagaaagagatatcagtcatgtgagtagtcaaccatgcttacccttgctcctaccatgatgcagccccaggaaggactctggacaccaaggttcagttgagattttctgcttggcagtagtctgtgcaaggtgtcacacatcgtcgccaaagaaagtaatgccgtccatgactccatggggagagtaccatagaagttccacatttacaacttttcctggacttggctctatgacctcttctctaggctgattttattctgtatccttttgctgtaataaaccataaccatgagtacacagttttctatgaattctgtgagtccttctagtgaattattgaaactagcagtggttttgggaattccttgaatttgcgatttgtgtcaggagtgagagcaatcttttgtggactgtgttctctgactttgtggttgtctcaaactcacagtaaatgtaaaaacatatatttgttttgtttgagttttgttcaaaagttataaaaccaagtatctagaacaatttttagtatgtagtagtcatttattaaatattagaatgaagaaatgaatgaaggtagctgaaaagtataagaaattaagagaaaatcgatttgtaaaatccaatattatagaaccacatcaagaaaagcttccaaaaaatgcataactaagactcttttattatatttttaagtaatattgtgccatttgctatcttcaaagagttgcctctgtcagtcacaactctcagaagtcttagggattatatattaggtgtttatactatttgggagtctcggggattacgtgtttgcagtttataggagtcaccaccagatggtgatatttttattaggtaataagtttttgccttcagatacatcaatttatagagaaaagagaaaactatacaaaatatagtatttattaataagaagaacaatataactatacaagggtaaggtatttggctatatcacaagatatctagaaaggtatttcctctactagaaacacacttttataatcaatcactctaaagagtaagcagacttaagtaaacttatgtagtttaaccttctcctcccttaacaaggatttggagcgtcattcatgcttaggcacagctctagtagatttttcttgtatattcagctattgttggcttggagtttgaagtgttacaggttagtaatatggtgctgattagcctttcaaactaagactttgggctaaataatactggtgttgtttcaatgcagcagaatttttatgtgcatccattatacagttaattcaacaaccaagggcaattaaatgggaatatcctaattatttttccaattcccccagtttaagcccttgtccagttaaaataaaatgagacggaaaatgggtattattgtcttctatctatttcttaatgctctttaaaccttgatttctgttataatctccatcccattcaaattgctgtgcagttataaagaatttgtttgccttcaaatctttgctattttcttcagctttattatgatcctgtgtctaatttcctttttgcctgaaattgcattttaaagcagcaatatcacctttctctttcagaaaattatacatctaagtttaagatatcaaagcctatcttctacaaagcattatgagaatattcaattcaatttttcttttataaagacatttaatgctactgatttataatatctgatttatctgtccatttgtcactgtgttaaaatagctgttaatattggtgatacagtcttttaaaataaaatatatttgtaacgagaatacatttgactttgaatttatatgttacacattatttgaggcttgctttacaaacattattagtggtaatacatatgtttcccaaatttagataactagatattgagaagttaaagattgagaaagtccattgagataattattttgaaaatgactcatgcttgtggcaacaaaagatgaaacattctgaaagccgatgtcaagtaattttgaattctaattcaacctaataaaacagaaaccaaaataaatcattctaaaacacaattcattcaatctgtaaataaataaataaagtatgtgagtgatgtgaggggcacaaagtctaagactatgtaaagtgtcaactcagtaactttggaaaataaacttttaggtaatacatttcatatatgtttacaggaaggttagaataaagcaatttgaaggaaaatcactttataatttttgaaatacatcttactattattctgccaaggtgattcctgcatttttgcaatgtaatgcattctagaattatcttgaaatgtataccttacaatcacttaataaaataggttcaactgtttctttgagacaacacgtctttagagaagaaacaaaaaagcagctaaacttgatataatatttgaagtaaacttttctatttcaagaatgactaagaaaggttgcccaatcctcagctttaaaaacagatacttttgttttagacttagaggattttgctctgctgtatccagaagcctaccatgtttggatgtacctctcataactgaatctgccagtattttctcccaatttccactcaagttaaaaaaaaaaacaattttaggataaagtatacaattacacaattacaacttttttccaataatgtttgagttaaagatacttctaattccacctctaacacacaatatatttgttttatgggacagtcttgacatactgaaaagatgaaaggaaaactgttataggtaagaaaaaaagaaaaaacagtaaacaatttatatttggtagaaatgaaggaaacaactatttatagactaggaacctgcgtgtttctcagttggaagctaatttttcattttacagaagaatgtaaagctaaagcagtaagtgtaataagcttgttttgctagccacatttaggcaagttccttcaaatataatttggggttttgttacatttcttccattcccagaattcctcttttttcccctttgcagtaaaggccaacattgtatatagaaacatatgcatggaacagtatattcactgagtttatacaattttctgtttactaggaagttgacaagcaaaaacattggtaaactaggccaagatttgatttagaaaatattttttagaagtcagataagaagtaaaatcttttcattaccacagtgtgtgatctttaggtaacacatcaaatgcacttaagtgtttacactagttccagttgttcccacaaaaaaattaactattaaatcagtaaaactaatgtaagccaacaaataaaaggaaatcagtctcataacaaaggtgttagtttcacagttgacgttgcagatccattcttgctcctgttagaccaaatacccactaactacccttgctttcttcctctctttttctgtaagctttatttaacaactggatttcctcctggtagccatccctctcttgatgctgccttttactgttctgcctgtgtgcttctactgtgtctggaatggagatattaatatcaccatcaggattactggtgggcaaaaagagggagtatgaggctgtttcccctaggtcacatgaaacaaatctgttttctttcctggagtaacgtagggatggagatctgacttgtgtggaggactgactgatgttactaatgattgacacagtgtccaaggcctcttcattatcacaaatttcaagaacctccaagtgtattttcacactggtgtccacaaacgtggatgaagaatcttctgagtttggttcatggccaacacttttggatcgatagacttctattttcttagaggctggagttattttttgcccttctgcgcttacctcataggtagaaagagatagggttttccctgtaggtgcatggagagacacagtcccctggaatgcacacaagggaatggcaagggcataaccggaacgctggggacaaaaacaaaattgttattgttgaaagctaggttctgaggttgagacatttagaaattcattttgttcatcagaatgataaaggttttctatttcagatccatttccctagaaacattttacagatacgggatttaaatactgccaccaaagcaccatacctcagtttctcctaggccaaatcagacatttaatgagggtagttaggaacctttatttgaagatgaggggcatatttccccagttaaaggcaaaggtgtgtactgatgggaagcaatagatgttttcaaaggcagaatttgaacataaaattgaatgcatatttacaatctgaaattacttttatatttttgttacatactcagttacattaaaacgtttgcaaaagttggaagaaatgtagactgtgttatcaacatgaactttttttttctgtttagtatgccaaagtaaatgataattgtgaaacggtggcttaaggacaaaagatacttcaactgttagagttgagcatacataacaggaaccgaatgtcaccagaactatgctacaaagagcgtacttttccacagagaaatcagtcattaaagtaaacccaataataaagaatactattccacctctttcaaaaacttgcctaaaagggtaaacattttctattatgctttatgtattaagatttttttaaaactgtacttaccactgagaggtgcttcagaaatgaagaaaataagattgattcttaaaatagtctgtactttttattgctgattcatgtcttcatactttcaactgacatgttttgatttttgattatgtgttagtcccagaagatgataatgtaccaaacttctagagcagtaattctcaaaactgagtttccaacccagcatcgtcagcagcttctggtaacttgtcagaaatacaggtttttagcattatcccagacctactcaattaggtctcaacccaggtacagggtcaagcaatctgtattttaacaagcctttccggtgattctgttgcatagtaaagtttgggatccattgctctaactaaagaaatgttgtagtccagaaaaaaaggggtaatggtggagataaacagacactttttatataagtgcttaccacttgtaaaacctacagttactaactggactggcctaaatgtgtctgtccacctggggaattggcatgggagataatggtatttttccaatttaggatgaccagctttctcaattttcctgggactgtcccatatttagcactgaaatttctgcatcccaggaaatccctcagtcttagttagacaaatgggcaggagtcggggcagtgggagattgatcaccctacttgctatgggcattttcaatctggacccaacagtggctagacgaagacaggttctcactattggagaacagtttagattattttctgtttaaagaagtttgaaaaagaatgagtttcattgggggtgccttcatgctctacttcttttttttttttttttttttttttttttgagacgaagtctccctctgtcgcccaggctggaatgcagtggctcgatctcggttcactgcaagctctgcctcctgagttcgtgccattctcctgcctcagcctcccgagtagctgggactacaggcacccaccaccacccccgcctaatttttttgtatttttttattagagacggggtttcactgtgttagccaggatggtctcgatctcctgaccttgtgatcctcccgcctcggcctcccaatgtgctgggattacaggcatgagccaccgtgcccggcccacgctctacttcttgaattgagagactagaaaaaaatacagtctgggctgtgtgagacatatgatcattctttcctggttattctctgtggagtggtcttgaattctctttactcataaggagacctaggaacctaactgtagagccttgcacgataaagttttggaaattttgaaaatttacactataatgttcagtccagccgtctgccaaggcaaagaacttcattgactctacatgtgtaatgctggctgaaataagtgagacagagggaccacacaggttcatcacagcatcagactactattaatatttgagtggtggcaacttttggcaaaagagaagtaggtttcattcctattattatacatccacttattaaacatttgctaagtaaggatgtacatgattctgagcttgcattggatgtatggagatgctatctcttaagaccccacagatgattggatgtaaataaacaaaataaaaattttagttctaaatgtagtaattgagagatagttaccaagttctataaggtccaaggaatgactatctcgggtagggagatgtcatattgtggaggggggacatgtgaaattgatcttaaaaatcaagaaaagatttagttttgtttgtttgtttttgagacagagtcttgctctgttacccaggctggagcgcaatggcgccgtctcggctcactgcaacctccacctcctgggttcaagtgattctcctgcctcagcctcctgagtagctgagactacaggtgcgtgccaccacacctggctagtttctgtatttttagtagagacagggtttcactatgttggccaggctggtctcgaactcctgacctcatgaactccctgcctcggcctcccaaagggctgggattacaggcgtgagccatcgtgcccggccaagatttacaattttaaaaccttgctttctgagtgataaaccacaagttaaagggttatattgaaaactttccatcctgagaaaacatttttgttatcaaagactgaaacaatagacccaggctggggtgcctaacttagatggggtgagaaaaaagaagacttgagaatccttcccagagcagggctcagtttttatagataatatccatattattgtctaacattgttctggaggtcctagctgtgcaaaaaatcaagaaaaaaataagacatatatatatatatatatatatatatatatatatatatatatatatataaaatgagtaggaagagacattattgtaatttacagatgaaaatattatcttcctagaaaattttaaagaagtaatctaaaaaaattagagagtttagtaaggtggctgaattttaggtaaaaatgttaagaaatcaatagctattgccaatcaaaaataatttttaaaaggtaccatccaaaatagcaacaatactatagaagtatgtgagaccttatgaagaaaaaacagcaataataaaagaagtcttgaaaaagtaagagagaaagaataatgtttctgcatgagaaaactatttcgcaactatggcagttttcttttaatttattgatttaatacaatattaataaaagttccactgaaattttattttgaaagtttctcttaagatatagttgcaggggtaaatgcttgcagataaccaagaaaacttggaaacaaacaacaaggtggattcccaagtataatatgtagctacagcaattaatacagggtgttcattgcaagatttggtaaatccatgaaggaagacagccagccaagaaagtagatatagtataccctgaagatggcatttcaaaataagcagggtaattatactttaaaaacaaacaaacaaaaaacagaatgagttaatcaaataaacttcttacatattattagttatccattacaaaattaagttagatacctatctcatgttacatgcaaaaattttaaaaaattcttaataattcttttaaagtgctgagtgaataagacctttccaaatctggaatgaaaactggaaaccacaaagtaaaagatggacagatttgattgcaaaaaactttgaaatgtctgtatagaaatatatactataaacaaaagtgaaagactaaaggcagctcagaaggatatatttgtagtctatataaaacaaagtttaatagtgatgctatggagaattcttctcaaccagtaagataaacaatctagcagaaaaatggaaaagggaagtgggcaaaacaattaaagaaaaatggagagtaaacacataaaaatatgtgcaatttgaccaattattttattttattttttattgagagagtcttgctctgttacccaggctggagtgcagtggtacatgcgatctcagatcactgaaacctccacctcccaagttcaagtgattcttgtgcctcagcctctcaagtagctgggattaaaggcgtaccccaccaggactggctcatttttgtgtttttagtagagacagggttttgccatgttggccaggctggtcttgaactcctgacctcaggtgattcaccctcctcagcctcccaaagtgctaggattacagccatggccaccatgcctggccttacaaataattttaaaagtaagtaaaaacaatggtcattttagcttttcagaatgccctccataaaacataaacagaaaaaaaccccagcagaaataaaaagattgatgccatctttagagtatattttgattgtgtatttgactataaaataaaaactacgtatacttaccattgatcctatgtctgtgagtcggttcctccaaataccagaacatcataatgtttgtttatttcagcacttttgtaagccccaaattagaaacaatctaaagatctacatttagaaaatagtttaataaattgtgatacagttatgttctgaaaagctatcttgaatagatgaggtaaggctgtaagttctgcctgggtaaaataatttccatatattgtaagatataaaagcaagcaaattgcaaaacaatgtgtacagtatgatctagttttcttgttaaaaatagtcatgagaaatcagcccagaaaattaagcatgtataggaatgaaaatagattcacagacatacaagcatacctgtatatgacagtcatagaaaaaggtttgagaggctacacaccaagaatttcttcctctgggagtgaatagtggcttggcatttcactttcggtatttctatatttctaaattattttcttattatcatgattactcttttgatcaaggaagtttattaggtagtgagggaggcagagattacaaaatattactagaaaggcatccaggaggtaggggtagggtactgagtgtgtgttgctgatgctggatgctggtagttagcctcagcgttcatcatctggagtatgtgttggggtttgttctatttttaggttaagagacaggagacaagttgggtagagggcactatttcaaaaatttgccctaatggtttggttgactagaatgagagtctcaactggggtatagctaatttcccattcacatttgaaaagggtggagaggctgggtgcgactgttcatccctgtaatccctttgtcagtcagcactttgggagactgaagaagtagaatcacgtgagcccagaaatttgagacaagcctgagcaacatagagggaccctgtctctaaaaaaattctttaaattaggtgggcatggtagtgtgtgtttctgtagtgccagctactgcggaggctgaggtgggagcatcacttgagcccgggagatagaggctgcagtgagccatgatcacgccactgcattccaacccgggtgacagtgagaccttgtccccaccgcccccccaaaaaaaaagaaagaaaaagaaaaaatgtagagaatggcactcatgactggaaagaaatattttaaaattatctgaaaggaaaagtgattaaataatcctatggttctagtaagacaaatatttatagcactctcaaagagtccactgtctgtaataagtcagattatcctcacgaattttactagaaaactgttataaacatttgagtccaacaagctgtcaatgtgaagttcaaataaagagtctcatctcaggaaacaataacaacaaacaagaaaatactatacaacttgagtcacaaaccacagtgtagccaacagatttgaaaatcattcaaaaagtttaaggacaacttcaaaaagagacttcaaaagtaaaaggcaatagtatcttaacagaaaatgaacattaattgaaagaagtagaatatgatacaaaaactgttaatattggtttaatttatgttcatgtttgtaatgagttgaatagcatccccctccaaattcgtgtccccctgtaaactgtgaatatgaccttatttggaaatagggtttttgcaggtgtaagcaagttgtatgaggtcataccgaatgaagatgggccttatccaatgactcttatccttctaagaagagggaaatttggacgcagatgtacctggggtaagacagtcatgtgaagatgcagataacaattggagttatgctgtcaccagtcaaggaacaccaaggattgctgggagccaccagaagctagggagaggcaagaaaggatcctccccaagagcttatagagggagcatggtcttcccaacaccatatttcagacttctggtttctagaaatgcgagacaacaaatttttgttgttttcaaccatcttaatttgtgatagtttgttacagcagccttgggaaactaattcaattttgtatgcaaacagtacaaaaatacatttcgaaaaaaacttatttttaaaagtcctgcaacagaccatctttttctggacactggggctatgtggccctttctgtcaaatccacatgtgatgtaatctcttcaaaagaagtgaacattctcttgttgatctttttcttctctgctacctataacagtgtctggcatatgacaggccctcaaaaatatttgttgaatggacaaacaaaagtgtgcataaattggcaacactgaccttatgtccttttcagatttcatattttaacttttcgcacaaaaaataggatcatcttttaaaacattgctgtttaaaatttatacttaaacagccttatataataaatgatgatagttacaagtacatcagaaggtcatattagaatagattgtttttatgaaaataaaatattatggcactgaattttatgtgaaagttattgaatgacaaagaatgatacattcagagagcataaaacgattccttttgtaatctctgctttcttttcatttaaaagtctatgaattagcatatgctgtcaggaataatgataatccattattgctatattcttgagtgtaggtggcaaggagctttttatttggtaataaagagcagtctttaagccacacaaatgctccaggagaagacagcatgccatgtaaacacactagcacacataatctcctgtgataattgattcagagttactgaccttcggcacattgaatgttttgatttcttcactacgagcctccaggtgaatccagggtgaaattataatataaaaagagttgcagcaaaattttctcctaagaaggtgaagtagtctgttgataatctgaatcattcaattttagaaagacattatatagcatctaggatcatggcacttatcagaaaccatggcattttaatttcttattttatgaaaaaagaactcatagccagagaggtcaaacacttgcccagggtcacataggtagtatcaggactggcatcaggactcaggtttcttaactctcagttaagtgctctttctattatttgtatcatgttgttattttaaaagaaatctgctctagctaagagtcagttgttggttttctgccctagaaggtagaattctgtcactaactcatgagtaacccaaatgactgacaattttaatcccaattaaactcatatagatgatcgttaggtaatttaggtgactttaggcctcttaaagtacagacattgaggaatttaagtggaacacgaccatttaagatggttagtagagataaggacattgagagggaaaaaatagcactaagaacaagaactttgtgagaaaaacaaaagtagatttttaataatttactttttggaatttattttttattcaatatgcaaaactatgtcgttactgttttcacatattcaactcgcagaatataccttgtgtcattctgtcattttcatttaaatgtttgatgaacacaaattagagaaaacacaagaattcctcaaggaaagagagaacaagggcaagaaaatgagggccttcatcaagggtctgtaagaggcatgaaaagtgctaagaattttaacacatttcacatttaatcctcaaaggccttcaagctacaaattaaggtttttcttttcttttctttttcttttttttttttgagatggaatgtcactctgtcacccaggctggagtgagtggcacaatcttggctcactgcaatctctgcctctttcaagtgattctcatgcctcagcctcccgagtagctagtgttacaggtgtgccccaccatgcctggctaaatttttgtatttttagtagataaagggttttgtcatgttggccaggctggtcttgagctcctgacctcaggtaatctgctcgccttggcctcccacagtgctaggattaaaggcatgagccacagcatctggccagcttgttgtttttaatgatgaaaactctaacaactgagtaacagatttttaggattgatatccatcccccaaaatatttactgatcctgctgaataagagccttgtatcaaccttcttcctaagcactgtctatgcactttcttatttaatattcacaacaaccttataaaatagagatagtaattatcctgaactcatagatgatataattgagtcatagggaggtaataagggaaggtaatgaatatatatgaagtgtgtactatatgctggcattgcacttggcattttacatgttgtattagctggttcccatgctgctaataaagacacacacgaggctaggtaatttataaaagaaagagatttaattgactcacagttcagcatggctggggaggcctcaggaaacttagaatcatgacggaagaggacacaagcacatccctcgtcacatagtggcagcaagaagtgctgagcaaaagggggaaaagccccttataaaatcatcagatctcatgagaatccactcactatgatgagaacagcagcatgggggtaactgcccccatgattcaattacctcacaccgggttcctcccatgatgtgtggggattatgggaactacaattcaagatgagatttaggtggggacaccgccaaaccatattacatgtgaaatctactacatgcgaaatatataatataatcacacgggtggtaaaattatttacattttacagacaaacaaatttatatgtgaagacattaactaacttgcccaggtaatataggaaggtaaagttttaactgtgatctaaattcagctcacattccaaatcctttccatgatgccactgaggatctaagatgaattggagaaaggagagtgtggtggaagggagcaccaatagaaggtttttaaaatcatacgtggaaagaaaaaacaagatctgaacttcagtaggtagcaaaaatggcaaacgtgggatggactattgaagtattgcaaaggcaaaactattgaggctgtggagggtagtggtgaagtactgctgtggagtcgcatacacctgagtcactatctctataatccttacttctgtaagcctcagttgtctcacttgcaaaatataaagattaaatgagttaatgcgtgtgaaatgattaggggagtgcctcatacatagtaagtgctccataaatgttagttattattggaagctgagtaagagagaggaatccaagatgtttttaagctttctaatcctagtgtctagtgccagtagttgagactaggaagaggtagataataaaacttgatttctacaatctttatctctgaattagacagcagattcctctgcagtagtttattcttgtagtctaaataaaccaattaaaagccagacattggcagaatggattaaaaacacaactcagttatatattgtctataagaaactcatttcaaatataataatataagcaggtcgaaagtaaaaaaagaagatatatcatgcaaacatcaatcaaagggaaaacaagagtggctatagtgatatcacataaaatagatttcagacaaaagaaagttatcagagacagggaaaattactatataataataaagtgatccatccacttagaagacatagcaatcctaaatatgtatagagcaagcaacagaactgttaaatatataaagccaaactgatagaactgaaaggagaaatagtcaaatttacaaatactgttggagacttcaactttattcgncgtactagtagccgntttgaantcctcgtattgagaccannatgtaaccctccctcgcaacaatccataggataactagaaagaaaatcaacaagagtgtataagagcaccattaatctataagatctaatcaacatttgttgaaaatgttatagatagaaaatttttatttataggacactccatccaacaacaacagaatacacattattttcaagtgcccatgaaccatatactgagatagaccctatctaagccataagacaaaccctagggaatttaaaggaaacacaattaaacagtatgttctctgaccacaacagaaataaggtagaaataaatagcagaaagatagcaagagaatctccaagcccttggaaactaaacacttctaaatcatctaagagttaanaaaggggntnnanggtcttgagggaaataaaaaaaaaagtgaatgaaaatgaaaatacaacatattgaaattggtgctagggaagatctgagagagaaatttaaagcactaaatgcatacattagaaaagagtaatagtcttaaaccaatagtctagcctcccaccttgataatctggaaaaagaagagcaaaataaactgaaagcaaatataaaggaggaaaatagataaaagctgatatcaatgacattgaaaacagaaaaacaaagaggaaattaatgaaacaaaaagttatttttttaacagatcaataaaattgaaaagcctctagcagcagtgacaaagagaagacacagattaccagtattaggaatgaaacaggatatcactgcagagtctgcagccatcgaaagtaccataagggagtactacaaacacctttacacattcaaatttgacaacttacatgaaatagattgatcccttgtaaaacaaactactacaatgtgccaaatgcgaaataggtaatttgaatagccctgtaactattaagataattaaacttgtagtttaaaaccttcaaaaagaaatctcttcagccttatgttttctctggagaactctagcaaatagttaagtaaggattaatataaattctgcacaatctcttacagaaaatacaagacaaaggaatacttcttgattcattttataaacctagttttaccctaataatcaaactctacagacactacaaaaaaataaaactatagattagtatcactcatgaatatagatgcaagcatccttaacaaatattagcaaatagaattcagcaatctataaaaagaattatgtacaatgatcaagcagggtttctttcagaaattcaaggctgcatcaatatttatttctttacttatttgagatagggttttgcactgtcaccaaggctgagtgcagtgctatgctcacagctcactgtagcctccacctctatctgtacaaaaaataaaaaaatttagctaggcatggtggtgtgtgcctgtaatcccagctactgaggaggctgaggtgagaggatcacttgagcctggggatttgaggctacagtgagccataatcatgccactgcacccagcctcagtgacagagtgaaaccctgtctcaaaaataaaaaagaaaagaaaaggaaacaaaaattgtacagaccagaaaggaagaaatgaaacttttgcaacttgcagatgacatgattgatttatgtagaaaatcccaaggaatcgacaaaaaatcctcaagctaatgattgagctaagcaaggtcacaggatataagatacatgcacaaaatcatttgtacttctatgactagcaatgaactcttggacatcaaaataaaaaatgcagtaccatttacaattgctaaaaaggttaaagatttagatgtaaatcttatgaaacatgtataggactaatatactggaaactacatgacactttaaaaagttgacaatctgaataaatgaagagacatattgtgttcatagactggaagacttgacagtaaagatatcaattctgtagaaattgatctatacatttaatataattcctacaaaaatcccagcaagatattttcacagttatagacaagatcattctaaaattaaaatgaaaaggtacatgaaccagaatagctaaaattattttgaaaaaataaatacagttgatctttggtatctgtgggggattggttccaggacctcctgtggatagcaaaatcttcagatgcttaagtcccttatataaaatggcatagtatgtgtatataatctgtgcacctcctcgcatatactttaaaatcatctctagattacttataatacctaatatcatgtaaatgctatgtcaatagctgtttactatattgtttagggaatactgacaagaaaaatgtctgtatgtgtttagtacaggcataattttgtatctgaatatttttgatccaaagttggctgaattcacatataggaacccacagatacagagagttgactgtataatgggaggaatcaggatatctaatttcaatatagctataataatcaaaattgagttgttgctagagggatagagacacagaaaaatggaacagaatagaaaatccaaatgtagactcactcaaatatacccaactgactttttacaaaggtacaaaaacaattcaatggaggaaagttagccttttcaattaacagtgctagggcaattagacatccacatgcnnnnnanannaannnannnaaaaaaaaaattacccggctacatcagtttcatagtttattcaaaaattaactcaaaatgaattgtaaacttaaatgtaaaatgtaaaactaaaaattttatttgaaagatataggagaaaatctttgagatctaaggctaggaaggggttattagacttgacacaaaaatcatgatccataaaaggatatttgataaactggacttcattaaattaaaaacttgttttgtgcaaatgcaaattttgattcagggagtctattgttgaacctgagattctgcacttactaaaagttttcagatgatgctgaagctgctggtgtaggaaccatactttgaatagcaaaagacagacaatctgtttggctccttacagtcctaaaattacagggataaataatttaatggacaaataaattttgttattttatagggttcacaattaagagaagtagaggagataatttcagtggaaggaataatagaaacccctcaaaatccaattttatagctgtataaaatgaagaacaaaatgttatcttttcaaatgtctttaattatctaatattctcattttttctaaaaagataataaaaggaggttttttaattcaaaggtataactgaataggtagatttgtttatagctattcttgtgaaacactttttaaaaaaaatacgaccaacttctgtgcaaatagcagacacatacctcaactatcatgagctaatttttggtggataatatacataattaggcacaaataggcaagttcacactggtagattaagtatcaaatattcagtcaaaactccatttgtggcccccacttcttgatcgagttctattcccacttcatcttctaccatcttgtcgacttcctgagtgactcccttgtcgactctgtctacctgataggccaccagatggaccacctgactggcctgacccgcctgaccagccacttgaccagccattcctccgttggggattagaagacttgtttccatcataatattcttcaatttcaggtaatttggctggcactgagagtatccagttggaatcgtgccacactgcctgtaacctttctgattcagttgtaggaacatcaaagcaaacacccatatttcctttcaggaggcacacactggtaatctgagacgctgtattactacttagctttctgttaagttctttccaggcacaggtgacatcctgtatttcctctaggctttccagagtcatggtcatcagaggcgatcaaagactgtggttcaaaacttgatgcaccagaaatgtgggctaaagttgcagccaatgcatccactgcccctttctcttctatcagtctctgagctgatggtcagaaaaaatcaacagcagcataagaaacggaagtcagaaacctgatggtatccatgcttttagatttaactaaatccattgtagaaggaacacctacacatttaaaagtaattcttgctttttgttccacatatcttagttgacctctttctcttggttgataaaaacatatacaaatccctgtccagctctacctgtgcatccagagcgatggatacgggcctcaacatcctgaggaggagaatgttgaatcaccaggtctacttcaggaatgtgcaaactatgggcagccacattggttgccaccaaaactttaaaactatcttctctgaagccttttagtgtaatttctctttgtgactgtgcaatatccccatgtaaacactgggcattctgttttatgtgtggattcatggccatttcagttacattcttcctggtctccaaaaatatagccctcccttcagacccactgtagacttgaaggacatctccaataactgctggcctctgagaccaatgacactgaatggccaagtgttccacagtagttgcagccttttgagtcatttatccaataaggtcaacctgttcatatctggatttcatgtatttatttgcaactttgtatacccactgtgggcaagttgcagaaaaaagtaaagtctgaggatggtcttcagattcagttttgtaggatttgtgaatcacatcttcaacttgttcattaaaatctaaatctaacgtttgatccacttcatcaagcacaacatggcacagtttagaaagatccaatcagccactctgcagatgatctttgatatgaccaggggttccaaccaagatgtcaataccattttgcatatgattaatttggctttgatatggtattgcaccataaaaacacaccatgctgagtttcctagttttatctttgaagtctttggctacttggtttgccagttcccttgctggagccaaaacaagtacctttgttgagcagctttttaaaaattgtttcttgatttctttggagtctttcaatcaaggggatggcaaaaaagaatgtctttcctgttcctgtccatgctcgagctattaaatcttttctttcaaatacaggacaaggtcctaacttgaataggaaagagatatgttaccctttgatgtttcagaagctttacagtctcttcagaaatacggaaataggagaaagctctttctttctgttcacatgttaaggtctcctctagtttattatcacttgatttatgagtagaactatctaaggatgatacttgctttgattttttttttcatattcatcaatatttccatttggtagatcttttcttcctatgagatttagagaatttatctgaaagtctacaaatccttcttcagtgtctccatttagcttctctttcattttagttttttttggccttggaagcatccaggtcatctataacaacattttctcttgtttttgatttctcatctgggtcataatggtgccttgacttccttctgtcactccagcactgtgtaatgtgttttcagcttatcttgtttaaatcttcataacaaccctataagggaagtacaggtctataatcccttatctgaaattgcaatatcgatagagctcttagtgataaggtcagggggtagattctgctttctaaggctatacaaaataagtctcattcttttgttgaatgtcagccttcaaatactgccaccttagcctcttcagctgatttcttttttgcaggtcaaatgtttccagtaaaaattttacctgtgcattttccagcaccctgtgatcctctgagtgtttcaggatttttttttccttttccttttttttttggagggcaggcgggtgggaggaggaaagactctacaactcctctacaggctccttgagggcagggaccatttcttagtttaagcccctcggtgctcagcaaagagtatagtacaaattaggttcaataaataccttttgcctgtccttcttctggctctcggactcctccaagggtgttttcagctccataatgtcgccccaaggagtttcccaggcattactggccaccacctccctccacgcacagtggccacaactacctgtgggcagtgacagcatggaaggaagctgggcctaatgctttactcaaatcacactgatattgaaaatgatgaatcattctgatgaaaaatgatcaagtttctgcatgaaacctcattttacattgattttatggccaaaacgtaagcttctgaaatgaatatatcttgatacttaagttactatatttatttatttattaagagttggagtcttactctgtcacccaggctggagtgcagtggcgcgatgttggctcactgcaacctctgcctcctgggttcaagcggttgtcctgcctcagcctcctgtgtagctgggattacaggtccgtgccaccaggcccagctaattttggtatttttaatagagatggggtttcaccatgctgatcaggctgttctcaaactcctgacctcgtgatccacccaccttggcctcccaaagtgctgggattataggtgtgagccaccacgcccggccacttcatttcttattatggaaatttgtattctcatattttcaattcatactttttagccctgtgtgaatccgtgtgtacaatcatcacagactgcaataaatccttagggaattttggatttaagtgtgttgtttctcttgggattattagacagggtttttcattctctgttctaatagaaacgaaacctctagttttatctcttagaatggcatttcaaatcagatatgatatgtatccaaatttatttccatattttatcctttatttctgtttttctaacaaaataaaagaggataaactagcttgaaagaaagcatacactgattctaatttaacaagaaaataaaatttcatcaggaataaatgaatcctaagaaatgaaataattttttatatcctaatgataagcactcattcaattggatgttaggaatatcctacaaaaaatgtttgcaagaaaaaaatttctcatacctaattcaccagaattaggtcagaaacatatattgtcgttcgtaagtcagtttcaaagtataaacacaatgttttcgtaaggttgctatactccagaaaggtgttagagtatacattgatgagattcatgtaagtatggaagacaagaacactttcctcagccatcacattgggatacaaagagcatcaaactaaaaagcaaatttaaagaggcaaagcgcagagcatcatagcacttagcgagtttagagcggcaggtagagtaggcagtgtcctagggtagaggaggctagtgacagggaataagagtaaatgagcacttgggacttacctggtgtgatgaaatgttctaaaactgatttatggtgatgtttgtacaacttggtaaacttactagaaatcattcacttgctcacttgaagtggatgacttatgggctatgttagtccattttcacgctgctatgaagacatacctgagactggataatttatgaagataagaggtttaattgactcacagttcaactgtgagtcactgaatttgaatgtggaagttctggccagggcaatcaggcaggagaaggaaataaagggtattcaatcaggaaaagaggaagtcaaattgtccctgtttgcagatgacatgattgtatatctagaaatccccatcgtctcagcccaaaatcttcttaagctgataagcaacttcagcaaagtctcaggatacaaaatcaatgtgcaaaaatcacaagcattcttgtacaccaataacagacaaacagagagccaaatcatgagtgaactcccattcacaattgcttcaaagagaataagatacctaggaatccaacttacaagggatgtgaaggaccttttcaaggagaactacaaaccactgctcaatgaaataaaagaggatacaaacaaatggaagaacattccatgctcatgggtaggaagaatcaatattgtgaaaatggccatactgcccaaggtaatttatagattcaatgccatccccatcaagctaccaatgactttcttcacagaattggaaaaaactactttaaagttcatatggaaccaaaaaagggcccgcatcgccaagtcaatcctaagacaaaagaacaaagctggaggcatcacactacctgacttcaaactatactacaagcctacagtaaccaaaacagcatggtactggtatcaaaacagagatatagaccaatggaacagaacagagccctcagaaataatgccacatatttacagccatctgatctttgacaaatctgacaaaaacaagaaatggggaaaggattccctatttaataaatagtgctgggaaaactggctagccctatgtagaaagctgaaactggatcccttccttacaccttatacaaaaattaattcaagatggattaaagacttaaatgttagacctgaaaccataaaaaccctagaagaaaacctaggcaataccattcaggacataggcatgggcaaggacttcatgtctaaaacaccaaaaccaatggcaacaaaagccaaaattgacaaatgggatctaattaaactaaagagcttctgcacagcaaaagaaactaccatcagagtgaacaggcaacctacaaaatgggagaaaattttcgcaacctactcatctgacaaagggctaatatccagaatctacaatgaactcaaacaaatttacaagaaaaaaacaaccaaccccatcaaaaagacacagccaaaggacacatgaaaaaatgctcaccatcactggccatcagagaaatgaaaatcaaaaccacaatgagataccatctcacaccagttagaatggcgatcattaaaaagtcaggaaacaacaggtgctagagaggatgtggagaaataggaacacttttacactgttggtgggactgtaaactagttcgaccattgtggaagtcagtgtggcaatggctcaggcatctagaactagaaataccatttgacccagccatcccattactgggtatacacccaaaggattataaatcatgctgctataaagacacatgcacacgtatgtttattgcggcacttttcacaatagcaaagacttggatccaacccaaatgttcaacagtgatagactggattaagaaaatgtggcacatatacaccatggaatactatgcagccataaaaaatgatgagttcatgtcctttgtagggacatgtatgaagctggaaaccatcattctcagcaaactatcgcaaggacaaaaaaccaaacactgcatgttctcactcataggtgggaatggaacaatgagaacacatggacacaggaaggggaacatcacacactggggcctgttgtggggtggggggtgtggggagggatagcattaggatatatacctaatgttaaatgacgagttaatgggtgcagcacaccaacatgtcacatgtatacatatgtaactaacctgcgcattgtgcacatgtaccctaaaacttaaagtataagaagaaataaaaataaaaataaaagaaagaagttgggctaaataaaccccaaagtatctcttatgtcttcctattccaacattctatggctattttggcaaagtagcctcaatgaaatcactttttttccttgaaaaatatctaagtataaaagctcttctaaaaaaaattaaaatcaccaaacctttaaaaacttccccaaagaaattacagatccaagatacttgaaaagaaactttatttatcaataaagcattgttgttgaaggaatatttttatccttccaaaatatatgaaatcaaagccactacgcagcctacaatgaaaatgtctgaggtgggaagatacaacaagaatgaaaagaaagcagattataaacccatgtttatgagtttcatagacctttatgaactagaaagaaacctgtaaggatgatttaatgatgcttatacacttctaatttataccctctttcaataggaaacacttattaagctcgaatacaggtaagagaccatgtaagatcctgtagatatggtcatatacagggatgtgcatgtcttatgtatttgtgcatgggtgtttgtatatataatgtatagttaactcttttctggtgatagaaataatacattactgcttcattttgctattgaaatatatctaaagaacatgcaccaagaagtgccttaggtcatagaaaattaaggatgacttctatatcactataactttaataattttaacccttgtgaaaaaaatcgtttaactccatagagcctatacgggtagtatgcattatttaaatcaatggaattttcttctcagtttttttttgtgcaaaataagggacattctttagaaaattctgtgatacttcttatctagaaaataatttgataagtttaatatttatgccttaaaaacataacatatggcattatactctggtagtttgtattcttgtcagtgaagctaagctgggaattaattacattttccatatgtctcttacttgtatccctgcagattgaagttggccaagaaaggaagttacatgctatttggaaggtggaaaaagcaatggccataaccatttgaaaaatcttctcataggcagaatcagagacagacagaagaaagggtaccagagaggggccagcttgtcatcactcacttctgctccacatctagcttttcttgactactggtattgttgaccaacagagcctccaatccaccccagatgcttggctatgggcccacagaggtcgtggttattcagaggcaacagcttttcatagacctctccacaaatttcccctttgtggtcctactttgctggctagacatacttggtttctcaagctgactgagtggtaactctgtctctgatcctcaaacttctcttcaagtcctcttcttctccagctttctccacaattctaaacgaagtatcttatcccataacacccatagtgtttttgctccttggactaaaccttaatagatacaaattcctaatcaatggaagagaaaacctaactaaaataatgaagaaaaatatgatgattttaattaattaaaaaacccaaaaacatttatggatgaaggtggtggaaggtagtccaatcacagaatctctctcatccagtaagatgaagaaagacaacagtcacagattcaccaggagcaaccaaacaaggaaagtgtccagtctcatgcaaaacttctaagagtgctggccaccaaacagaaacaaaagattcatccacttctgtaagcagttgcccagaaagaagacgatttgaaaaaatctgagaattctggctatgaatgaattccattttggtaagagatggtttaaagtaatgattctcaaaatgagggctgcaagcagtttcaggggatctgtggtcaaaacccatcttacaaacagtttcagggggtctgtatggcccaagctattttaatgactatactaaggttttatttatcattttcaccatggtaacatttttactgaaggtactaaagcaatggtgggtaaaactgctggcagtttaacaagaatcaaggctgtggcaacacattttcttggtagccactgtatatctaatcactgcacatatagagtaaaaaataaaccaacaatttcacttaagaatgtccttgatgaaggtgtgtattacgattatccccattttacagatgagaacattgagatgcacagatgttaagtatgtttttcaaggtcaaacagccaataagtggtagaactggaattccaatctgggcagtatggcactagaaaaaaatagatagtacaattcaatttattcattcactatatttttattgagtacttaatatgaggcagatactactccagggatcggagatacaaaatgattatccatctgtccatccaaacatccattcattattctctctgcatatgtgcatagagacctatagtaatttctaggtagtataattttaggttagatgcctctctcttcttggtagttttctgtactgcttgaattttacaaataatgagcataagctatttttattaaaaacaataaagtaattattcttaagacaaaactgaacacaactaatttctcttttgaagaaaatacaaagtaaaatttcaagtcttaaaggagtatgaaaagactgctctgttctttcttccacttttaagtattctttcttcccactacctacatagcaacagaatatagtatacggaaaattcttttctaaaattgatttagaagacaaagtctccaaaatcttcccatcccacacagcagatactaaagcaattctttttaaaatacattattacaaagattctttataaaaaattaactgaaaattctagtggtattattgaatctcaaataaaaagaatgctaatgatgaagttatacatagaacatcactcatatgcacacttttcagaaattagacacttgccttcaggggaaatgagttctgtgaaagtgaaaatggcatattcaactagtcttcttattcctggggagagaatagcatacacattttaacaacaacatcaggaatacataaaagtacgtgtcctaataaaatctagatgtttctttgtaacctgattgatagtgctttttcaattgatggaattactaagatatttgcatttaaattttttctcagttttggttttaattcacattcattatttatatagtggataggacaatcatatgcactaatgtatattttaattttacagggtgaaaatttgtgatgctccaaagcttttgttttcaaaaattttggaccagtacggggtgctttttttcttttctctatcaaaacttgttagggtttcagaataaattggccatcctaatgtggaagtctaggaatctgggtatccaccttcttagaaccaataattccctttattataaaagtattcgaggaacattaaatgcactgattgaacctatttgttcttccagggtccagacctctaatctttattctttagacatgttgtttacaaatgccagtcttagattggtgctgaactgaccacatacaaatacaagcagagcttattaaaaagatacatttatagtctctactttgagaaattttaatttagtagtttagaattggaagccaaaatttatatttgtgaagagttctccagattattttcatatatagccagatctgagaactactgacttagaatatcctaaaaaagacaggtggatcatgaggtcaggagatcgagaccatcctggctaacatggtgaaaccccgtctttactaaaaatacaaaaaattagccgggcgtggtggcgggcatctgtagtcccagctactccagaggctgaggcaggagaatggtgtgaacccgggaggcggagcctgcagtgagccgagatcatgccactgcactccagcctgggcgacagagcaagactccgtttcaaaaaaaaaaaaaaaaaaaaatgacagagctgtgatgtcacatggagcaaacactttcttggttaatttactgtcaccccaaaaaagacatggagaaatatcttgctagatttccatattctcctgtttcccaagttttagtcagaattacaactaaagaagccaataagcatttttgttagctgaaacacttaaaaactattaaaaatatcaaaacttcagggggaagaaacatttatcatgaagctaatgaagcttaagttccacagctaatcacatgcatgggccactctgagtgctgattattgttgaaagtggcagtgccctgagtgaagagtggaagccaggttgcaatcagaatgcattctttgtaagtgtatctgggaaatggcctaaagagatctcagacaatgtgtgtctgaatctccaaggcaccaatacacttattattatatttttttattataaataaatattcatttttgtatctaattttgtattcatgatttgcatactttttcttacagttgtttttcccaaacaaacactattcaagtcctatataacctggatccatccatgtgtcaatgatcaatattaaggattcagtgcagaaatatcagggctatttagaggtattccattggaaaatgattacacatgagatcacttgaaaatgcacattagcagataatctttgaagactcctctaagaagaatctgggtagagggtgcaaaggtcttgtagaaagaaagagcatggcatattcaaggaaataaaattaataggttagaaactgaagcaaatagttcaaggggaggttgaggggagatgaaaccacaggaaccaatcactgaagccacattaaggagttttaaccttgtccttaaggcgaaaggaactaccaaagtgttctaagcataaaattgacaggagaaaaattatatttttgcaaatttattccgggctgtgatgtgtagatcagagggttgtctcagtacacttttgctgctataacaaaatactacaaactgaataatttacaaattattcagtcttgaataattggcctcctggttctggaggctaggaagttcaagatcaaggttccagcattagtgtttggtgaggggtgctctctgcttctaagatgctgtcccattgctgcagcctccagagggacaaacactgtgtcctctcatagcaaaaatgacagggaagagggtgctctcttcaaccttgagcccatttataaggatgttaatcctgatagtgacaggaaacagacaaattccttaggcagacagggacaagtccccagtgaaatccaaccttcaagccaagggcagtctaaaacctgaaaaccaagctgccacttctggatagagtccatgacaggagtgagaacttccatccctgtcttgcccagtctctcttggttggttccttctgaatgatgccttttcaatccaaaggtgctttttccaagaccagccatggacaaatcagcgtgcattcccctattttaagcccataaaaaccccagatgacaacccacttttgggtccccctcccactgacagctttctttctgtggctcaataaaattctactctgccttactcactctccagtgttcatgtaccttattcctcttggttgtgggacaagaacctggaactcactgaaatgcaggagtggaagctgtgctgagctgtgggcagcaggaataaaagagctgtaactctctctccctctcatggaacaatgggagagaagaagcgaagctgctgggcaccactccctcctactaaccaaggtatgggagtgaagaagtgaagccactgggtgccactccctcctgcttgctgaactatgggagtaaaaaagctgcaacaatcccattcatgagggcagaacccacaggtctaatcacctttcaaaagtcatacttcttaatactactgcattgggcattaagttacaacatgagttttggagaagacatcatgatttaaaccatagcattccactcttggatcctcaaaattcatgtttttctcacatacgaaatacatcattccattccagtagaccccaaaagtcttaacttgtttcagaatcaactttaaagtctaagtccaaagtcttatctaaatatcatctaaatcagatgtgagtgagactcaaggtataaatcatctcaggcaaattactctctagctatgagcctgtgaaatcaaacaaattatctactttcaaaatacaatggtgagataggcatgacacagacattttcatctcaaaagggagaaataggcaagaagaaagaagtaatacgtttcaagtaagtccaaaacctaaaagggaaaacaacgttgaatatcaagtcttgagaataatcttcttcagctctatctcctgtcttacggacttactgagactgaagttgggctccaaaggccctgggggatcccacccccatggctttgctggatgctgctcatgcagcagttctcatgagttggagtcatgtgcctgcaagctgggattgcactctggcagttctagagttctggagtttcagggcagccttactcccacagcttcatgagacattgactaagtagagactctgtggtggccccaccttcacagacctgctaggcattgccctggtggggactttttgcagtggccccaccccatgactctgctaggcattgctctactggagactctctgcagccaccctgctcctgtggcatttctttgcctggccacctgagactctctgagtcatcctttgaaatctaggtggaggtagcaatacctccacagcttgtgtactttgcatgcttgcaatcttagcaccacttcaatgatgaatgttgataccttttaaccccacagctgggagcagttcaccagagtatgggggaggagagacttgaggtgaccctgggcagcaaaccccaaggttccacaggtgccctgggcccctcctttgaaacttctgccttcaagtctctggtattcttggcctgtgatgggagtggcagtctcaaagatctccaaaatgccttcagagttattcttccattgttttgatcaatagcatctggcttccctctattcatactaatttccttatcaatgagtagcttggccacatcctcagttttccctccttaaccatacttttgttctttatataaccaagctgaaattttttcaaatctttaccttctgctctacttttgaccgtaaattcaatctcgagcattttttctcttctcacactttactataagcggttaagaaaagccatgcaccaccctgaacactttgcctagagatttcttccaccaaatgtcttagttcatggcccttaaattttgccttccacaaaggattaggacatgaacataattcaggcagttctttgccactttgtaacaaagatgacctttcctccagtttccaataagatatgccttatttccatctaagatgtcttcaaaatgctcttttctatccatatttctacccacagtctgttcatgaccacttagataatatctaacactgaagcttttatactgcttttctcttctgagacctcaccagaattgccctaaatgctccattcacagcaatctaggctttttctagcacgcactttaaaactggtcaagcctctacccattatctatttccaaagctgtttccatattttcaggtatttgttataacaataccttacttatggtaccaatctgtaagccaaaaataaaatcctaggccctcaaccaaatgactggaccctctttgggccaaacagacccctagagaaacctgaaaaactgaattctcagccatgacaaaaagggaggtcagacactccttgttatactctcttcctgttggagtttaggcacaactgaccagcactgacattaaaatagagatcataagactgatctccttgaggcaataagatatcatattagaacctactctggtacagcattacatgacagatagcagaccctgaaggaaatcaaaatactttactccaaaatacatttctgtgacataatttaaaatggccctgcaaagctgcctttggtgggggaaatttgcatctgtagacaatctccattaatgcagccaggactttccctgatttaggaaagattaactaagagtctaacaccttttaaggtccaaaaagagacatttacatctattctctgtgatggctgttacctataaagcttcatctgtctttggtctccacaactccccttatgttaactcaagaatgtctttctacagacttatagtccttagtaagnnnnnnnnnnnnnnnnnnnnnnnnnnnnnnnnnnnnnnnnnnnnnnnnnnnnnnnnnnnnnnnnnnnnnnnnnnnnnnnnnnnnnnnnnnnnnnnnnnnngaattctttttcgtaccattgctttttctaaacaataatttctatccatggtatgtggatttggaagttagtcttttagagacttagctttgcagacattaccttaggctcagaagtctgacttaaatcagggtctggatgtagtgaaagcctcctggggatggtttgaaaaaatctagctgtacatgttgctacagtatttatttatatctatttttattttttatttttgagacagagtctcgctctattgcccaggctggagtacagtggcgtgatcttggctcactgcagcctctgccttccatgttcaagcgattctcctgcctcagtaggagaatctactactcctactgggactacaggcacatgccaccatgcctggctaattttttgtatttttagtagagacggggtttcaccatgttagccagaatggtctcgatctcctgacctcatgatccgcccgccttggcctcccaaaatgctgggattacaggcatgagccactgtgcccagccagtatttatttttaatgtgggaaagagttgctagaggtagcaaacatatgaataacctgaggataggaaggtaacgtatgaaaatggttttctgagagggaacgttcatgctctgaaaaacagatggagcagaaagctttataaagaagctgccttttcctttcctctggaattgttgaacaacatctttgagggaaacatgacataatattttgataattttagtgagtgtatgtatttgagcaaggctggtattgagttgtaggctgtttggcatggtaaaagtttgaattctccagagctgcttttaatccatttgcaatgcctgtgttttttcttgtgagcagtgtgtatcctcatcaggggctgcctcaatgcatatccatctggaggaggctactcagctttaattaaagaaacagtggttgagagggtccgcctacaaccactgaaagtaataaatgtacatggtgtaaaattcaaatactgccaaaaagtatgcactgagaaacaagtccccctgtatgactggtttggggcgtagcttccagagatactctctgcacatacaagtacagtttttttaatacgatgattgcctaccatacacactgtatgcaccagtacctatttacttttagtccatcaaacagccagagtcttaagaataacaccgagtataattttttaaaatctttgtatgctccccaaataagcccaagttttctttatgtagtttcttctacttaggaactttaaatgaataggtccacatgagttatggactttattgtgaaaatagtcattgctctgaatatgggattcttattgagcattacatctgattccttgataaaatattttagggtgagagcacctactgtgtaccaggcactgtgctaggcattggaaatgtaacagtaagcttgacaagcgaggtccttgtccttgagacctggtgggataaacacacacagaacagatgcctgagaaacagagtattccttaaagtaggaccttggcctggatgggggaactgaggaagtgacctttccttacccctcaatcttctttcctttcctcctttgtcaaattaatctcattagattaatagtctttatcagatgttttaattcaaatataattcagtctagtctctagatatagaaatgccatactagtcacatgttaattgttttatatttgcaagtaacttcattaaatgggcacctgggatgtatggaacagcttaataaaccaacatttctgcactgtagttaaattgatcctttagctacaatatgaaaatttttatttaaagaaaaacagagcctggattatgtcacagtgcaaaatacgaaacacatttctagtttgaatgcataattcttggatttccctgcctctgaatgatttctaaatctggaagatttggatcctgtcaatttatttagcttacggaaaagtcatctgatctatacttcaggttcattagaaactccttttacatcatgtccttaggtaacagttttatgaaaatttctgtaactcatgattgcagttttgttcttacaatctccaggtattttatttaaaaataagaaataaaattgtacaacctatcaactgtgtgatcattagcttgattaagatatagctcacctgctgttaatttatttatcttagtaagccatgtggtgtgcatgagcttattttactctttcactttgttctgtgattaataaactacttccatggaattttgggattgagtttagaggccatatatcccattctgtaatttacagatagtatcccagatctcacagctaattagaattagagctaaggctagaactcaggacttctgacccattttataggaaagggtggttcactgtgtttttagtatgttatatatttacgtggcttaaaagtccaaagaggctgtacacgttggctcacgtctataatcccagcactttggaaggtgggggtgggtggattgcttgagctttggagtttgagaccagcctgggcaacatggcgaaaccctgtctctacaaagtatacaaaaattagccaggcgtggtggcacatgcctgtagtcccacctacttgggaggctgaggtgggaggatcacttgagcccaggaggcagaagttgcagtgaaccgagatcactccactgcactccatcctaggtgacagagactctctgtgtcttaaaaaacaaaaacaaaaacagaaaaacccaaaaatggccaaagattatcaaatagcatctgtttatatactgagaagcccagacgcgttgactctgttacccttcaccttctgttgatgtattatattagttgtcttgtttatcctcctagcatttccttatgtagatacaggcaaataaaaatggtttcttattgtcccacttttctttaaaaacagcgtgctgactgtatatgcgattctgccacttttttttttctctcaagaaagtttaaatttaagctcctgaaaaaagtcagtgtgcctacagataccactttattttgtccacttagaactaggttgctatctttagcttaattctagcatatgagaaatgtgagatagttctatgaagactgtagtgaaaaaaaaaagattagaaatgtaaagtacaaggtgggaaattattgaaattgctattatttaacccaaagaagaaaaagtttgggcattattactttatagatgaggaaaggggaggctcagatggaggtaaagtaccttacccacagtcacccaagcactcggagtctcaatgggggcctgcactcagattagcctgccagtattgaagtctcaattcctcatctgctacaggagcctgatacatttgtgagtgacaagtatagtcgatactcattatttgcggattccatatttgcaaatttacctatttgctaaaatttatttttaacccaaaatcaatacttgtggttttatggtcattcacagtcatgcaagcagagcagcaaaaaaaaaaatgtgtttcctgacacgcgtgtttccagctgaggttgaacaaggcagtctctgccttttcttatactataaacaagtgtccttctgatggtcgattaagtgccacagttttttgtatttttgtgctttttgttgatcattttgctgtttaaagtgatcccaaagcatcgtgcaaaactgtttagtgtttacaagaaggctgtggtgtcttacagagaaaatgtgtgtttaaggtaagctcatagtgctattgtaagttagagttctagtgctgtactgctgttggcgtgagttcaatattaacaaatcaacaatatgtcatagttttgtgactgcagtgatagtgccattggcgtgagttcattgttagtgaatcaacactgtatacattaaataaggtgtttttaaactgaaacactcagaaaacaaagttatgtattgatcagttgatgaaattattgtgaccagaggcttgtaggaacccacactgtgttttcactagttcagtattccagtaattcaatgttcacagcaacttcatggaacataacttctgggaataatgagaacagatagtaaatgcaaagccagaaatagtcagcttcctgccagttctagctatgttttatttcttttcattctaccctaaggtacaggaggaataatttagtttagctataagaaaaaaaaaaacaactagctgggcgtggtggctcatgcctgtaatctcagcactttgcgaggccaaggtgggtgaattgcttgagcccaggagttcaagaccagcctgggcgacagagtgaaaccccatctctacaaaaaatacaaaaattaacctggtgtgatggtgcattcctgtagtcccagctactcaggagctgaggtgggaggactgcctgaaaccgggagaggtctaggctgcagtgagctatgattgtgccactgcactccagcctgtgacagagtgagagcctgtctcaaaagaaaaagaaaagaaaagaaaaaacaaacaaacccatgacttcctattgagataactcaggactatgaaatacaaggttaaattgcttattataaaacatcataacaattgagacattttgaaagttgctgacagtggtgttactgatagtatagcatggtgactaagagtgtcatcagtccacctggattccattcccttctgtaccatttgtcctgtgtgaccttgagcaaaatacctaacatctttgtgcttcagcagtcatgtgtgtaaaatggagatgataccactaactacttctttgggttattatggaagttaaacgaatcagtcagtcagtctatggaaagccattagactagctcctggtatacagttagtgctttttaaatgattagagtaattgcatctcctcatttgcccaggataattttagttgtgattagctgcccctttcattctcaaaagatatcccaatttggaggataaattgtatggtcaccctctaatgtaaggatgattcataattatcagctaatactgaattattggctatttctgtaaatacctgttgggacgattgatttctttttcttcttcaagaagtaagttgaaaaactccctcctcctggttttggagggctgcttggagaagagaaatgggagaggaacaggttgagtattcacatgtggcataattgtgtgttgtttccttattttgtgtttttgctcagtgaaagaaagtggtctagaatctggttctggcatagagagattatatctttcccactggacagctctttctctagtagccaggaaagacttgtgggaaatatagtttatattttagaacagttttaggttataggaaaattgagcagcaagtacagagttcttatataccccctgatgctgctcccaccccacacagcttctaccctactatcaacatcccacatcagaatggtacatttgttgtaattgatgaagctacattgacacatcactatcacctaaagtacataatttacattacggtttgctcttgatgttctacactctatgggatggataaatgtataatggcatgtgttcatcattattagtatcatacagaatagtttcactgctctaaatatcctctgtgttccacctgttcatccctccctctccttaagcccctgacaaccagtgatcttttttattatttctatagttttgccttttctaatgctgttgagttttgcagtagttatttgtcccttgtcccacatagtcttttgagatggctatgagacataagaggcactattgaacaggcaggcaagcaggtttggatttgggccatttgaaggctggagacatatttgggagtggttagcatgtagatggaatttcaagcaatggtgctgaaagagattattggagaaagactagagatagagaagataaagctgagcaccaagccctgacaccttccaacactaagatattgagaagttgggggtgggggaggactggccaagaatgctgagaaggagatgccagtgggagtagaaggaaaccccggattatgtgtgctctagaaggcaagcaggatgtaattttttttcttcttcttccatatttataaaggaagaatcaacataccttaagaatggtttcaatctcttgtggcattcttttgaggatcagtattttgcgccatgtcaatgagatacagagttgtagacaggaaaggctctgcgcaagaggcaggtgcgaccggctcattcagggtgtcatcagtgtaaaaaggatacacttttggaactctggagtcatggcatggcccctgtgccttccagaagattattggagtaatcagcatcacttccaaagaagtgaaaagtgaaggggaggtagagcacttcagtaaatgcagtagatgctgttgaagtttcacagtagctgtggaatgtggatgagtcttctgctttcatttgttttcagaatgtggaaagcacaggttgtgtttaaagacaggccagcctaggcagagcctgccatggccaggcaccatggtgcacacctgtaatcccagcactttgggaggacaaggcaggtggattgcttgaggccagtagttcaagaccagcctggccaatatggcaaaccccatctttactaaaaataaaaaagttagctgggcgtggtggtgtgtgcctgtagtcccagctactctgtaggctgagacatgagaattgcttgaacccaggaggtagaggttgcagtgagccgagatcacatgagtgcactctagcctgggcaacagagcaagactctgtctcaaaagaacaaaaccaaaaacaaaagcaaaggaagagccagccatatagaacagatacattcattctaaggggaacatgttcatcctcaatatgtttcttcttataaaataaacatccaagggtttttttgggtcatttgtagtgatttgatttccaaaaataattagctttataaacataaattgcataagtaatgtccccattttataactctaagttgtcattatggaagggataggctgtgctgtaaaattgttgactttgaagtaaaatgcttattaaggatcatgagtaccaattttcacatatgtcgtagcctatgttgtagccaaagtcgacatttgagaaatggttaaggttttacagcaacgtttactttattatcagaatatagtatattcagtcaagtactattaataccatttcatatcgtaattatgccatttcaagggaatttattagaaaggtttacatggattcttctttgcattaccctccactcctgccacccccccaccccacctgcagccatccacgtaaaaattcattatgttactgccttggatttttgccaatatagaataaataattggatttagcttctgttacagttttgtctgtctcagattatgaatgtaagttggtaagattttctgccaattttaattcaccaagattgcattaaaattatgaagagacgattgaatgtaatttttctttcctttactcctgtaattgaactgtaaaagttctcaattaattacagttcttacagagtatcaattattgcaatttgcaaactccagagcctttataatgaaagataaacattttacaaccatacatttgtcaacgtttgatgctaattgcagcaattaattcgttctttaatgtttaatgttttataggttaatgaaagctggcattctcttccctctttatgttaatatgagaaacttttcaggagtagggtacagattgatacatgtataaaactatttttgcagtctattgcttgtcttagcaactaaatgaaaaccagaggttgcagaggtttgcttattcttttctctgcatatgtagagtggaggcctgcaggttcctgacaaacaagagcagaagtttaatgagtccctaaaaactcagtttgtttctaaataaaacataaatttggagagttgaaatgagtgatttcagaaacctctttggcttgggtgaaaattgcatcttctcaagtatttcttaaatgccttgtcatttgaagatgataatagtatctatgaccatttattcagcccagtgtgctgagtactgtggtaagttcttttagtactttatgttatttaatccagaattcagacaagatctgactccagagctctctctacagggagacaagttcaaatacctgccctggcagccaggccatatagcttagtaaagtaggatgggtgtgagatgggtctgagtagtgggatcaccataaactgggctgtgagtacagcgccagtcattccagccatggtggaatgtaagctcagtgttgccagatctactgatgtttcagaaaaagtgggaaatctagatgtgtgggtgcacttccttaatttttaaatgtttggagctaatttaggtttttaaaatacatgtgtagggcagtttcaacccaccagccatccatttgagagctccgaagcacactgtgttggcttgatcttttggtctgaattagcttgatacaatggctggggcttgtgcctatgcatcaggtggcactcttgaagttcctcagagagcctctctacaaattcagcaggggttggagggaagaagggaaaatatatcttaatgaattatattaataaatactaatatgtaatttgaggcattgaggaaatacaattatataactttcagtgataaagcatgctgatctttccttcattttccttcctgttacagttaattgggcaatcagttaaataatatgcctttgtcagattttttatattagagcacctaaaggatcaggtagatttcttttttatagtattaacacagaagtaaaaacaaagtagcctttctttaaaagaatgaggaaatgtatacatacatatacatactcatttttttttctgaattaaaaaatagttaagaaatttgagttggcttggcaaagaaaactgagaaaatgcttaaaattagaaaatatatagacatatactttttataagcattgcaaagaaaaatgatggagactatttttatgttcaatctctaactgtcctaggcatagtgtaagtgccctccgcatgcaagtcatgatttactgtgaatgggtctcctgtatatactgcttttagcctgtatgttttttaaaaaattgaatttaccattctgtgtcataagactagagggtaaagttcagattttgaaagtctaagaaaatgtgatggcatcccattcatcttgtattaaaggttctataaaccgtaatggttagatctttgacctctgttcctacacctgcagctagtcctaaatcaaagtgtttaagcctgacatgggctgtacctgtaactcagtgtggaagctgcatattgtaggctatttctactgttggagagggagggcgggcattgtggtaactctttttaccttttcatatgttcattaactttccaaggaaatgaaatgcttccctcttctttttctacggttacatttcaagctagtgttaaaaaaaaaagtgcaaggaattaatgtaccaaaccctggagatgtgtaaaagaaaaacctttaaaattgtattttcaaaaatcttgagtccttttaacattcctatagataatttagtaaagataaatcgtacttactttttcatgaagctaattgcctctggtttgtatcccctgagaaatactaatttacaaattagaacctacaaatgatttttgtttcaaagaccacttttgtttcagagaccactttccagggaacaattctcaataacggaaggagggtgttttagttcccccttcaaaggaaggtattggcactgtatgttttgttttgttttgttttgttttacaaagaagccagatggtatttattttgcatagctgtaataagttctaaggaaagcacttggaaatggtactaatgtttaatggaaagatgtataaacccacttgggaactgtaaagcattatgcaaggtatagtttagctatttaatataataacaggtaatcattctgtgctggctttgttattagcacaggtgccagggcattttggggctctgacattttatagaaaccagagtagctgctgacaactcaaacagtattgttaccgtggcagggcctggatcccacagtctagctatccagtggtgcctaccttctgttctgcaggtatatctttctccatcccttttaaaccggagactatcaccctgtgaaaggatcacagtgcagccttcccctgagtaaatgacaaataggcagtttctttagtatttttcacattcctgcacctggctgggagccagctctgcttttgtggcagaaagtgaggctggagagaatgtttgggagccaatctttggtagggaagtgacaaaatgcaagggtatatgtatatgggccaaagttaagataaacttttttttggtagttttcactgtaattattaagaggcaattaaaaaaaagaggtaacactagaaaatgacaaactcccagaaggtgtgattacttacaaatcagctgctctgggtcctggtgagtgacatagtcctggtgatcagtgtcagcatccttcacaagcaatgaaaggagagttcgcaatgacgctgcttcacaggatgtagatgggtccaggcatttaggctggctgagaggcataaagtggctgagatttggttgggaagaaccaagatgaggcgtgcctctgtgtgctttacgtagacggtgttgtatggttagaagccagtagttagaaattcggtttgaaaagccgggtctgatgtttcagagaaaaagggtaatgcggccagagacgtttttagaagcagattttggtagattctttttaccttttaaaaaaatacatatatatatctttttatgagatgaggttttcttacattgcccaggctagtctcgaactcttgggcttaaacaatcctcttgcttcagtctcctgaatagctaaaattataggcatacacctctgtgcctggcttggtagagtctctaaaaggggattgatgcaagaataaaagggagaagagtaaataccataaaaagcccattgcagaaggtgtgtgtttcaaagccagggtagagaaataagtaagggatgcatgtataaaacagaacaacattggtgaaatgtgactgtttatggtttacaaattactgattggcagcaggaaacatagatttaagaatatacatgctacagaaatttccctaaagaagtaacgtattttataattctaaatttactgttattaaagttagaggctgccagcagcttggttatggtcaaatgccaggtaagattttgggatatgaaacatttgacccttctgaactaagttcacatgcattggacctctccgaaagccttgtaagagggtataaaagcaaactttccttagcttcctacaagtgaaaccattatttcctcttaccagggtaccttgcatggtgattaggcagaaggataagagttgtgatgtgttaaaggctgtgcaggactggctttagtgtggacataactgtctctaattccctggtgtgactggggtgggggacatgttggctgaattccctctcactgaccctacaaatacaaagatgcttaacattccacatctctcagccatttggatctatagagtggtttcggattgtgttccatcaggcctggaattccctgaaggcactttagggtctgccaatttgggtgtcagggaagcaaataactgggccctgggcctcctgaccctgctacaagcagaacagctctcttttattgtggaagtcttgggacttttcataagattcacttgaaaagggatgaaacacatacaaaatccactatctggggaagcaggaaaagagagcattctgtatgtgaacaaaactagctgatacaagccccggccctccatccatttctctagctgctgcacttattaaaagggctttattggccaggtacagtggctcacacctgtaacaatcccagcactttgggaggccgaggcaggcagatcacgagatgtggagttcgagaccagcctggccaacctggtgaacccctgtctctcctaagaatacaaaaattagcctggcatggtggtgggcgcctgtaatcccagctactcgggaggctgaggcaagagaatcgcttgaacccgggaggtggaggttgcagtgagctgagaccatgccactgcactccagcctggttgatagagtgagactccatcttaaaaaacaataaataaataaataaaaataaaagctttattgagatcacaattcatatgccatacaaataacccattaaaattgtataatttagtgatttttagtatagtcatagattgtgcaaccatcaccagagttttacgatttcatcacctcaaaaagaaatgccctacccattagcgctcactccacatttccccccacacttccccagctctaggctgccaccagtctactttctgtttctatagatttgactgttctggagatttcatatgaatagaaaatataaaatgtggtctttgatgactgctttcttttacctagcataaagttttcaaggtttatccatattgtaatgtgtaagtaagtacctttcattgctgaataatatgttattgtgtgaatatatcacattttatttatccattcattaattgatggatattgggttcttttttattttaaattatgctgctatgaacatttgtgttgaagtttttgtgctttcgatttttatttccctcgggtatatacttaggagtggaattgaagggtcatatggaaactatgtttaacattttgaagaactgccggcctcttcttaagtggatatgtgtagacttgcagctggcctctttaccacctttgcacctcagttcagctttttccagccctacaccctgcccttcaccctgctccctccagggttactttcctaaaataccagaaaccctagtggttctcttgttactttgaaacaaattgaaactctctaatagggcatttcgagttctacatggtctaggcccaggctatgtttataatttcatttaatagtaatttccaagttcttgcgtagatgtttcattatacaagcactagatgtttcattatacaagtcagtgattattgaacttccttttagttatggacccctttgaaaatcatccaatagccatacgtttcttgcttcctcaaaaaaaaatatgcatgtataattgtactgacaacaacaaacctggcatgcaagttcagagagtttgtgattgctctggcaccattagcaaaccatgaagttcaccaacacattggctgggcacaatctgagtgttctttgttcaaactactctctcacctctcttctcccttttctccttcctgctgattgcctaatgagaagctttcttgctttttagagtatctttcagagaatctgctggaaaggaaggtggtttggctcctttttccaccattgctgctccacagttgtgtgtgcagtcctgcagcagggccttgagggaattgaacagggagggctagcctctctgagaactagatggtgagtgccatgaagacagagacttttgttggaattgtcctgggctgtgtattttatgtgtctagaatagagcctggcacatagtaggcattcactaagtagtcactgaaagaatgggtagggaagggaattgaatctggaaccatcagctttctgggatggatgaagctatatatagtagggcccatgagttacaagggacccgtatgcagatactggatgttggttactgggaatggaacaagaggttagaagagagtttctaagacagattaagaggatgtattagttttctattgctgctataacaaattacaacaaacttagtggtttaaaacaacacaaatttattctttttcaattctgaaggtgggaagtctgaaatcaatttcactgggctaaagtcatggtgtcactaggctgtttccttctggaggctgtaggggagaatccgttttcttgcctttttcagcttctagaagtcacttttgtatcgtggcttatgaatttttctgtcttcaaagcctactgtgtaccatcttctctgatttctacttctcttctgactcttatcctcctgcctccctctcttataaggacctctgtgattactttaagcccacctggataatccaggatgattttcccatctcagtatcattaattacttctataaaatcacttttaccatgtaagataacatattcacaggacatggacatttttgagatgatggacattaataatggacatgtacatggccatcatttagcctgccacagggggctctaaaaataaacatggcgccctttgtgtttttgccaagtgtgtctgttccttgctcagggcttcttaattgtgacatgacttcttcctcacaatgattacgctaaggccaaggacagtgtttgcatgtaaagaaatgttccaccacttctcagttgctgagaactgttagttttccctggttcatttctctcccacatgtaactcactggggaggtaccaacacaaaggacttaaaaaggtctgtgctgcatcctcctctaattttgtcattggtaagtacctactacatttttaaaaagttgatgagaaagtgtttacctgtgattctgagcagatctggtgtatggcaggattatgttacacctgcccacccagacttaatggaaatacagtatagaatgaggcttgctgtccttgaactgcatgaactagaaaatgaagaaagcctgctggcattatttaaaagacttgtgaattctatgaattcatataggaggaaaaggcattttattgcactttaaatgacaattaatgttaatgagcgtgtaccatgtgccagatcatgttctaagcacttaacatgttttagctcatttagtcagcatgagaacctaatgagatcataccattagattcccattttgcaaataaggaaataaaggcatgatatggggacataaaattgcctaagggtatatggctaataaaagaggaagctggggtttgaatccaggtggtttggctccagagcttgcatttgtaaccagtaccctgctaacatttcccaaagaggtgatgtgcatggtacatgattagccttgctagtgctacagtatgtacagtgtggcaatctgtgaaatggactttgtctggaagtgtattcacttacagatattatagagtttactcatgaggtaacagatcccatctcaccaatatcgaaggaaaatgaaaacataaagattgggaaaaagagggtggaaagtctggtctttggtgtcgaggaggtgatttggaaacctaataagcacactttccctcttttcattgttttattctatctttgatttacaagaccttttcttcctggcatgcttcctttttctcttggttgccagtggtctttcttgggctgattattgtctgtagcaggactgaaggttggccctgtgttctccactcgtttgttttgtttcaatagatgaataaatggaaatttatcatttccaaatctacttaaaatcagggcaaggacttatttaccccatacttcttattcttctgatgctttgctaatccatgctaataatatttaaaaagaaagtattttaaagcctttgattaaagttgaaggggagggttttgtgaaaggggtaaactggaatcagctgcttcatatgagctggagcaggattggaaaatatcagaaaggaagtgaaatcctatttccctcacatagacaagcatcattttccttaggatattatggcttaggaaattgacctctagagtttttcaaaattctgtgccctggttccatttttttgtgtgtttgttttgttttaatgaaactgatggaagccacagaaagcatttctttttttttttttggaagacagctttcggggggcatatttaataaagcctgagatacaaggatttggggctcactttaaatgttatttttaccattggctgaatttggatttgaattatcatgggtgctccctgaaaaagaattggaaatagtgcccaaagagaaatgcgttctttcctgtactgatttttatcccagaatgaccagtccacaataggaaagggggctttggcatgcaaaagcttttttgttttacttgacttcattccagtattctgtaaattcattcttggtgcagtttccaagcagcaactaagaatccacattctcccagtttgtttataatttattatttataccccaactgcatccataaaaggctcaaggaaacttacaataaaatacatgtactcaatgagactgtttaagtgggaaacaaaacaaggcaaacaaggcagggttgaagagagcaagcatgcctagccacttctgtaagaggtactatgagtgaggattaaacagcacttcccttctgagcagccaaaatggaaaggtcacataattggttttatagcaatcgtatcctaaaagcaaatgttccttagaagttagaaacctttcctagggttgagttttcaagaatttttgccaggcaatggattagcaaaactgttcttgaagatacaagcctggcatggaggctgctgtgtaaggagtataaacttccacacgttatatttgccaacctgattctgacagctgggaaagccggcctctcagcagagctcacccccatcagaagtgataattaatgtggttattaaatcatgcctggtagacacttgctttgtattttttctcattcttcttggaagaatgcactttaatagtggggcaaggaagaataataggtacctagtattgattcattcagcacatctgttgagtgtttactctttgttaggcactggagatcccggggtgaacaggcatacttgtctgtgtcttcatgatcatatataaaattaggggtcagttttcattagatggaaattaatagttatatccacattttaaaaacgtaattataaattgaaaagctctctgtaataacccagagcatctcaggcccaagcattcacagaccgttttctcttctaaggatgttatgataagagtgctggcatatgttttctgtcattcattatccctatttctgaggagtgttatcctcatttctgggacaaattaaaatatgggtgaatgcatttgagtagcactgaaacaaaagaatcaagcgtgcaggttaccatggaaacaagttcctttttctccactttgtttctgtgaggcaagttcagatgataaatactttaaatggtcatttttaggcaaaaactcagtcttaatagtattagaatttcaaggtcttttttatactgttttcctatatttgtatggtcttgtatatattccttctagcaaatacattatcaataagaggaagggctaagtaagttggagccttaactgatacggaagagttgagggacacttggttttgtagtctctctttgcctctccctcccctggcccccagtacccctctccttttttgggatttgccaggtgccttgaactgaaggtgtctgtgcagagctggatttaaatctaagcaggctctgtgttgtgtggtattaaggctaagaaaaccctttgattcaaagaccagaaaatacccttagcttatatacccttagaaaatacctcagtctctgccatatatccaggctgatctcaaaggtttaacaggatgataagaattgtttaacaaaaattatcctagagattttaaggaccaaacagtagctatcagaatgggaatgagaactaccagagcatttttgtttagaactcttttttcccctcacatcccaaaccacttttaatttcttatcctcttattatccatccagagataaaatttcagaagaaaaggctaaaatagaatgtgagaagacatatagtctgctgaaaaggaagtctcttgagacctttaccagatcaggatgtaggtaggatattttctgattgagaagcaactgtcctatatttgtgtcgaatcaacacatttcctatcactgttagtctctggtgaaggattcatcgatgagcttcatcttcctcagcactgattttgatgtattgttaatggctgcctggagtgcaaactctgcatgtaggcagagtgccagacagttactgatgcctgccatgggttagtggcggtgcgcttgccatgcttttattctccctgatccagtatgtcaaaagaaactgacttcaaccttcagtgtcaatgtgaccaccaaaaaaattccaaataaagcagccccaaatcttacttaccggcagcagaatataaattcattttggtagagtacagaatgttctgtattaggaaagtatttccagcagcacatacttcgctgccacttatctggaatatttctttgtttagggaagatattttattatataacaacaacttagacatgtgaaatctgcctggtatgttacaagtctccagcctaagtgaatatgaccttctctggtaggatactgcagccatttagattgacagctcatttaagtgagggagacgtccaagaatgatttcagtttgctttaggcagatggatattaatgaagaaaaagtaccttgaaaggatgccattctgaggagggcaccggacagcggcattgattataaccagagctccttttttctgtgtttccagagctagagtgctgagtgctgcgctgcttagtctctctgtcatccttctgaattggataggggaggggctggtctggcaggtttttcagaaaatgcagctggcattgaagaaactcagattggactgggtctctctttagtaatcctaattgaagaattgtaaagacttgtgctgggagtttgtgtcttcattggtggcccttcctgtacctagcacagttctgggaagccaacttgtggtcaattaaatatatgttgacttatcagtgataaaagcaaggtagagactgacccaatttgtgggcattactttcttagtaaaataataatagaacgaaattcttttacatgtttcacctttatcattttttatttaaaacaataaatttcatttgtttatgtattcactgatcaaatatttgactgtctcctatattccaggtactatggccaagtctgggtgggtgggtggttgggtgtgtgtgtgtgtatatatacacacacaatatatatatacacacacactatatatatatataaatatagtagtgaacacaacagacatggccctatcctctaaaccttgctaagagagacaaaagtaaacaaaaattataaaagaattaattgccatcatagtaggtacactgaagaaaatatatggggatttatgaagtcatagaacaagagaacttagcctatcccagcaggttcagggaaagcttcctggaatagatgaaatttaatctgatgcatgaaggatgagtgggattcatgagggaaaaaggggagcgagaataggagggccaaaatgaataacccccagagggcttcacagggcacctgtaaaccaatatttgatcacactgtgtcaaccaggaccagagcacattgctggctgtgattttcctgattatctttcttggaggctgaacctgatatggttgctgacccttctgttgtctgcacattttgtcatggcgtggatcttactgtgaacatctgcactacgttgatttgtgtaatttatttgctgagaccattcaacattaatcttggaaaatgatctttttctttgcagttccagctgctactcttcttgctggatgtcttagttgagggttggccagtagtaacaggtgggcaagatcagctcaccgctgagagctgaggcagcaggtgttttggttcaagcacagggtctggctctggtttcaaatgaagttgtgacttaagcactctttgccttggttttcttatctataaaatgggtataatgaccatctcataaagcaggcttgctgttggttttgttttttcctcaaaaatgtagtgccacatttaagatcatcacataataaagcaaccacaaaagacctaaaaaaaatccctgcagttttaaaaaacgttagaagaaaggttactagaccataagcaagctccacatcaggctcttttttcaaacatgggttttagctgaatcatcttgaacctcctgggaggtggaccttatatgtttggtaggaccattatctgcacagctgaggagctcaccttggcagactacaatcatttaaagcactcatttgaagtatgggtgtgattttgcttgtgatggtgagttaacagccaaacagggctaacttgtgtttctggttaggagggaatgtttctaggcagcttttcctggtccacagaaggtttctctttagtggtgagattggaaatgctttacagggaaaaaaaagataaaggttgtgtaacatgattggttataaaacatgaacatcttggtaatactacaaagaggaaataagtggaagtattatccccgaaaaaaattcatagaacttaaatacgtatttccattaaaaagttgtcctcctcgtaagccaaattatttcattcaagtttcatccagggaaccagaatacttttacttttgcttcagatttgatttgattcaccggcattcttggttcccgaaatcatacctcattttttagaaatactttcttgatctttttgtagctaactcacttagtaaagtatgcaaattttccaaaataactaatagatcatttaacatagaaagctttaaattatgtcttaattatgtcaatgtaaaaataaaaggtgggtggtttggtttatattgaagtaagtagcataaacagaaatttaattagtaccttatttttaatatcgtactttggcaaacctttcacagtgataaatgaaattttccttttcattgggaaaagccaagttactgttgtttttggttatatagttgcattccttcaggctggtaacagtgtaagctaaagacaaattgtaagagatacttgcctcaagatatttatatcctagaattataacggccttatggtttcttcttttttcaattttctttctttttttttttttgagacggagtctcgctctgtcgcccaggctagagtgcagtggcgcaatctcggctcactgcaagctccacctcctgggttcacgccattctcctgccgcagcctcccgagtagctgggactacaggcgtctgccaccacccccggctaattttttgtattttaagtagagatgaggtttcactgtgttagccaggatggtctcgatctcctgaccttgtgatccacctacctcggcctcccaaagtgctgggattacaggcgtgagccaccgtgcccggcctttcaattttctttaaacaattttctttacatttgcattacaaaacagttggagttaaatgacaaatatttcacatttctatgaaaaacagctagaaatcaaatagtcttaactatatagtacctagaattccagttcctctgaattttcacagatgtgtatttttagctgtccattagacatctccaaggcaaaattaaatggagctcttcctgctgcttctccctgttcctaaatctctgtcttcattaatggtttaagaacccactttattgaccgggtggaaaccttgaccagaaatctcagcatcttccttgacttcccatctaatgcgtttcttgagtctattaattttatctccagattgttaccctatgctgggtcctcttgatttcccactaccaggctttattgtcagcttgcccagattagccacctaaccggcctgcttgccatctgttcctccctactagtaatccatccttgctctgctccagttttctcggattgagtgatttattggcttccacacctccagtggtttcttattgtctacagattaattgtaaacttcccagcatgcagtataacctttgcaatcaagctcagccctgctctgcagtcttctttctgtgcccttgttcctcctggagtggagtctgtacctcagctccactgaacttcccagtttccccaaccagacccacgttgcttccactgcccattgtgctttgctcccctgctcccgtcatgtcatccttcgcactgataatccagcttacacgtgtccttacctgtgtttaccacgagagtggtcactctgccctctggagttttctttgtaggcctctttggttttttactcaccatacttctgacaccaaatgtgtgaattttttttttataccaaccgactctctaacccttgagacaccaattgtgtgtcctacagttccggtcctacaatttaagttcctacattaaccaccctgagtttgcatcacactccacaggtttaaggtttcagcccacaaaactgccctcatttaagacggcagatgcaagtattgggtccccaggttacccacacttctcttctacttggctacaaagttgtggggggatttccacaatccacccctatttcaggccctgatgatttgctaaaatggctcacagaactcaggaaggtactctacaatttctgctttattatatagggtacgactcaagaacagccaaatacaaggattgttacagggcaaggctggagggggtgcaggtactgcagaccacctagtccctctcagggcctgctactctcccagcacctcaaggtgttcatcaaccctccctaaccccatcagttaagggttattgtggaggctccattacataggcactattgattaaatcattgttccttggcaattgaactcaaactcttctcttcttatgactggagataggcaggcatggctgaaagttccagctctgcaatcatgccttggtctttctggcatgctgagagccatgctgaagctatctaagggtccccagctaccagtcatctcactggcatacaaaagacactcctgtcactggagattccaggtatttcaaggagctgtgttccaaggaccagggatgaagaccaaatacttattattaccacacctgtgttatagatcctgtattgtaattggctgcatgcctcccatcaaccgctccactgtgagtgttgggagggaaaggatcatttcttactaaattttgtttaatgagctaacctctccttggcatataattcagcttcttctgttttggttcaagtattatgctaccgtttctctacacacacttagacacacacacacacacacacacacacacacacacacacccctatacacatactattgtacagtcagtgtggttaaaattccactgataggaatataccccagagacttgaaaacagacacaagaatagatattcgtatgcagatgttcatagcagcattattccaggtagccaaaaactggaaactactcaagtctccatcagcagatgaatggataaacaattgctatctatatgacatatataatgatatatatcatatgtgtattatagatatatacacttgtatgtgtatatctatttaggtgaccctaaattgctatctatttatacactaaatctggtaaccctggccgggtgcagtggctcacacctgtaatcccaacacttcgggaagccaaggtgggtagatcagttgaggtcaggagttagagaccagcctggccgatatggtgaaaccccgtctctactaaaaaacataaaaattagccaggcatggtggcacatgcctgtaatcccagctactcaggaggctgaggcaggagaatcacttgatcccgggaggcagaagttgcagtgaggtgagataatgccagtgcactccagcctgggtgacagagtgaggccctttctcagaagaaagaaagaaagagggaaagggagggagggatttaaatatcatgtatattatcagatttaaaataatgtgattgtttttattttgagaaaaaaacatatactgttagannnnnnnnnnnnnnnnnnnnnnnnnnnnnnnnnnnnnnnnnnnnnnnnnnnnnnnnnnnnnnnnnnnnnnnnnnnnnnnnnnnnnnnnnnnnnnnnnnnntaggaacagtgaacactggggcttaccagaggatgnaaggtgagagcagggagagtatcaggaaatataaccaatgggtactagacttaatacctaggtgatgaaataatttgcacaacaaacccctatgacacaagtcatctataacaaacttgcacatgtaccccaaacttaaaaattaaaaaagaaaatattgcttcactgagttaggcaaatatcttaatgttgacattttaaaattgcccaatatcagaaaattaccacagtcattaatatcagcaccaatctcatcaaaaacatttttaagtattgtatagctattatggccaacaagtggtgaatacacgttttccaaaattctaattttttgcttgaaagcttgaatgttattattggcatcaaatgtcagttgttttccttaaaatgacacactcactgtgctgattttcaagtaattgttgactagtattcaagtactaataaccatggcttgtcaatcattctttctgttaaaatatcattctataaaaatgtggccagttcattttgcaacttaaataatctcaggagcattattccatgagatagtcatcatacttcagtaaacaacataagtgcttatatacacttctcattttaaatgtttaaaaaattttttaattttgaatttttattttttacttttgtaggtacatagtagatgtatatattaatggggtacagaagataccctgatacaggcatgtaatgtataataattccctcatggaaaatggggtatccgttccctcatgcatttatctgttgcaggaagtcagggaccccaaatggagggactggctggagccgtagcagaggaacataaattgtgaagacttcatggacatttatcagttcccaaataatacttttataaattcttatgcctatctttactttaatctcttaatcctgttatctttgtaagctgaggatatatgtcacctcaggatcactgtgataattgtgttaactatacaaattaattgtaaaacatgtgtgtttgaaaaatatgaaatcagtgcaccttgaaaaagaacagaataacagcaatttttagggaacaagggaagacaaccataaggtctgactgcctgtggggtcgggcaaaaagagccttatttttcatcttgcagagagcctataaatggacatgcaagtaggagagatatcgctaaattcttttcctagcaaggaatattaatattaataccctgggaaaggaatgcattcctggggggaggcctataaacggccgctctgggaatgtctgtcttatacggttgagataaggactgacatacgccctggtctcctgcagtaccctcaggcttactagggtggggaaaaactctgccctggtaaatttgtggtcagaccagttctctgctctcaaaccctgttttctgttgtttaaaatgtttatcaagacaatatgtgcactgctgaacatagacccttatcagtagttctgcttttgccctttgccttgtgatctttgctggacccttatcagtatttctgccttttccctttgtcctgttccctcagaagcatgtgatctttgttagacccttattagtagttccgctctttaccttttgaagcatgtgatctttgtacctactccctgttttacaccccctccccttttgaaacccttaataaagaacttgctggtttgaggctcaggtgggcatcacggtcctaccatgtgatgtcacccctggtggcccaactgtaaaattcctctctttgtactctttctctttatttctcagctggctgacacttacggaaaatagaaagaatctacgttgaaatatagagggtgggttcccctgatatttatcctttgtgttacaatcaaattatactcttttagttatttttaaatgtacaattaaattattgactgtagtcacccagttgtgctatcaaatactaggtcttattaattctttctggctgtttttattttgtatacattgaccatccccacttccctcccatgcccccactatacttcccagcctctggtagccatccttctgttctctatctccagaggtttaattgttttgacgtttagctcccacaaaaaagagaacttgtgaagtttgtcttcacatacctgacttatttccacttaacataatgacctccagttctcattcttctttatggctgcatggtaccccattgtgtatatgtaccacactttctttattcaataatctgttggtggacacttagatggcttcctaatcttggctattgtgcacagtgttgcaacaaacatgggaaggcaggtatttcttcgatgtactgatttcctttcttttgggtatatgtgtcacaatgagattgctggatcatgtggtagctctagttttagtgttttgggaactattctccataatggtagtactaatttacattcccaccaataatgtatgaaggttcctttttctccacagcatttgttattgcctatcttttggataaaagccattttaactgaggtgagatgatatttcattgtagtttcaattttcatttctccaatgatacatgatgttgaacacctttttcatatacctgtttgctatttgtatgtcttcttttgagaaatgtctattcagatcttttgcccatttaaaaattggattattaaggccaggcacggtggctcatacctgtaatcccagcactttgggaggccaaggcgggtggatcacctgagttcaggagtttgagaccagcctggccaacatggtgaaaccccatctctactaaaactacaaaattagctgggcatagtggcacacgtctgttgtcccatacactcaggaggctgaggcagaagaatcacttgaacccaggagatggaggttacagtgagccgagattgcaccattgcactccagcctgggcaacaagagcaaaattccatctcaaaaaaaaaaagagattattatattttgtcttacagagttgtttgagctccttatatattctggttattaatccctgtcagagaagtagtttgcaaatattttctttcattctgtgtggtgcctctttactttgttgatagtttcctttgctgtgcagaagatttttgacttgatgtaattccatttgtccatttttgctttggttgcctgtgcttatggaatattactcaagaaatttttgccaagaccaatgtcctggagagtttcttcaatgttttcttataataggttcatagcttggggtcctatatttaagtctttaatccagtttgatttgatttttgtatatggtaagagacaggggtctagcttcattcttctgcatatgtgtaaccaatatccccagcaccatttgttcaagagattgtcttttcctccaatgtatattattggcagctttgtcaaaaatgaattgatggtagatgtatagatttgtttttgggttctctattctgttccattggtctatgtgtctgtttttatgccattaccgtgttgttttggttattatagctgtgtagtataatttgaaataaggtaaagcaattcttccggttttgttctttttgctcaggttagctttgactattgttgatcttatgtggttccatgtaaattgtaggatttttttgtatgaagaatgtcattggtatttgatagggatttcattcaatctgtatatttctttgggtagtatggacattttaacaatattgattcttgcaatccatgaacatggaatatctttccctttcttgtgtcctcttcaatttctttcatcagtgctgtatagttttcattatagagatcttttttggttaatttctgagtctttaattttatgtgtggctattgtaagtgggataactttttcaatttcttttttagattgttcactattggcatatagaaatgctactgatttttgtatgttgattttgaatcctgcaactttactgtttttatctgttctaatagttatttggtggagtctttatgttttccaaacataagatcatatctgcaaacaaggatatgttgacttcttcctttccaatttggatgctctttatttctttctcttgtctgattgctctatctaggacatcctgtcctatgttgaattaaaagtggtaaaagtgggcatccttgtcatgttctcaatcttatatagaaggctgtcagtttttcctcattctgtgtgatactacatttgggtctgtcacatatggtttttattatactgaggtatgtttcttacatatttattttttgagggtttttattatgaagggatgttgaatattatcaaatgtttttcagcataaattaaaatgatcatttggtttttgtcctttattctgttgatacaatgtatcacagcaattgagttgtgtatgctgcaccatccttgcatctctggtataaacctcacttggtcatgatgaacgatattttaaatatattgttgaatttggtttgctagtatttttttttaggatttttgcatcactatttatctgggatattagcctatagtttcctttttttgatgtgtcttagtctggatttcagtaatactggccttgtagaatgagtttggaagtattctcttctcttccatgtttcagaatagtttgcataggattggtattagttattctttaaatgtttggtagaattcagcagtgaagccatcaggtcccaggcttttcttaagtgggggacttattactatggctttgatctcattacttgttactggtttgttcaggtttaggatttcttcatgattcaatattggtaggtcatatgtgtctagaaatttatccatttctttcagattttccaatttgttggcatatggttgctaatagaagccactaatgatcctttgaatttctgcaatatcagtcataatgtctctttttcaatctctgattttatttattgggtcttttctttttcttagtctggctaaaggtttgttaattttatttatcttttcaaaaagcaatttttttgttttattggtcttttgtatcattttcttcatttcaatttgatttatttctactctgatctttatatttcttttttccactaattttgggtttgctttgctcttgcttttctagttgtttaagatacattattaggttattcatttgaaggttttcttcttttttgatatggccacttatactatgaacttcccatttagtgctgcttttgctgtcacataggttttgctatgttatgttttaattattatttgtttcaaggaatttttcaatttctttctaaattttttcattgaccccactggccattcaggagcaaactgttgaatttccatgtgtttgctatggtttccaaaattcctgttgttactgatttttggttttattccattgtattcaaagaagatacttgatattatttcaatttttgaatattttatgagttcttttgtgacctagcatatggtctatccctgaggatgatccatgtgctgaagaaaagaatgtgtactctgtaataattggataaaatgttctctatgtatctatgagagacatttggtctatagtgtgtaacgcagattaaatatgatgattcgttgttgattttctgtctggaagatctgtccaatactgatagtagggtgttattgtctctagctattaagatctgtctctctgtttagctctgataatatctgatttatatatctgggtgattcaccattggttgcatatatatttacaactgttaaatcctcttgctgaattcacctctttattgttatgtaatgaccttctttgtctcttaccgtttttgtctcaaaatctattttttctgatataagtatagagcctcctgtgcctttttagtttccattggcatggaatatctttttctttccatttattttgagtctatatgtgtctataggtgaagtgagtctcttgtgagaaacagatcattgggtcttgctttttaatccattcagccagccagtgtcttctgattggaaagtttagtccagtcagagcgagactctgtctcaaaaaaaaaaaaaaaaaaaaaaagaaaaagaaaaaaaagaaaacaggcacaagacaaggatgccctcttccaccactactattcaacatagtattagaagttctggccagggcaatcaggcaagagaaagaaataaacggtattcaaataggcaaagaggaagtcaaattgtctctgtttgcagatgacatgattgtgtatttagaaaaccccatcatgtcagccccaaatctccttaagctgataagcaacttcagcaaagtctcaggatacaaaaatcaatgtgccaaaattgcaagcattcctatacaccaataacagacaaacagagagccaaatcatgagtgaactctcattcacaaatgctacaaagagaataaaatacctaggaatacaactgacaagggatgtgaaagacctcttcaaggagaaccgcaaaccactgctcaatgaaataagagaggacacaaataaatggaaaagattccatactcatgggtgagaagaatcaatatggtgaaaatggcatactgcccaaagtaatttatagattcagtgctatccccatcaagctaccattgactttcttcacagaattggaaaaaaactactttaaatttcatacgggaccaaaaaagagcccacatagtcaagacaatcctaagcaaaaagaacaaagctggaggcatcacgctacctgatttcaaactatactataaggatacagtaaccaaaacagcatggtactggtaccaaaacagatatatagaccaatggaacagaacagaagccttagaaataagaccacatatctacaaccgtctgatcatagacaaacctgacaaaaacaaaaatggggaaaggagtccctgtttaataaatggtgttgggaaaactggctagccatatgcagaaaacagaaactggaccccttccttacaccttatacaaaaattaattcaagatggattacagacttaaagataagacttaaaaccgtaaaaaccctggaagaaaacctaggcaataccattcaggacataggcatgagcaaagacttcatgagtaaaacaccaaaagcaatggcaacaaaagccaaaattgacaaatgggatctagttaaactaaagagtgtctctcagcaatacaactatgatagtgaacaggcacccatagatgggagaaattgtggnnnnnnnnnnnnnnnnnnnnnnnnnnnnnnnnnnnnnnnnnnnnnnnnnnnnnnnnnnnnnnnnnnnnnnnnnnnnnnnnnnnnnnnnnnnnnnnnnnnnacttagttgccagaggtcaagtgtctactgtgcaattggaagaaccttgcacttccacctgaataacatgaaatgtattgctgttctctattcctcaccacgaaagcccaacgtgtatgataaattccttaactcatttgattctctgggcagcaatatcttggtcaaaataattaagtgggtccatttagtactgataaattatctatatggagattggagagtttttaacttgaaaaatttagcagcaataggagaaattaattggaaattgttaagcgtatattttgaaatgagaactatataaaagtattctgtggtgttcataataaggcatgaataatgaactaatccagaaattaatgttcacatcttctttttaaagttattattgaatcatttaaccacgataagctaaagacttatttctgacctgttttcttttcttgagttgtctgtgttgttctgcacatgtctcctgtcttgtgcctatctgtgctaggaaagttatatccttaattcgttgtcttaatgacccattacaaaagggtttttaaaaaattctatcattgctctgagtttattgtcaatatagagacattatcaattgtctttgaaggaggtggcttctatccagtgcttcctgtttaatgccttctgcttattccattttattctcttggaaatggattctctttttgtttactggattgcagcttcggcttctttttcaatactctatgtattgcctctgtattctacatgcatgctgcaatgtgaggggctttatttcacttatttttgtgatgggaaagtaatttgcagtttgagtctgaactaaaaaaggtcccccactgggcgggaacagtaggaccatggtaattcttgtataagtctgttaaacgtctttcctttcctgtatgcaaaacctcaggagtttactttaacctcttagaaccagtatcatgtaggttatgtagataccaaaagttagatacataacaaaggaatttgaacaagtaaggttacagaagtggagtttaaacctggactgagacttcaaaatctgacaaataccaattccaaattttttcaattcctagatatttcattcttggggataaagtagtcctaataattattatattgtcagggcttactataatggtgaaagactgtaggtccaagtttacctatacagagtgggaacaaaatcatctgtggatttggatcctcaatagccatttcaatttagccattctattcttgctcaccctgcggactagactctagactctgcccgggtgtctgcttctcaactgcctgcattagctgaaactccctagattctactacttgcctgccccaaactctgattaatctcagatccctgtctgggccctttgtagccaatttggccttgccacatcctgtatgggactagcaagacattgagtttgggaagaaattgtaaggtgcactgggacactaaaacagatcaataaatatgattgttggtaataatagttgacatatacttctattaccctcacttatgtagataatctatataagtataaaacttgtaggcaaattaacatgaactattgactaaagatgttcagtggccaggcatggtggctcacgcctgtaatcccagcactttgggaggccgagatgggaggattgcttgaggccaggtgttagagaccagtctggtcaacatgatgagatctgatctccaaataaataaacaaacaaacaaataaataaataaaaaatagagatgttcagtgatggcttagaaaatatcatgtaggagactcaagatatactttcttttaattcatgaaaatggactcattctaaacatcatggactacaaatatatgtttattcttaaaattaagaaaagagagtagcgatgcccttgaaggtgtcattatatttaagcaaataaaatggttgcagcattgtggagattctggcatattgtggatttttttctttcaggtcacctgtgtgatgggaatggattgcaatatatgaatttaaatgcaaaatgttgaagttgtatttcttctcttttaaatattaaataagattttttccattagttttttcattgttactaaagtgataaaatttagaaggcactagtttttgactgattttaataaattgcattttctaaaaccttttattgtttaatagttttatatattttaagacctttttataagtatataaaaattagaattattgcatcttcttagtgaattgaaacttttgtcattattaaatttcctctttacctctagtaattttttttgttagtgtttgcatggtatatatttttccattcttttacttttaatatgtctgtatatttatatataaggttagtttcttgcaggtagcttagagtgttttttccctcttaatccactctgacaatctttatcttttaattagaatatttactttgtttatatttaatataattactgatttatttgaggttaagttcactgtattacaatttactttgtttttttcccatttcccatcagtcctatttttctttttcaatttttttgccttctctctgataaattatttttctattattccatttctccctttgccatctttatagttataaattcttttactggtcttttagtggttaccttagagatcacaatatacatctttgaatattaatttctattataaattagttcttttgccactttctaaacaatgcaagagccttggaatactctaacttcacttacttcagtcataatttatatgctattgtttatgtactttaattccctatgtatttggaaccccatagagcattatttttacttaattttattatttattcagttaataatcatttaaatatgttcacatgtatctcctctccactactgtttatatcttcccatattttcaagtttccatctggaatcactttttttcaagaaaggctttctttagtatttctttttgggtggtttgctcgtaattaattctagtgtttgtgtgtttgaaaagtccttatttcctctttactttttctcttttgagacaaagtcttgctatgctgcccaggatagagtgcagtggctattcacaagtgtgattatagtacacttcagcctcaaactcctgggctcaaggaattctcccaccactgcctcctcagtagatgagactataggcacacaccactgtgcccagctctgtccacttttgaaggatatacttgttggttatctaggttgtccacatttttaagaaagcattttggagatatcattccattgcctccaggctaccactgttttcactgaaaaatcagttaccagtcccattgttgtttctttgatggtagttggaccttttcttactgctttaaagattttcatgttgtatgtattttcttgtagttttatacttatatacatatgtctagctttctgttttattttcctgcttgggatttgtaaggattcttaaatctttacaaggaactaagtaaggaggaaataaggactttgttcagacacacaaaaactagaattaatcaccagcagagcacccaaaggaaatacaaaagaaagtcttttttgaaaaaaagtgatttcagatgtaaacttgaaaatatgcaaagaaataaagagtagtggagaggagaaataatgtgggtacatttaaataaatattaactgaataaataataaaattataattaagataatgttttctggcgctggaaatacatatggaatttaaaatagataaaaataatagtatataagtttactaaagtaaatgaagttagagtattcccaggctctattttaaagaccttatgtgttttgtcaattttggataatttttagtcattatgtcttcaaatattgcttctgctagattagctcctccctttttaatgaaattataaataatcataaggtagaccttgctgatacacacacagatcctccccagtttaggatggtttgacttaatggtttttttgactttacaatggtgtaaaagcgatactggtctagtcatatgtggtatgatactttctcgtgttgctgggcgttggcagcaagctgtggctcccagtaagccatatgatagaaagggtgaacaacggtgtactgcatccccagctttttttgaatgttgtgtttttgcatcccgtcatatctatagaatgcttatctgtgtaatatggtttggatctgtgtccgtgcccaaatctcatgtcgaattgtaatcctcaatgttggagggtctgatgagaggtgattggatcatgggtatggtttagcaccatccccgcagtgctgttcttgtgatagtgagtgagtgagttattgaaagatccagttgtttaaaagtatgtcgcaccaccccactctcatggtcctgctcttgccacgtaagacacctgctcccactttgccttcagccatgattgtaagtttcctgaggcctccccagaagccaagaagatgctgccttgcttcctgtacagcctgaaaaaccatgatccaataaacctcttttcttcataaattgcccaatctcaggtatttctttatagcagtagaagaactgactaatacactgtgtacagtattcaacagtattttattataaaatatgttttgtgttagattattttgcccaactgtgggtttaatgtaagtattctgagcacatttatagtggactaaattacgctatgatgttcagtatgttaggtgtattaaatgcatttttgacttacagttgttttaatttatgataggtttattgggacataaccccattgtaggttggggagcctctgtatttcatatattctatatttaaaataagaaacattttacttacttttcagttcactaattctctttttacctttgtctaatatgttcttaaatccatttattagattcttttttatatagttttaaaattcttactaaaattcttagtctgaacttggaattccttgaaaacactactgatacttattttcaactacatctaataaatccattatctggagtctgccttctttttttcttttggtttcttattatcaattgttgtcttctcatgtgttcagttattttttattgagtcctagacagtatatgtaaaaatttgtagggctattttaagattgtggaagattttatcttcttttagagatttagttttgtttctgacaagtggtcagaactagcagtcctagctgaacattcattcagttgtgtgcagtaatgactcaaaactgggcttcagtctctgttagtgctggtctattttttgttcaccctaacttccagatgcaacccttacatgtcccagtcaaatccctgtgttgtttttttttttttttgtcatggttatctttccttggtaaatcccagaatcccaacttctgtcccagcagcctctgtagtctgctcaaagctatgctcagcttctcagactcttagctgccacttttaaagtcagcagactcctgtaagaaaagagtagtctcaaatgtcagacttacctctctgagctttctttcaatcctaggttttgtctctgcaatttattactggcttgttagttgtttgatgcctcaaaaaaacatgttttatacttaatttagttttttttttaagttgttatcagtgggtatattggtgcaaaataacttggttagttattgctccatgtggtgcattttaagaaaaaattttatcaaactatttagacattgaatctgaaatacacacatctatcattctaaaataaatactgtaatttgagatgaacacttaacatcaataaattatttagttactgctatttattaaagtaaaagtggctagtttagtgccaatttggattttgtttcaaacatttttccaaagcatatatgcagataatgatgaataacggaatttggaggaaaagtgccagagaagacaaatattttcagatgttaatgtattttcagggaggaaatatataaaattactgaaaatcttcatattgtaatgactagtgcaactttaaagggaaatgtgcatttttagttccttttctacttaaatttttttcactataaaagcaaaatgacatttttgttacaaatactccataggtgatgttttgtatttcttattctatcatatcaaaaggtaagtaatatttagtgtcctgttactggtgaagctaggtttgattacctgctaaaggtgctgactgccacactttcccattgtaaagatattttctttttctatagttagtaaggaatttatggggatgacactttagatctatgaatatagacttctccaagaggatcacaaggaattgttttagtaacaattgaggatccctgcctgaagcagtttataaactgtggtttataaaatggtgattttctaattcttaccattccttctctattagctggcattcactaaagaagaattctccatgtcctccacactgttttgagtgtcacagaagggctctttctcccttgccactctgtgagcagcactgtgctgcagaatctggttccaggttactctggcatgcatcctccatcctggattttcacacagaatagcccttcagtagttcaattatttcttcaacaatgatccctttaatctttctttttgcttaagttaatcagaatcagattttaacaaacaatactaacagtccttattaataaaatttggaaaattgctttctaaaagttggcaccaatctataaaaccacttgcagtgtttgaggataccagtctctctgcgctatagtgtgtttatctctgtcaaatactaaaataaccttaaagtaattgtgtctaatctataaaaagacctttactcattggaaatgaagaacttaattataaagaaaattgttgttgtcatttgtatttaaatgttttatcaacttcttcattctgagaatagaaagtaaaatctacttggacaatgccacatatgatcactgagaatgtattatgtgtcagaaattggagctttaccaatgaatgagaaagatatggctacatttttgtagcttttagtccactagaagaaacaaacatttaagcatatcattatgtcacaaataacctgcattttaatgaatctctgatgccttgatcctttttttgatgtcaccagaagctcccagtagaaagtttttacacaactgtgtcatgactggttggtgatattatcaattaaatcatgcaccctcatttttgcaatattaaaatatgaaaaatgtgaatcttagaattggtgaaatgtagtagcgagcactttgattaaaaagttgaaaaagaaacagtcacagaaatgaacatgcaaagtggatggaatatttttgaaggaattgaagtcttgtctgagaaatgagggatgagcaggaatttctgaagagaatgggcaggagtattctaggcaaaagtcacttcccctgacactctcctcatttttgaaattaggagtttgggtgctagtttaaaagatagatttagtaaatattagtattttagtttattttgttttagcagcaataatttttaagaaaattccgattgtgaatagtgctgtaacaatagcaaagacatgtaatcaatcaaatgcccatcaatgatagaatggataaagatatgaggtacatatacaccatggaacactatgcaactataaaacagaaccagatcatgtcctttgcaggcacatggatggaattggaagccatatcctcagcaaatgaacacaggaacagaaaaccaaacaccacatgttcttaattataaatatgagttgaatgatgagaacacatggacacacggaggaggagaacaacacacactggggcctgtcgggagatggggcatgaagaattccccttgccaaccctccacccgctcccacaacacacttttttgagcatcacagaaggggtcttcctttcctgctcctctttgtgaggagcacgctgttctagaatctggctccgggtgactggcatacatcctcagttttgtatttcacacacaagtttctgaagcagcatggttttaaaaccactagactagatgatcccaagatcccttctactttctacaagatttttaatttttaatttttgtgggtacatagtaggtatatatatttatggggtacctgagatgttttgatatgggcatgcaatgtgaaataatcacattatagagaatgggatatgtgccccctcagacacttcttctttgttgttataaacaatccaattacactcttttagttattttgaaatgtacaattaagctattattgactatagtcaccctattgtgctatcaaatagaaagaatgaataagatgccttctacttttaatggtatataactcaaagtaacatagtcatttggactctgtctgaagctcaattcagtttcagaaagttatacaactggtaagtgacaagggcgggctttgataccagatgctctaattctaaacttcaccctcttaaccttatactatactgattctacagcgcacttactattttttcgatctgtgaaatgaggataatactctattctaaggtcattgaggaacaaatgaactttatctgtttgtgcatgagtgacattcctttgtgtgtgcccataagaccttcttccttcatctattattacataacaaattatcccccaaactgtggtttcagacaataataattttgcatatagacattatctatacatatgcaaatacatatgcaattttacacatacatatgcctttgttgtttggaagtttcggtaagtggctggatgattcttctccacatggcattgactggggttactcagtgttatgagtggctgatctggcctggaggctttactaacacgtctgaggccttcctaggtatggctagaagtcgaggctcagttgaacccttcttttccagtgggcctcaggcttttccacttggtctctctatcaggtgactgacatttttacagtagctgagggtgccaagagtgactcttccaatagagataaagtggaaactgtcagtcttttaaggcctgggcccagaaactgaaacagcgtcatttcctccacatgttgttggtcaaagcaagaacagaacttattcacattctagggacatggacatagatccagtcatctcttgatgagaagagtaccggagaatctgaggtcatctgtattctgccacagatctggctaagaaaatagtctgttagagcacaggtagcaagcacaaatgggttgaaggctggatttatatttttcccctccagtttcaggggcgaggaaattacagaatgctagaggatttatggagcagttcacttagtcaaccaagtatgaaggttgttctttatctttgggaaggaaagcctgaatataagaactgctagcgttcgtttaaagaaatcactagtctcaaaaaaggtgggaaaccagtttgaattaagctatcgtggcaagggcagaagaagtttaaggttaaaatatacttttactgtggcttgggaaattgtctacttgtcaagtattgagcttttaggatggaagaaagagcacgacagtatattctttagaagatgagactgtgataacctctgagaaaggaaaactagctatgaaaatgctcatggttgccctgggaggagcagaggaggtaggaagagctggcctatctctagcagtagaaaagggaaggtaaagtgaaataactgagatgaaaacagctaccaaataataaagagaaagtccttgggaccggaaaggaagggaaaaatcagtagatttggcttcaggaattaatacaaggaagttacagattttggaatggatgtggggaggaatgaagatgaaattaaatgtgaggtatagcaagaacataaggagaagaaagctcttgcagataaaaggaaccagtagaactcggctttgtgagtagaggaggaatgaaagagggaaaagagtatagaggaaccaagggatggaaagaggaaagtgaatggggccaataggcttgcagcagacagaacaaagaccctaaaagtaagaacacaaatggaggaagtgaaggatatgacagaagctgaggttaactggagggacaaaagagaagtctataattatattacaatgccattattatttttattgttgtggctattgttattattttgttacttcttcagaattccccagttatttcaaaccttttccacttgctaacctctgagctcattcttagccagtgacaatatctcctactctgttgaaagcaatgagacaagtgtggtaggagccccattaacttgcttcaattttacatcacattttttgtgcatttaatatttctgtatatttaagaatgtatatttaatattttttgtatatttaataattctcatctttattctaattttaaaatgtcccttctttttcaagttacccttgatattactccctcttgcctctcataggaattggctctttaattatccatttctttctcttagtcagtgcctcctgctctactcacttctttccttctgaggagaagcattttcatgtctttcctgtgctgaacatatcttgtttctcaatttgctattacaatgaactatatacttatttatttattttgtttgtttttttgagacagggtctctgtctgtcccccaggctggagtgcagtggtatgatctcggctcactgcaacttctgcctctcaggttcaggcaattctcctgcttcagcttcctgagtagctagcactacagtcatgtgccacacgccaggctaatttctggtatttagtagagatggggtttcaccatgttggtcaggctggtctcgaacccctaacctcaagtgatccatctgcctcagcctcccaaagtgcttggattacaggcgtgagccactgctcccagcctgtttctttcatttcattactaagcttcttgcaaaagaagtctacatcttttcagtccaccagttaaatatttaaagtttcaaagcaggaaagaagagtgtatcacctgaaaagaaaagaaaataatgcggaagggggaggcacaacagcgctatcccacagccaaagataatgatagtggagccagttatcagtggttcttgataggtgaagaaggtgaagatgaaggacagggtggaaaagaggcatctgcaaaaggtttttagggattatattgcaaaagaagagaaaaacatagagaggagaatcacaatcatggggaggaagaccatacaagtctaggagtttggaaaatgaaaaataacacacaaaagagaaatggaataaggaaaaatgtgttccattgtgtgtgtacatacctatgtgtgcatttgtgtgtgtgtatgtgtgtatactacgagtaagtgatagataatatttttgaaattttactcagcttgaaagataaattgtaaatatgtatggtatatagtattaatcataagccacagagtcagatctggaggaaataatccattactttattttctctaaatcaacttgaaccctgacctggtttctctattctgagaagtggatgagaaataaggtattaatcctgaccacggctctttcctccatctaggatgatacagaggatgtatgtggtgcttaggaaaggaaggaagagtctcaaatttctagccctatgtggttgctgttcatggcacaaacacctgcagattcttgaaattcaatagttcggtgttttcagtgccatgtgtagagcaaaactcctctgtgggcttggtacccaccctgggcttcccagggagcaagatgtagatcttctagaactttcttcccgttcagttgtccaagaccatccatgtcccactctccaacaaagacacagactcacacattcaccctcaaagaaaccccaggacaactagcataatatctccaatggatatagactttcacaaaagattacctttgagcagtttttgcttcatgccctacaaatatccctgagcatctggactggacaatggaatctgatttgggtttgaggattggtaagaactataacttggactcagcttactcctgaagcatcacagcagcaaagcagaaacatataaagacagggacacaagtatgtaggtgcagctcctcgctttccccctcatatcaggcagaggcacagccaatctcaggggtcttggcagcccctgaaaaggggaatgcctgccaggttggggatgggcttgctgttctttgtatttccagccacatcagcacccagaaataacatatcaccttgaaaggtaatacttaaccttctctaggaagcatgtgaaccagaccaaaaatctgggttccaggccgtgaaattgttgctttgctagcacagggacattctctccttatctgagttttccatttaagtctccttaagggctttctgtgggcaggcctggcagtggccaccacactgaggagaggatattagaaagacactgtctaccttcttggaaaaaagagaagaaaaacacattaatacagcaagaacttctgccaaacatatgtaaatatcttttattatgtagagagatcaaattaaagtatgtacgtggaaatgttctgacaaatggaccatagccctgggacatattttatttctgtttttcaaattatagtttccaagtatcctgagtaaggtttatgacaaagacacagcttccatttagacagttggatttgtaatagtttattttaataatgtattttagaaattcatttctggcataatgaataagataatgtcttattctgagactgagttttgctcactgaaagataaatattgtggaaaaaacataataactggcagtaattaactagaattatatactgggatgttggctacaataattgctcaatattgtgtgttttctttgaaacagcaaaatatgattgatgggatttctataacacttttactctggaagattagggaaaaaaaccaatagagatcagttgctaaactcaaatatttatctataggccaagcaacagttccaaagaacacttctcttcatttataatatagcaacacagttcttaatctggaaagatggcttaacatacccgctattctcagtagggcatgcgctttgaattttccctcagatggcatggaaaatgggaccagaacagagcaatctgctgagctaactggaatctgattccccactaccaaggtctatctccagaaggggagagtgaaaaaaaataaaaagaaggaatttatgaagatataatggctaattttttaaatatgatgaaatatacaaatctaaagatttgataattacaacaaattctaatcacacttgaacgtgtcatagtgaaactgcagaagtctaaagataaagggaaggttttaaaaacaaagaaagaggatagatgctacaaagaaaggacaattagactaatgtcagacttctcaatagcaataacagatccagaaaatggtggaattttatttatttaaactgctgagggaaaataaatgtcaacctacaatgataaattttgcttgatttttaagaacgaatacaaaataaagatattttcagacttggaaaactgaaaaaatttgcaaccactaagtttctcactaaagaaaattttaaaagatgtatttgacagtacagggctcctattagggacaacgaaaatgttttgaaattgattgtggagatggttacagaattctaaatatacaaaaaaatgaattttacattttactctgtacaaattggtgaattgtacggcacatgtagaggttgaatagtgtcctcgcaaaaattcacgcccacctagaatcccagcatctgaccttatttggaaatagggtcattgcagatacaattagataaagatctaaagaaattattctggatttagcacctcaaattcagtgactgctgtccttataaaatgaagagacactgagagacacagagaaaagacctttgtgaagatggaggcagagtttggaattatgctgccacaagccaaagaatgctagaagtcatcagaagctagaagaggcaagcaaggattttcccatagagcctctggagggaggctggccctaacagcaacttgattttgaacttctggactctgcaactgtgagagagtaaatttctactgtttgaagtcactaagtttatggtaatctgttatagaagtcctaggaaactaatatagtatgtaaattatatctcaacatttctatgatgttctctaagaagaaagtaagttggaattcagacattcaagaaggactggtgagcaagatatctgggaaatatgtaggtaaatctgaagaaaaattggatggtataaatgccatatttgatttgggtagttaaattgttatacaacataaatatttagaaaaattaacatgtatgatgagggggtatgaaaagagttaaacgtaacatatttgtatttgggagaaagtttgaaatgttgaaaaattttagatcaaaggagtttgcatattaaaatcttaaagttaaccagtaaatgaatagaaatagagtatgtaatcttcagaactatagaaaaaaatggaattagaaacttaaacttatgaaaaaaggaagtggtaaaaagaatctgagctccacttagaagacagagataggttggattaaaaaccaaaagtctagtatgtaatctccaagaaaaatctcaggtgcaaagtgatccaaaaagtcaaaacggaaagatagaaaatagttataaactgacttactatcccggtttgctctaatctctctgcttttgagtatgtttgaaaatatccataataaaatggtaaatcaaagaaaaatggtatcactggagaattaacagatatttagaagagagcaagagatctctgtgaacaaatttatgctaatgaataaaaaaatcatagacaaaatgaacaatttccgagaaaagcataccttagcaaaactcaatcaagaataagaatttttagtgctcacataactagtaaagaaattaaagcagtaaaaataccctcagaaagagaacactagacaccaacagttttactagtgagttctatcaagccttcataaaggagttaatttcaatgctttaaaacttttctgtagtatataaaaagaatgactactcttcaactcatcttaccaggctagtaaactctaaaactaaaatcagagcaggatgttatagtaaaagaaaattgctaggcacagcagctcacgcctgtgattccagcacattgagaggtcaaggtggaaggatcactggaagccaggagtttgaggtaatcctgggcaatacagagagaccctgtctctacaaaaaataaaaaagcttagctgggtatggtgtcgcgcctgtagtgctagctactcaagaggctgaggtggaaggattacttcagcccaggaatttgaggatgctgcagtgagctatgatagtgccactgtgcttcagccagagtgacagagggagaccttgtctcttaaagaaaaaagaaaagaaaattacaaaaaactgggcttttgtattttttaatctattgtgggagctcctcaaagccaccaaaactctgccaattcctggtatgaactgagaacaaagtctcaactagagattttaatgccattaagcagaaagaaaccagcagaagagaaaccagcaaatgcccccagagaagaaaacagctggcgatcatgatcaacatctcatctaggaaggactattctgtctctggaattttagttcatttactcctaattgtttctatagttgttcattttcattgttttttggtattcaattgaatgaggatattaccacttattcttctactttttatgaacctttaggtgttttcaatatttggttattataaatatgttactatgaacacttggtacatgtctcctgttgcacatgcaggggacatacttagaagctgaattgctgaggataggatctgtgtatgttcaactttggcagttaatgtcaaataattttccaaattcttgaccaatttatattcccaccagcagtgtgtgagaattttcattgttttaattttactcattctgataaatatgtagtgagaacatagtttgtctttaatttgcattttcttgattactaatgaggttgagaatctttttctgtttacaagtcattgggatgtctctctttggaattctcttttcaagtttcctgtccattcttttttgctttttaccatagtcatctctccttcatattagtttgcagaagtttttaatgtagtcctaatatgagatttcagttagatttatatgttttctctcattctatgactcacatttttactcttttatagcatttttttagttacatgtttgcgtttaattttggtaaacgcacgcaacataaaatttaccattttaaatcgtttaaagtgtacagttcaatagtgttaactatattcacattgttatgcaaaagacctctagaacttttatatcgtgcaaactaaaactcaataccctttaagtaacaactgcccattttacccaatccctagcccttgacaaacatcattctgctttctgtttctgtgagactggctacttaagattatttcatataagtaaaatcctacagtgtttattactttgttattggcttatttcagttaatataatattctcaaggtttatctttatcatagaatgtgacaaggtttcttttttaaggttgaataatattccattctatgtatgtgccacattttctttaactgttcatgtcaagggacatttgggttgcttccaccttgtggcttttatgaataatgcagcaataaacatgggtgtgcaactatctcttccagggcctgcactgcatactttagatatgtcctcagaaatgagattgctggataataattctcatttttaatttttgacaaatctccacagtttttcatagtggctgcatcatttttttcccaccaacagtatggaggagttccaatttctccacatcctcaacagatttcttttttctttttgttaatttaatttttattttaggtttaggggcatacatgcagatttgttatatataggtaaactgcatgtcacagaggtttggtgtacagattatttcatcagtcaggcgatagccatcatactccataggcagctttttgatcctctgtctcctccccacctccaccctcagggaggccccagtgtctgtttttcccctttgagtccatgtgttcttgttgtttagagttgtttataagtgagaatattcagtaatagtgtttttgattaatagaagttcttcattttaatgtagtttaatcaatttcaacctttttattcttcccttttttcttatttaactgactagttcaaccaattcagctgactaattctctgtggtttttggcatctctgatgtgttgttttgcacatctaggagattttgtagttttatcatttgtacttcttcagctttacaattatttaacaataatgtttatttctttgttgaaataaatattatatttataatagtataaatattaccataattttattgtaatattactattataatatattttattataataaatattatattaagaaatattatttcttgactgaaataaacattgttaagtaataattctaaagccaaagaagtacaaatgttaactataaaatgcctatttattcattgacaccatatttttcttcaattctttgaacttttttttttttttttaatttgagatggagtcttactctgttgcccaggctggagtgcagtggcaccatcttgactcactgcaacctccaccttccaggttcaagcgatcctccggcttcagcccccctagtagctgggattacaggtacgcaccaccatgcccagctaatttttatatttttagtagagatagggtttcaccatgttggccaggctggtctcaaactcctgatctcaggtgatccacccgccctggcctcccaaagtgctgggattacaggcgtgagccaccatgcccagccaattctttgaatatttttatagacattataactgtctctgaagtgagtgccacatgtgccaaaatacttaactaactaccaagttttttagcatagggaaaacccacagagaaccaggttttaaaagcagtgcaaagacggaacagggcaaaaagagcatggaatggttctaagatacgagtaatttcctgcaggtttgtttgctttgggatctgtattctgacctttaggttttctgttacttgaacttttcataactgggaacatgcttttttaagaaaagcatccaattcatagattctgctcaatatcactgtatttttctagaatacacattatcttccctctgcctacttctctgtggtgtctcctggagccttaaaatatacgaatagttatcaatcaggcatttaagtagttcagattctgcatttgggtctctgtggtttttatattgtgagttcacaattcttagctcttccacgcagtttttgtatttttatttatgcttttagatacttctcagtaactttaggcagttttgtttttaatgtctttcatgttttataattgctatctgctgcaggtttgcagggccacgtatctcctactattactggaagttgattttgaattaactttgaatatcaattttttattatccgaaaatgtatatatttcactttcagttttgaagaatgatattgctgagtataaaaatctaagtggaaagtggtgtttctactgatatgttaaagatattttacactttaagttttcattcattggtgctcttggaaagtcatctgttagtctgttgctactttgaaaagaatttatattttatttttcccttggatgcttttaaggttgttcgttttttatttgattatatgttttgctatgatgtatctctgtgtaaatttcctttaatctgccctgcgatctcttgaagctgtggcttgcttcttttatcaattttggaaaattgtcagccaatattatgtaaatatttttgtcccactctcttatcttttattacaactacaattaaatgtatgctagatctttcattgttttctcaatgaatcaaaccctccttactgtatttttcaaatttttgtctctctatgtatcattgtaagtagttcttcctgacctgtcttccatctttctttaatctgttcttaaactcagccactgagttattaatttagcttatttgtactttcagttttacaatttcctttttgttgtgctcactcctgtaatcccagcactctgggaggtcaagccaggggggagctgatcacaagttcaggagttgaagaccagcctggccaatatggtagaatttcctttttatttgttttattttatttttattaattgacaggtaataattgtgcatattcgtgggggtactagtgatgtttccatatatataatgtatagtgatcagattagggtaattagcatttctgtcatctcaaacatttatcatttctttgtgttgggaatgttcaatatcaaattagttctttttaaaattagcaatgtttactctttacagtttccagttcattttggaagcttaaaagttggccttttagcttcacttcatagacatggtaattgttttatgttctgtttctgacaactttactaactgaagaagttatggatgtttctgctgactgttatttgtaccagatcttgttcattttatcttgtttcctcatgtttttcgttatctttgattaggtgctgcatagtgtatttgaaaaaattatttatagaaataatttgaggcctaagatgatgtgaattcctccagggaagatttactcttgtttcttttatgtgcctggtggcagtactaatctaggatctcctaaatctaattttaggatttgagatattctgtgttacccaggaaatctgatggcagagagatgctgcagtccatatagttctttgattatttccagttttcttattcatggaatgcagttttcagcccttctgagccccaaattaaatagggagttcttttctattttccccaactttgacccctacttatatgttcctattcaagtgatgttataaaaagtgttgcacaaccttttaatcatctctttttggatttacaaatgcccactggtggggtggttttgaatgttaggctcatctctttagattcctgttttcttccaaatttctcctaaatttgataattcctaattgcattgttagttctttaatgcatttaggaagttaaaaaatattagctagtcttttttattatctttagcaggtttggcccaaatcactgaactagatattgctggaagtaaaatcctccagagtcagggatttgcattctaagccatgctattatactccctctcttacttttgctttttaaataaaaagaacagtgttcagaatctttagtcccaattgcttctcatctcattcataatgtaaccaaagtctttagaagaacctgtaagatactacttgatctgcccttctccagctctctgatcttattttccactgctctctcgttcactttgctccaagcacactgatctctttcgtcttcatctaacatatcaggcatgcttttgctccttcaggatctttgcatttgctggtgtctgtgccagaaattctcctttcccaaatagccacacttctttaccttctaaggcttgaaattaaatgttccctttttagtggaaccttccctgactgccctgtctaaaatttcaaatactgttttcctctcacctattgtcttggtttgttttgtgttgctataacagaattccacagactggataatttataaggagtggaaatttattctttcacagttctatatactgggaagttcaagattaaggcaccgtcagtttagagcctggtctctctggttccaagatggcacctcacacactgcttcctccagagagaaggaatgttgtgtcctcacatggcagaaaagcaaaagagagagaactgactcccatgagtactttttatggtggcatggcagaagcttcgtgatctaaatggctctcattaggcctcaacactgctgcactggggaacaagtttctaacacataaattttggaggggatacattcaaaccatagcacctatgtgctacctattgctatattctgtttcatttttttcttagaaagtattattatctaacatattgtatattttcatcttttaagtcttattagcaacctctctttcacccagaatataaattccatggaggcagtgatttttgtctatttggtcattgttctgtctccagtaaagagagtggagtttgtcacaaaataatattcagtaaatatttgttgaatgaataatagagaacttttgtttatatatctcagataggctagatatacctagaattgtgcttaaggaatgctttcctaagttccttaaggagtaaaaggcaatactgatcaaatgttgtttttattaaaagtttaatataaagagaaaaataaatcatatactgatcaaatgttgtttttattaaaagttaaatataaagaaaaataaatcatatactagaggtagaaaatagtgtactggtaattaataaatagtaaaacagtagttcttaaagtttagcttgcttaagaaatatgtgaggatgcttattaaaataaaggttctagaacaggccctttcttcacggatactaaatcagcaaagatggggtgatagcctacaatgtgcatttatactaacatttgaaacttggagaaatattgatctaaagaatcacaagttggtccctgaagcatagaaatgagtacagtagttactagctgagcttggaaaaatatttccttctctaacattgcaaatgcactgaccatatcctccttcagcaattggtttttagactccatgataatttatgggaattctcaggagaccaacttcttcatgtctcagttttattctttatataattaattacggactcatttacatttactatttcttatttacaaagtgttgaaaggcattcctggagcagaattgaatgtatgaaaacatctgataataaacagagattatactggagaggaattcacgggctcctgcttcatcctcttggactgtgatattaaaatgctcaccagctgtgtttaatcaatagttcttttcatatttgaatgtagttccaactcagagacaaaggtctaagaaatatattctaaaatttatcagagaaagaattaaatacctattcatatgcctcccttttttgacctgttttcttcaggctccatttcagtaatccacaaattcttgctatcacctgataagtgaatataaagcattaaagtgccaattgcacagtttttgtttttaagggtcagggaagggttaggacatcctgggtctggatttcattcttttctagacttcctgtgtaatttaatgctcctccatctgcactcagaatcctattagaataaaagagagatttcagctgctttttcgctcgtatgtaactgtgtttctaatggcaacttcccaatagaggttcaggtgcttatgtgaagaaaggacattctcactccatttcaataaatttggaacagtgcatttagaagaataagctttatatctttcatccagcattcctcttacctttaatttagaagcaagcaggtctacccctaaatatgttttgagattttctctactaatctattgaattgtttattttttgaggctctatgaggatgatggtattattatgtggtagttattgttttaaactgcacaacaagttttcccatatgcaccttcttacttatataataggccccttccttatataacccagtattagtggatgggaataacagttgtggccaaccgaagcactcattattctggctgcatacattggttgagaggtagcttaatgacatcggtcaatcaatcagactccttgggatattcctattgggacaagggtggaaaattgtttcttgcctctgtggtccccttactggaaggataggaaactaagagcactagaaactatcctactcatcatgtggctacagccaggcaacaatactagagaatgaggcccacacctagaaagacgcagagctgaaacgtgaggaaaaggctaattattattttttttttgagacggagtctcgctctgttgcccaggctggagtgcagtggcacaatctcggctcactgcaagctttgcctcccaggttcatgccattctcctgcctcagcctcccgagtagctgggactacaggcgcctgccaccatgcccagctgattttttttttttttttgtatttttagtagagacggggtttcactgtgttagccaggatggtcttgatctcctgacctcgtgatctgcccgtctcggcctggaaaaggctaatttttaaaattttgtttttaattgacatgtaatagttgtacatttacatggagtacactgtgatgttccaaggggaaaggatcttggtgatctggtcctgaatatattaggttggtaaaaaatgtttgatgctgggatcattcctttccttccctattacatagtcaataaattaatttttaccacatgctagttgaattgcatttctgttatttcaaactgaaaacatcctgacaaaaataaacaataacaacaaatagaaatggagattgaaaaaaacatgcaggaagttaacaattccttcaatggtacaaatgagttttctggatatgtcacaggtataagcattttcgttaataacttggttttgtgtcaggattcctttattcctcctgcatctaacattaataaattgctatttgttgttaagggaagtagggaactcctataatattaaatctagggagatcccagaaagttagccatcccaaagtctttgaaaacctggctacattgtcaccttaagcttaggaagccaaaattcaatatggacatagaaatatctcttttttagggggagaattccagagtagctgataaattgtattattttttggcaccatgactcatagctataactttttaactctttagggggacttttgcatttgccatgggagatgtcatttcaatgcctaaaagttagatagattaaagataggatgtagctagggacatgcatactgggatatttctgagtgtgaaaggggtttctatcaacagttagacccaggacaataggtccgagaacaccaagaacaagaacaccaagaaccaagaacatgctagagaaagggagatatttgtttgtctttgccaaagatgatagactcttttcctagactagtggtttccaaactggttccacattagaattgcctgggaaacttacaaaaatacagaagctaagtttcctcacccagaggttttgatgatttgtctggagtggcatatgggaatttcacttttaaagagttccctggagactgtacagcatagttttagtatttaagtatctaaacctgaatctcaataggcaaagacctggtgtctcttcttccatgagctaggtgtgtgattctggacaaataattttctgatcttcagtggcttcatctataaaaagaggggtttagtctaaaaaatactctaagatctactgaactctgatattctacaattctgatcgtttgaagagctcttctttacagggattaaaatctcttaaagtcagaacctacttccccttgtcttggacaatgacagaacattatttggaggaaggctaatcaagttcgtttcttaaaagccaaggatgtgttgtataaacgaagtgataggacatgcgcacatattaattctagtgctgtttgagagcacctagcagttttcatgccagctgagaggatgaaaggcctgcaacccccaaagacattatgtaatctttgcaatctaattcagcacaaccttcaacaactgaaatgttgaagggcaggtttactcttccccagaatgaatttttatggttgcttatactgagaaggcagtgcattgtatgtgtcttgttaatgacctaatgcagtgtgttcttctgtctataaatggagacaaactgagagatgtacaactggtctaaaatagagggcctagttcagggtgtgaaatgtattttgttaagtcatgttaagcctcagttcctcattccttttaacaacaaactcctttaaagatttaatgctagcattgaattactttttataaccccataagaaccctatcccctctgcttcttttgttctggctgagttaatatatcaggtaggatacgctggatcgtggcaccttctcaaactcatcaaccagcaatcttcccttcttttttcatagagtagtccctaataaatacaaacgagaagaaatatctctctacttaatgtttcactcctgagttgatcatatatagcctatttgtccaaaaacatttttgagttcctactgggttttcagcagacctttagatttaaactgccctaagtttttgtttgtttgtttttcttcatctctgtatctcggcctgtacaacctccaaagatgatccatattgcaaaatgatgtcttctgcatagatctcaaaccaaaataaaaattccccttcctggcaatagtatcagcttaagaattaggaaaaaatcaattgtgttaaactaatttatattactgtataaatgactaaaaaatatatattgtttcagtaggacaataaaatgtatgcattctatttagctacttataagtagctaaattttttcctctttctgcatgctttctaaaaatattctgacttatttcttatatgcatttctcacaataagttgagttcatatattagggtacttggtgcacatttccccatgaagtagagctgcagatgatagctagcttatccaccagtcctccaaatccccatctaactcttcttgtaatttataaacagaggattattaataaatgttgcttaagtgaataactgaatagaagttagacagggaggagggctcatccatgaagagggtctgtgggtagtattcagtgctagaagacacttcctcctcttttccagggcaaaacactgctctgggtaaaattataatgctcacagagcatcttttgtatcataactctctactcatactttccaacctctttagatgctctcttcagtgctttcctaggtttataagtaaaatctttgatcttgcccttctcatggaaggcctccttgcttcaatatgacctgtttctcccctgtgaaaacccatcatacctctcaaataaaatccatcttttatgaactcttcctaatcaccttttagtatgaaaataagctgatttaaacataagactccaagattgtttgtgctttaaaggaagatatatgttaacccaaaatatctccaacagtggagttttatgtagtctggctaattcaatgtgacaattcaggcagagtgagagaatatattttcaaggggccaatctatagagtgtcttgactgtgtttctttctccagagttacctccctttcatatcatttcttctttctaggttttatttgggcggaggaaacaatggttaaattatgtagatcaattatctagaaaataaatatcaaacaaattgtcttgaaagtattataaaatttattcatgcttttttggaattgttttgaatgtttttataaattttttcatcctttttttcagcaattcaagaataatttgctttttgctatgttgcagcagtgaaggcagtgaggggctgtggtgtgatccaggaggctgagaattatgcagtgggtgctgtcaccttgaagacatcagcgtgatcaggcagatcatcatggtagtaaaatagattaaaaattgctctaagaggccattttattaaatagaagtgatttaccactgagcaggagatatcccagttgtggtggctggaagagaaattttctaagcaaagatgagaaaaagcaaatggctggtgctgacggatctttccaagcagtgctatgtggcttctgtacgcttctgcagacactgcatctgtattcctgtagtgagtgattctgacatggcacacatgcatatcaacacagatttccctgaagtacacacttcacagggtttcaatgactgagagtttttgtcagtgtcatttttaaaagaaagtggagaaggaccttcacgttgtgcacatgtaccctagaacttaaagtataataataaaaaaaaagaaagtggacgttcactacaaattttgattttttgttgttgttgttgatgttgcagaaaatgatacagtgtatctgttatgattttgtgagtaaatgtttaatttttcacagattttataaagttaaagatgaagcaagatgattcaggaatcctgtaacttgcagcccactcccactctcccaatccaacccatatccatcaccagcttgagaaagggaaagggaggaggacccagcaaagtggttgaatctcagcaaatcaatgagtttggaaagaaacagtttcagactgaagattgcagaggaagtttttatttatttatctatttatttcttttttcttttctttgttgcctcttaccttggtttggcaaatgaaaggctctagtggatgtggaatttgagagcactggagaagagaagagaaaacaagatgcactaactgtgacattttgctgagtgcctagaaatagattccctttactgtctttacagaggtttaactaaggaatgaaattccactgaaaccttttttgcctgtttggattgtgcctcattgacagtgataccactctggggctaagtctgatgtgtcacaacccaacagggtggggctttatctctttttcaattgattacatgaaataattgtattaaatagaaaatataaaggtataaatgccttgatatttatttcttatcagtccttatattccttagtagatctctatttaaagctctaaaattatttatcttctcctcccctgatacttcttttcagtctaaactctccaaattttgtgaatgtgaagaaacttacaaactctgaatatttctgaaaacaatcttctattgtaaaagtaatatgatcccattaaacaaaatttgtaaaaaaaaaaaaaaagaaaagaaaaaaatcacctacaacattattagcctaatataaactgatacaaatgaatataatactgctttggtattttctctccatattttcttttacaaagcctagttatgattatattaagcactttacctcaggtaaagcactcagcttccccttcgattctagcatttggcatctgagggccatgatctttggtagccatttttttatacttcaggagtttatatgccagaatcaggctgtcaaataggtccatattaatacctgttaaattctgaaagttcagggacaaacttttaatctatccttagcaaaaagtgataaacttggaggtgctaagtaaataaaatgtcttaataaaattccattacaatgttcacatgtaccattctgatactgtatatttgcccttacagtcttgtctgcatagcaggatgctgtgccaaatcatctcagcaaaaggtctctacatcacgatgtaggcaaagacattagagtgggtgaagagaacctcttattaccttttctgggcccaattttctcataatgaacctgcacaagatgatctctaaggttcggttgtgttgtagcaatatattctgtagagttgagaacttgaaaagtttcctccacttagcatagttatttctagacagaaatgtcttttgtattcttaaggcatatcgtgtatgacagtaatctcctaattttttcttacacacctgctaaaagaattctaaaaagctatataccctcctgcacatttaaaaggacattaaaatttcttttcatcactataaacaatgataagggatgtaatattcagtataatataaatattgaccttttagaataaaaccattttaaaagcactcaatataacaaaaaccatagcaatgtgttactagctataacccattcaaaactaggtgaccatgcttttcaaagaaatttaatttgtagttttctttgttcttttatttccattccatccccccacagaattgtttcttaattcaatatatttttatgcttaaaaatcttctattgtttcacttgtagttttcttcgtacttgtatttctgcctctgaattataacctaattgatttttatgcttaaaaatcccttattaatcatattactcggcaataaatacatgagtattcatttgggaactaatttttaaaattcatgtccataggttctaactgttcaaatgtttcttttggattgagttttcattatagttattagtacaaaattggactaaatggcatgaatatattacacattttgatacataattattaagcaaatgcatttcttagggggatagatataatttttttaaacaattagcttattgtagacatgcatgaatattactaattgttaggcagggttgagcatcaactttgctttgtttctcctccttagagatgaaaagcttatgttcacttaaataagtagatgagaatgaaagttttgctacagtaatgttactcagttttattgactcaagtcatatgcaagaaacacatatatctctgtcatggttaactttatgtgtcaccttggcaaggctgtggtgcccagttatttggttaaacactagtctagatgttgctgtgaaggtatttgtagaggtgattgacatttacaaccaatacactttgagtaaagcaaattgcctgcaatgatgtggctaagcctcatttattctattggaggccttaagagcaaagactgaggtttcccaaaaaagaagcaattctaccttaagactgcagccagcatagaaaccctgcctgagtttacagcctactggctgctctatagattttggtttcaagactgcgatgtcaactcttacttgaatttccagcctgccagccagtcttacaaacttcagacttgttagccccactgcaagagccaattccttaagatagttctctatgtatctccatctctatctctatctctctctatctctgtctctgtttatatctctatctctatccccccctctacctttatctctatctgtatcccctaatctctatctctctctctctctctatctctctctatctctatttctatctctgtctctgtctctgtatctatctatatctttatctctatctcctattgcttctgtttatctgaagaatcctaactagtagtctcatatcaaaagtacttttagtgacctatcattgacaactgaattagactctttacaatttttttaagaaaaataattgagtacccctcaattgaaaaaaaaatgatttgttacctaatcttaattttcttttctttttttaggtactgcatttcctggacacgatcttaattttcttaatacctccaccgacatttcaaatagcgtctctaatgccccagagacttttatgcccctaaggtagttttctttcttttgtgaagcagaagaagggaaattgttaaagggaatattttaactaaatttatttccataaaactatctttgtctttatatctcatggaaagtgttaggtagcctcaggattatatctccgttggaaaactgtagatgtaaaccttcttgctatctacatacttacatatttttctgttgttatttacttatgaatagcattttgattatagcagaaataaaatacattaaatgactaagctcagaaataagaaaaaaaggtcaatggtgatcatttatttggaaactatgatattttaatgatattaatggtgtaattgacatttagttaaacatatttcatcgtaagtagagcactttaactcttacggtccacttaaaatgtaatcatacgtttatgtatttctagttaatgtatcaaactcaactgagtaatcaatgtacatcatttattttgctcctaagttaatacactaagttatgctttaaaattactaatttgctgcaatatccaatactctcttttaagtcttacgtctgcagaaaaggatataaacatttcatgacaccaaacccaagtatttttgatgcccttggcagtgtcagttgaacagacagtgtcatttaatgtttgagacagcatctgaattccttttattcttaaaattctattttaaaatgcagtttttggaaagttaatgtgaatagaaaaatttctaacattttatgtgcatgtgttttgtttgttacaggcttagcatctcaaatctgaaaattcgaaatctgaaatgtttctaaaattcaactcttttgagtgctgatatgactttcaaaggaaaagctcattggagcatttcagattttggatttttggatttgggatgtttaaccagggtaaaatatagaatgcaaatattccaaaatctgaataaaattgaaatctgaaatgcttatggttccaagcattttggataagggataattaagctgtataacttataaaactgaatataacaaaatttcccaacatgtggaaaatgatgtcttttttcaaaaatgtcaatagcagatacatggtacagtaagttaggggaaaaaatgaggtttcatatcttctagtttcctaattaaaaggagcccattctgggttggaagaaagtgtcagtaagatcatttctcctatttgaaaatcatacaaagcttgtcagagtgactcaggccaggagtgtagctgggcgtgtagctaaatgatatctccccacatctatataataagctgttacctgctttaaaaggaaaagctctcagcatgactctaatgttgcatttctggaatacagcttgaaaagctcttctcagggttgaacagagcatgaaggtaatggttattatctactcacattaaaaaaaaaaaaaaagaaagaaaccaccacagaaaactacttactgtctttaggctctactttcaaaagtgccctttatgaacgcttttacactgttgatgggagtgtaaattagttcaaccattgtggaagacagtgtggtgattcctcaaggatctagaatcagaaataccatttgacccagcaatcccattactgggtatatacccaaaggattataaatcattctattataaagacacatgcacacgtatgtttattgcagcactgttcacaatagcaaagacttggaaccaacccaaatgcccatcaatgatagactggataaagaaattgtggcacatacacaccatggaatactatgcagccataataaaagatgagttcatgtcctttgcaaggacatggacaaagctggaaaccatcattctcagcaaacaagaacagaaaatcaaacactgcatgttctcagtctaagtgggagctgaacaatgagaaaacatggacacagagaggggaacatcacacactgggcctgttggggggtagggggctaggggagggatagcattaggagaaatacctaatgtaaatgacaggttaatgggtgcagcaaaccaccatggcatgtgtatacctatgtaacaaacctgcatgttctgcacatgtatcccagaacttaaagtataaataaataaatgaataaataaataaattttaaaaagtgccctttatgtgtgtgtgtgtgtatatatacatatatattacatatatgttttaaatatatttattttttgtagttcagaggtcttttatctttctatacctattatgccatgaattcatagggaataggttccagcagctcaggctcctctccattggttctccaaagtgtgctcctctgggtggagctggctgacaccaagtacctttgtctttggcttcctttttttctgatcattttccttcacgcgtttcaggaagctatttcgggtcttagagtgcttaatgtgcttaatatgcacattaattctcttggcaagaatcctgcccttgtttgtttagaacaatgccaacagcatgctgggtaacattgtagactcttccaggtttgccatggtagcacttgtggggcattcctttttgaacagtatccattcctttgatgtctacaatatcgcctttcttgtggattcccatgtatgtggccaaaggaacaattctatgttttctgaaaggccaagagaacaattatcaggtgactctcctgtttccctttgtgttcgtcattttggtgaattactggaagatggtggttctggctgaaagagctatttttgtagctttgattctgcagttattaatttttatattgttgatttgtgcatgtgtaattatattcaaccttctctctctgagatctgatggtataaaaggatgacatttatgttgccaaatattttacctaagtaaaaaaataactgaatataaaagattacatttatcataaattatataccctaaactgcataatcagagtagcaaaatgcagacactttcatcaattcaattttgatggtttaaaagcattttcccccactggtgtgctgaaactggcctgcactggcttataacagctgattgttagatttttaggaatcatgttggcagcttgaaatcagtcatagaaggagtatttacaccatggaaaccagcaaatgttacaaaccagcactttttttttccctccagggagaagccagatgttaaacattaaccagtacactactacctatgtacacaaagtctctctctttctctcctctctctctctctttttctcctctctctctctctttctctccctaataaagtttgtatgattaggaggaagaaattacatgattaatatcaaattgcctattacaatttttttgtaaagttgttgtgaattgaatgtattatattcttgggagaataaaatgaagtctggaccaaagatgaatgtcttgtagaaaatgtatgaattggtttcagaaggtacagttctagattttctcgacaatcaaaaacatgttcagtgaaaatgaatacttttttattttaataaataaggactccatttacaactgagcaactgtcttttttttaggggaaattttgtacaagattcctcctcttgcctcaaaaaataaggagcccaaacttagactcaagctctgtttaatgttaggcaatgcttcttggcaaagcaagagaactgtgatgttctatcactatagaattagccacgaggcatgctgctcagaatactgttacttacattgttaccagttacaagagcctctattgtactcaatacacacacacatacacaggaaaagtagagtcaatattggtggtggagctgtgagttgcacaaatatgctgcctgagtagttatgtgtctgaattagctaacattagcatccattatgcctaaatagctttcaaaatataatactgaaatttctctcttctgccccagagtttacatgtcaaaagttattgaatttagagatttctaagattgacatgcaaaccagtgtagtccaatattctcttacaaggctacttattcagaaaatttgtgagacctaggtcatatctcttttcattcacacaatttttcacacagacagattttagcaataattagagtgttatcattgtcttatataattttattctttaataaaaaattgcagttatgacggaaaaaacatctacttatcatggtaatgaattattcactcatgatcgagacagacacctataattatatgatgatttggcttatcttcgataaagagttttaaattttattttttaatgatttgaaataaaattatgtggtatataattatattttgtaagtgttccacttgtatttgaataaaatgtatatttttagccaggcacagtggtttatgcctgtaatctcagaacttcgggaagctgagacgggaggattgcttgaggccaggagtttgacaccagcctggacagcatggtaagacctcatctctacaaaaataaaaataaaaaaatttagctgggcatggtggtacatgcctatagttgcagctactcaggaggctttaagtgggaggattgcttgatcccaggagtttcagctgcagtgagctatgactgtgtcactgtactccaccctgggcaacagcgcaagaccctgcctcttaacaaaaaagtatattttctgtttgagagttcccataggaagtttcctcacatgattttgtatttgtcaatttctctatttatatatattgcagctatacttggctgttgttctttcttggtgaattattcccttcataaatttgaaatactcctttttgtccttttcaatatcttcaaatctactttttttttgctactaaaaatgctagtacatcagatttttttaactaatatttccttgttggtttttatcacacttggaatcttaaatcttttgtgttactttgtttaaatgagtctttatatcatatgaacagtacagtatctgagaatttctgtcttttatgaggtaaatttaaagcattcacttttggggggaattactggtaagtttggacttattttgtcatttcttttttttgtgctcaatttaccatcctttccattccttggtgttttcttttctacttcttactgggttggccaatcattctattttcacctctatccatatggtagttctacattttttgtaagttctaattttcaggagttcccttaatatttgacatttttcttgatttcaaggcaagaaatcataaacatatagtttgatgatttttcacacccaaaacaaaaaacagaatattagtagcatcctggaggcccccttgggccctcttccagttctaacttctttccccaagataaccattatcctggcttctaacataagagattagtttctcctcttcttgaattttatatacatggaatcatgtggtatttatttttgtttggctctttttttcttgctgacattatgttggtgagattcatctgtattgttacacatagttgtagtttattcattgtcgttattatataatactttgttgtatcactatgccataatttatttatgcattctactgttgatgggcttcaggtaatttttagtttttggcaattacaaataatgcagccatgaatattctagtacaagtcttttgatgtatattagtactagtttatgttgggtatatttctataaataaaattattgggtcatatggtatgtgtatatccaatactggtagacacggtcactttcccaaagtgattgtaccaatctgaactctcaccagcagtgtatgagagttctgattgttccacatcttctccaacacttagtaacatgtgttattttctttttagcactaatattttaaatatgaaaactttaactcatgttgaatcataattttacaaattacgttgggttaatcttatccattgggcccaagtacaatttttttcttcttctccttccttcccatattaagatcatctagaatttcagttacacattattattattacttctcacagtttttgtaattctttttttccttaaactctagctaatctttcagagtgagtttttgaaaattacattttagtatctgaaaatgtctttattttgctttttcatgatttgaaattctaacaaaaattatttctcttttaaactatttaagatacttctccattattttgcattcattcttacctatgagaagttctatgttactccaattattgctccttaatgggtcttttttcctctttggaggattttcagatttttctgatgtctcgaaattttgctataatgggtccacagaaaggatttttttcattttttctaatgagaactttaaatattcttgcctcttttatgttctgaaatgaaaataaaattttaaatatttttcccttccattttctttggtccgtttgaaacttttgaaatttttgaaacttttcaatctgtcctcttggcattttggggttatattctaggtgaaatattagcattctgtgtgtgtgtgtgtgtgtgtgtgtgtgtctttggatatgtataaggaaaacccatatacacactatccaacctcaagaactatcattattcactttatgtatttctattcatgattgatctacttgtctattcccataaatgcactatgcactatataaatgtatatatgtgtatatatatatatatttttggttggagttttcttaaagtaaattcagacaaaatcgttttattggtaattacttaaatatttccaatagataaggactgttcttttaaatttagctacaatacaattataatcttaaaataattaatgataattcctttatagtatttaacacctagtttatggacaatttgagtatatatatcagttgatttgttcaaataagtcaacacattgcatttggttgatttacctcttaaattcctttattctattgcagtcctcacttgtttttaaaatactatttgtttattgcagaaacaatacttttgtcctgtagactttcccatactgtagattatgttgattgcatctttctggtataatttaacatgcttttctgtcacttgaaatttctataagtgaacattttgatgtagctgcttcattggattctgatccaatttatttttgcaagattaatacgtaagtggagctaggtttgtaatacaaaggtagttctttctgtcttcgtgatcttaggatccactgatggattcaggtattctctgcctagccagtcatcataaagatccttatcagtaatattagcagccgttaatgaatactataatattaattattaggggtacaaaagtgtttcttttctaatagatattattttacagaggagaacccatcccttatcaactttctgatccctctgaatagttgttacagaaaagataaatgctaattatttcactgatttcagttttctgaaaaaaaaaatcgtcctaacaacctctaaaaattgttaggcaaggattttggagttttattatgaactcatgaatttttatatacttgatatgtttctatctatcacagtcacaatttttttgatgttcaaatttatattctttatagaaatatgttatatggaaaatatatcatgttatatagaaactttaaacatatattaaaatattatcaaaaatttggtaatcttgtttcatccctcttccaactgttttcatggattattttatggcacattgtatgcaaagcagctcagttttttggcttatgtttgtcctatctataccatgtaatggtgtcagcagctatttaaccccaaatctcctcctcttctccataggactcaaacaggaatccagagactcatttgcactgggagacaaactgaaatgacagtctcatgccatcctccttgataaagaacactttcattttatgcccatgtacaagtttcaattgctgcataacaaattaccacaaattcagcaacttaaaacaatgctcatttattatttcacagttctatagatctaggcaccctggaccgggttctctgcataggtctcacaaggccaaaacaaagataagccaggctgggcttatgtatctgcaagttttgaggaagaatctgcttctaagatcattcaaattgttggcagaatttagcatccttgtgactgtaggactgagatccacactcccttgttggctgtccaccaggggtcactgtcactcctcatggtctccctccagtttttgaccacagcccctccatcctcacagccggcaatggtgtatagatttctttttgtgctttgactctctgatttctttttctgccaccagccaaacaaaattttttgcctctcaagggtttgtgtgattagattaggcccactcgaataactttgcatttgataaactcaaagtcaactgattagtgactttatgtctacagaatccctttgccgaataagataacataatccagacatgttagctcattgtactcagaggtccaagaatcagggcagacagtcttcaggggctgccttagaatcatgcctgccatggccctgcttatttcacttttgccacctttaggatgagttagctcttaaacatttccgaaaaagtaggtttctggtgaaacttcttccctgccttgaagtttaggtccagatgtaacagaattttaaattatgttgtagttgagacacttacacacaaccacacacacacacacacacacatacacacacacagagtccatcttcaaaacagcttttgactgttaacatgattctttcaatttggagggatgcttaaatgttccgccataaaaacatttagctctttttgcaatatttcattagaggagaagactatctttaaaagaaacaagttcaaatgattcctaagagtcttgaagtattttcaaaacagtgttttctaaatcttttcaaaatgccagcagttcttgataaatgaaaggtcgtgttaattcttttggcatttaaatcagcacctttaacatgattaattgacttagcatttaatacctgattgtgcattccactgttattatatggaaatactgatttggatccagaagaatattaaaacaattattaatttattctaattgtgctaatctctgcatttaattatctcccatcaatttaatgaaatgaaataattacttttataaaatgtagcccattttgcattttagcttatacttataaaaataaaggtttagaaatgtcttatgatatagatgatataataaaactatccacttccagtgtgaaagcaatatgaacattctgtattcaaaggagaaaagttttaaaaactagtattgtacttccaaggaagaacaattgcagaagcttcactgtatccctttcctctctagagatgaagatgacttatgctaattttgaaattgaaaattcttttacacatattacttcctgtcctttatatcaggaggaataaagtaggtgaatcccttgaatagaatgcaaactcctggccaggcacagtggctcacgcctgtaaccccagcactttgggaagctgaggcaggtagatcatttgacgtgaggagttcgagaccagcttggccaacatggtgaaaccccatctctactaaaaatacaaaaattaaccaggcgcagtggcacatgcccagtaatcccagctactcgggaggctgaggaaggagaatcgcttgaaccagggagccataggtttcagtgagcccccagattgcccactgcaatccaccctggacaacagagcaagactcaaacaaaacaaaaaaaaaagcaaactctgttttgatcttagatctctctgtaacattctgttctcctaactggtacctcgggaaatctgggcctttgtaattttatcattatctgggcctttgtaattttttcattatggtgacattcttgattttgcttaacattcttgggttgttatttttgaaatagtccttaactttcctttggggaaactccctcaatccttttgcgagtggtaccttagtcttcccctaggcgttggatgctgttttcctgaataaccagttgggactgatttatacttggtacttatactctcaataaatagcatattaattactgttactaagatccctggagcttcctcagttcctgcccttcctgaagccttgttctatgtagcttttattcaattttttgaactatccttatagactttttttttttttagacagagtctcactcagtctgtctcccaggcaggagtgcagtgatgcaatctcagctcactacaacctccacctcacgggttcaagtgattttcctgcctcagcctcctgagtagctgggattacaggcatgcaccactgcacccatctaattctgtatttttagtagagacaaggtttcacaacattggccaggtgggttgtgaactcttggcctcggcctcccaaagtgctgggattacaggcctgagccaccatacccggcctatcctcatagatttttagtatctttctccccgaccaagttaccaagaattactttctgttgcctgcagccaaagaaacctaattaatacatccatttaactgtgtagaaattcaattctatacccattagagttatcctatatttatcgtgttattatcctcaaaggctccaatgtcccaaggcagcaagaagaaatcacatggacgttgctgtttttctttcctgctgtggctcaaatgtgaacacacagagcatgttcaatatatttatctgtttgtgttaatgaaatcccaaacattaggtttgaataacaacaacaacaaaaggatctgaaaatcacctctttgtcttattgtacattaaccacgtttggagagaacattattaaatcatctggcaggttgaagaactagtacagtttttgaaagtcggagctacttgtccagtagcctgagggcaagccagttacaggaaagtatgttggcaaaagggacaggaaaggctttagattgtgtcatttctcaaatgtttgctcacatttgacttgtattttcacacatttataccacatcggtttcttaaaattgttttaagaaactcataacaattcttttgtgctataaatcgcagaaagattttatgtgaaatttcagctggttttaggaagaatttatcttttctttggttactataagttattattcagtttttacaatttgtcatgaaaacatgctatgccatttctatgctactttaaagaattaaattctgtttgtaaaagtacatatttcattgcacaaagggttgtatttaatggataaagggactgacagattaaaaaaaaagccatgaaaacaatgctaattcaaagggatacagatatcaaaagaacaagggaaagaaaaagtattagggaaaaaaagagtaatgaaatgtttttaaaagaagaaatgaaaaaggttgaggccccaaatagcctaaggtcctaaaacatgtggccaattgatcaaattaaacctgacaatgttaatataattatttgttcgtgtccctatttctctaggattctacagttgtgcttcactcttccctttctctgggctcagtcccgtcactacgaactggaaataatgaattctaaaacagtaggaactgtggtctggtgtcaggtctcctctgctccttgttctatcctttactatttgttttcactcactggtatatttctatttgtttccaccatatgccccatccagaaatggagtcatgctttgattcttgtgttaaggatgttttttgctatctataacagaaactttgaatacagtagcttaacaaatcagagttttatattccatttctcatacctaatccagaattagataaaccaggacttgtacattgcatcacaatgccatcagagaccagagcttttctgtctttttaccccgccatctttagcatctttatttatatacacttgatcacaagatgacttttgcaccttcagatattaaatctgatttaaggcagcgagatgaggaaagagtaaatgcagtactcttgttttagggaaaaaggctttcttaatatctctcctttctctgctattggatttctatgtgtcttatttatcagcatattagtttttgatgcataacaaacaactacaaaacttcaatagcatacaacaataaacatttatacatcatgatctgggattcagctaatcagggccgggctaataggagtgggtctgctgagttctgctgagctcccttaaacatttgcacgttagctgaaactgtgctctaggctggatgaggctgggtttggttgaggcacctttattcaagcgtcagctctgcatcgtcattttcttttcctcttcctggaaccgggagactatcccagcagagcagaggtgcaagattaagcaaatatatatatgcaaagcctcttgaaacctcttgaaagccaagcttagaattggcaaggatcattctgttggccaaaacaaattacatggatgaactcagagtcagagttggagagcacagcaaatttccatgacaaaccacatggccacaggaagagtgaagaatttgggcctttaatgcaattttccaggcagtcagtgccacacaaccatgtctcgctataagaaaggctgaaaaataaaaacatttacctgggacatcactattgaaacaacacttatttatttcctacctttcttcttttttcttccttctttctcctaattctcttcttccttcccctcttccttttctttctttcttttttctttttgcaaagaaagggagtggaaacagacatcaggtaggcagtgaacattgataatcattatttcctatatagtactcttatatctttagtgtaattgctactggacctctctaacagccttcctttcttgtccattgcttattctatttcctgtttgtgaatactgaaccttacccacttgctggatttcccacttgttgcctcttgccatgatcccttgatgtcatctcatgcccttgctaggagtttccctgattgcctgcattgaatctaggagtctatacattttagtcatttccagtatccccacttaatttttttttggggggagcgggaatggagtcttgctttgtctcccaggctggagtgcagtggtatgatctctgctcactgcaacctccccctcccaggttcaagtgattatcaagtgatagctgggattacaggtgtgtgctaccacactcagctaatttttgtatttttagtagagacagggtttcaccgtgtttgccaggctactcttgaacacctgacctcaggtgatccacctgccttggcctcccaaagtgctgggattacaggtgtgagccaccgcacccggctcccacttaattttgaccaacattaagtaaaagaaaaatggaaagaaaaatgtaatgacatttttgtgaatcttaaatacagcctatcaaattacaattttatctgactaaataatcatcaagaaataagattagatagaagataaaaacatagacaaattaaggctgaggatttaaagcaaaagcaaaaatgagagtgtcaaatcagtaagtattcctgaaagctgaacgtgggcagggctccttgaatgcaatcattattgactgaaatcagctgaggaaatctagtggcgaacacagtgggagagtgtgaaggttggtgtggcccaggaacaacatgacgggaaagaatgatgcaaagtcccagctggacagcaggacttggtaaattagacttgtttctgacattttagagacaatttttgaagaagcttgaacaaattttccttgagcaaggctttaatgttcttgtttgtgttcttgtaaaatggaagctctctaccaaatcttaatatgtttctgcaatattggctgcatgctgttcccattactttgcagtatttatagaattcagacataaatgtgattattaaaaccaacacaggtgtttagtctttaaaatagaacattatgaaaatatgccttaaaagcaatttataatagatcaaatagtttccttccttaattctcaaaatttaagaaaatgtttcctggactctgcccacatccagttgaatatatttatatttacggtatatatcttgatcaaaatgtgtaaacataaacagaacaaacacaaaaacataaaacaaaacactagttggaacaagaaagcccaagttctaccattggctgtagcactaatttgacatgtaaatttatgtcacttcatgtctctaggcctcagttcacacatctgaaaatgtgattgtgtagcaatcattttattttaaagaaacgatgtaattataaattacgcttaaactaatataagctcatagtgataaagtgaagtattactgaagattgcaaaggtaaaatatacctgatttttttcactagtgcctaattcttacctttaattcagcagtagcaatctctgttaccagtatcttgtagactttcaataaccttacctgcatataaaagtatagtaattcttaggccctggtaaaagaaaaaaaaaagtgggtccttgtgtccagcacccagcacagagcctggcatacagtggccctcagtaaaggtctgtttcacaattgatacctgaatgacttgatccatgtgccccaggtcctgccttacaaactggttggtgctaaatttatttttctcctgtgttccggcatttttcttctcagtctactatatcactagggctttaagctgtgcccttgaacctcactctgtggctggggttctacttgactcctgatacatatttttctgaagtcaactacggcttcccatctggcggcagcctggcactgctgggcacacccagttcttgtctcaagccaagccagtctcctcttgacaatatggttgactcttccaagtgtggtgactgtgtcataagaaaacacataacagaatgggtatttttaagttttgcggtgttttctcatatgtctattgtacagttggaccgtaaatgggcacctcgggccagcaccatcatctgcagaccatgacataagtacagtggggctgaatttattggctctgagttttcccagcatgacctcaaactattacttaggtttttatataagcaaatagacttttggctgatacaggttctagcacagatgcctgaaggagtgacatagaatatgttgccgattaactgtctagagggactactgtggaatttgaaaccgtcggaatatccatgggctttcccaaaatcacttttctggaagtggtgtttttgtgtcagctaatctgcttgtctgacaggctattataataaacacacagggccatgaaaatgctcttgccatatttggttcaaatttaacattttatttaatattccatggacaaaagactgcatctgtagattacaggctaaagagtgtgtatggatagtccaatcaaaaaggatataatatattatagatgtttttaaaaaagattgtcttctacttagactaatctatgttggttacttaaattaattgatcagataaagtattatctaaaattgagctaaatctactacaatgtattatattttgattaaatatttttaggggaggataaaaaccaaaacaaccgtgaaccccaatgatcttttaacttttttcagtttacccatctaagttctgtagatcttttatataacttcttattgtaaaaatgtattataacaccaccaatgaaaattaaaatggcaaaatattccctcaatagctctgcttacattttctcatattcttgtaaagttcttgttacctgagtatgtataagtttttagcattttagttgtaggctataattatatatcttagttcttttttaaaattaagaaatatttcaaatttacaaaataatattatgagctgacgtacatatagaactaagctttaacaaatcttaagatattggcatgttttcttcagctatctttttttcaaaaacatcataaagaaataaattaaacattgtagagttaagatcccctataccctgtatgcccttctttagttttatttttcttgtttcttcttcaaaggtaaccattatcctgaatttagtgtttatttctcttgtgcatgactttttaccatgcaagtatttaatcttaagcaccctggaacattgtttttcacggttctataatttatataaatggtattatattaaatatcgttcttttgcaacttatttccctccaaatatatgttagagatttatttatgttgatacatatagctttagctcattcatttaaagtatcacatagtaggcctttatatgaatatacagtaacattcatccattttctaactgagctgtgagcataattactgctttacatcactggctattggagtagtttgttatgcagggtatgtaaaccaactttattagatattgacaagttgcttctcaaggtatttgcaccaattttataattctgtgattgcttctcaacatacttgccaaacctcggtattggcaggtcgccacgttttcattaattttatgggtgggaaatggtaaatgttactcttttattttgtgtttttctggttgttggtcagtttgattatcttctcatatgtttgttagccatctagatttcctattctgtgacttgaatatgttccaattccatacctattttaaaatttggttgtgaacattgttcttattaattttcaggaatttttgcatttattctaggtactagttctttttcagtgacgtgttgcaaataccttctttcagactttaccctttgctgtattaaagtccactttattaatatcttcctttgtggtttatgtaatttgtattgtttaagaattcttttttataacaaggttataaacatattctatattctcttttaaacattaaaaatttttgtttttaacattttggctttaattccttgggatttattttggagtatggcataggataggcatattatttaatgttttacctttggataaccaattgtcatagccccatttactgaattattggcaatgccacttctgtcatatatctagtttacatattcttgtgtctatttgctggattctattctgctcctggtctgctagtttatctctgccagtgctctcctagcttgaatgacaaaaccttacaataaatgtcttcatatctggtctttagttcttattcattaattttttcttcattatttttgcccatttgatctttcatattttcttaggataaacttatcaaattgcatggaagaccttgttaggattttgattggaattacattaaacttttatgttaacttggggacatttgacatttttaaggtgttgatccctgagattcataaatatagtatcactgttcttttaatcagatcttcaataatgtcttctaaagttctctataaaagtcttgcatagtttgtgttaattttaagtaccctttgatgtattgctgtagagaatggtatctttttcttttacattttgtaattgcttattaatggtaatagaaggactgttttttaaaaattttatcttttgtgggtacatagtaggtatatatatttatgggttacatgagatattttgatgcaggcatgcaatgtgtaataatcacatcagggtaaatgggtatacatcacctcaagcatttatattaatatccttttagttattttaagaagaacaattcaattatttttagtatagtcatcctgttgtgctagcaaattctaggtcttatttattctttctattttttttgtatgcattagccatacccccagaaggcctatttttgttcattgactttattatatattcagcaatccttacctctgtcattaatttgaatggtaggtttaagaattatcttggattttctgtgtagacaattatattgtcaggatataagtgctgtttttttatattcctttcctgttactactatcgtttcatttgtttttctaggtcttccaataggctgttgaatggaagtcatgatgaatatattcttttcttgtttctaatgttaaagaaatatcttcaaagtttgtttggcttgttgatagatatcctttatcaagttatgttggtcattactgtttgttcttagatctctgcctttttcttgcaaactgcatctcccagacactcccaactgggcttctgctatgtttggccaatagaatgcgctgttaggagacaggaatggaagaaaaagtgaagttgggaagtttctctcctactcttgatgcttcttcaggtagtatctgacaggagtttcatctcctagagacagttcctttttccatggtcctcgttcatgccagagtctttatatacatccagcccttgcctggtagccttaggtcttggcatctacctacattacctcctccttttgtacctcacattaggaatgttatagcttcctgcttcattaatgtctgtcaccttttaggactttgcactctctccacacctctgtaactagttccttatgttaaattctgtaaacaggacaacttggtatgggatctatcttattgactggaccccaataatacatcagattagaaaagttccagtcccttctttgtttgctagtggttttgttggtttgctttgttttttgttttaatatagtcaaattacattttacaaaatcatttttgttattgagttgctatatgtgaacaactgagaattgtacatattatttcccttttattctgttaatgtggtatattaaatttaatagacttcctaaagacacttcatttttgcactccttgggtgaaccctatttgtttatgatgtccttttaagaacattgtactgatcgtcaggtgggagaattcttacatgttcctccttttgcaaggcagattagaacatgatgattggggttcgcataatatgtgattaacgtttctgtgtaatcaggacttgcaacatcccgaatgcccttacctgacacttcttaaaaaaataaataaataaaaacacagtgctaaattttattgtttgctgtattttaaaagaatttttgcatctgtgttcatgagtgtaattattctataattttcttttctcgtattgcccttatctagtttagtaatgcaatttcagtgctcattgtgagtttaatttgtgttcatttcaaaggtaattggttatttatttcagcttttaggactcttcatccttgacaattacagttctattatgattttactcttttgaatagttacctctttaaatattacttctgcattgtttccttcatgcttttattatattcctgtgagatttacattggacacactttcacctctgtgtcacttaaaaatgtaattacttcttttaagtaataccatgtttttattttatttttgcaagttgaatttcttagattttaattcttttttcatggatatgattcatttgtcaatttaaatactgtaaatattgattataaattctttgtcagttttttaataaaattaattttatcttcattatattaacattctgattatatattttttctggttgtctttcagagctttagatgtggtcctagtattttgatttttagcctcattttgaatggtagtttctttcccccttttatctccttctctgcttgctcctctctaataagtgttttttttgtttccacataggctccaggtccccagtgagaaccaagtgttttaatgtattttggtgcctctacactgatataattttggtgatattgcagatccaatcaccaagccagctattggcttagttctatttccagacttgagcctgtgtttgtgtcctactaccttgccaattgtggtaggcagaataatggctcccaaagatgtgcagatcctaatcctaatccttagaacctaggaatatgctaccttatgaggaaaatagacttttgtagatgtgattaaggttaaggacttgatatggggagattatcaaggtggtccagtctaatcacataaacccttaaagacagagaaacttttctagctgtagtcagtcagagataaatgtgatgaccagaaaaagggtcagacagttgctgtctttgaaaatgaaggaaggggctcaagagccaagaaatgatgcgtggtttctagaagatggaaaaataaaacaaattctcccataaacttcagagaggaacgcagtcctactgacgtcttaattttagcccagtgagaactgtgtcaacgtacagaagtgtaagataatacacttatgtttttgaggtaattcgttacagcagtgatggaagactgataataattagttttataaaccaattataaacgatatcctcagtaagaggtgtacttcttttaaaagtactttcaatactataaaagtgcttttacatactttttaaagtacttttaatctaatgcttttaaaagttccattttatttcctttattagctttttagctatacctcttttaaatgtattaatgcttgctctaggaacccttaataaatagttacattataataaagatgtattacaatatgcatctttaacacagtctacattgaattaatattataccacttcacacacaatctgagaacctacatttacccctcctctcctttgttttattatgtataactcttccatctatattataaaccccacaatgcagtcttgtagtttttactttaagcaattatttttgaaagaattaaataagacagtatttttaatttgccttcatatttactgtttctactgtttttcacttccctgtaattccaagttttcatatagcttaatttccttcaaattaaataactttttaaagtacttgtaaaatgaaagtattggcaaacattattttagctttcctttatctgcaaatacttttatttcaccttggtttttaacgtatatttttgatggatatggaattttaggcaaatagtttttctgccagtactttatagaggtcattttattgtcttctggctaccattgtttcttatgaaaagtcattgattattcttatcattgtttttctatatgcactgtgactttctcctgtagctgcttctaaaaactttatctttcatatttagcaatttaactatgacgtttgtagttgtggtttctgttaaaatatttattttgctcaggatttgttgggcttcttgaatctgtgacttgaggttttgcccatcaaatgtgcaaaatactacaatttcttccaaatatttttctgttttattccctttttcttctgtgactttaattatacatgcgttagactatttaaatatatcttacagaatgcagatgattctctccttacaaactattttatttttttctacagtttatgtaatttcgattggcctgtcttcaagttcacttagtcttttatgtactatttgtgtgcaatttgctgttaatcttatccagtacattttgaaatgtaaaatacagtacagtatttttttttggttgtagaagtctatgtgattcttctctctttaaatgctctttacctactatattattatttaatatattaacaataattgttttaaacttctatctgcaccttaggtaatggggtcatctgtagttctgcttattggctgtttgtgttccagacactgtgataagaagagcaatagaggcgtttcatctctcagacaaggtgattgctcagattccttttatagttgagttgttccaggttgggccacagctttaactagattgagttcatctgcgactagcccaacttccaatatctagtacagctgccttttttttttttttttttttttttttttaaaccttagctatgtttcagctgggaaggggctgagctgcagttttggatttttaaactttctcgttatactcactccaactatgttccgggaatccagtcactgcgcgagtatctagaactatggttccagactcctctccactgctgctatgactgcgggaaagaaggtgaattttgggaacaaatacatttttctgtgtgagtgtgattgcatttcttccaggtttccccctgtttggctggcccacactgtcttctagaagcttgtctaatttctcctcttccctgtaaaatgtgtcaggaccaagggaaaacttttcctttactctgtaaaggttcactgaaaatcaactcacgaaaggcagtttaataggagaaaaggcatacaaatttattaacatgtacaggaggactttatgaaatctcagtataagatctcagagaaaaggaagattgttgacacctttacatcaccttgagattttagaaaaaatagaggtttgggtcatggcagaacaggttattgaaggaagagaaaaggaggcctggctagccaatgtggtcttgttatgcagacaaaacctcacaggaagcagccctgaaacaaaataaatgtttctttcagacctcagttaatctttcccagatcaaaccaggaaaggtcctcagatagagcctggctgcagcagtgcagactttctctagagatgcaaatctcccacaaaagacagcttctcagctattcttgtatttccagccctctcaatagtcatcttgaaatacataaaaaaaatttttagggtgaaatatttggtttatttcaaatgtcttggtctgtggaaagtctgataccctatgttccagtacctaaaccaagcacccatctccaggtatggaaatttctcctaagaaggggtctggttgaaattcctttcatttgaccacagataagccatgactatgctgatgctctatttcattgtataataatgtttaaaattgattttaagttaaaaaatgcagacagataagagactcaaaaacagttagagttgcctgagacattccagttctatttcatgtacagtttgtaaaaaaaaaaaaaattgtcttttctctttaacatcgtaaattggtcccctgatttttttttaacgcactattttagttgggacttaagttttctcatgtggattgtcctttaacttttttatgtcttttttagtaattataataaatttccacaaatcatagggtgggctttatcttccgttttttttttgtttgtttttttttgagacagtttcactgcctgggctggagtgcaatggcgcgatctcggctcactgcaacatccgcctcccgagttcaagagattctcctgcctcagtgcccccagtagctgggattacaggtgcatgccaacacgcccaactaatttttttttttttgagtagagatggggtttcaccatgttcgacataaaatattcttctgttagtctcccagttgtatccaggcatcgtgctctctattttatcactactttaaaaatgggatggttttcctcaaatggcccaaagggtttattgatgtgaaaaattttagaatggcatttcataaggcattttagagactcacatagtgcggattacagggaaactctaggggagtaatagtgcaatttattttcacttttcttttaattgtcaaaaaatccctaaatataaatgtattaaaatatgaagtgagagttcttcttttcatacagctgtcactaaactatcaaagctgaaaacaattggctaatctgtaccactccttgtgtcacatactgagtgcccatgtaggaatggggttgcttggagaccctttcctatctgtttcactgctctacttgtctgtctgggtaccaggcatgtccaggtgtgtatttacttttaactatactattcagtaactagtatgttctttatatgtgaggattacctttttctgcaattcggaaaaatcaacagcagtgtattttcagctgtgacttcttattcattctcactgatctccatgtctggaatgctgattagcatcatgttggagcattttagtctatcctccatgactcttaaatccttttcatatttaaaaacaatcttcatatttttatgctggctttggtttaatttttgtatattctcctccaattcattaataccctttggctaggatttatataatctataattttttaataataatgattacaattttaattcctaggattactaagggctgcttctcctgccattcatatcttctcgttctccttttcttctttctcattgttttttcaaaatctctcctgtctttgatgcatagctacttaagttgtatgtagtttttgttttggctttttgggatgttattccatttttaaaacttttgagaattttaaggacatgtatttttctagaagacttttagattattttttatttgcttagaattgggtcttcccgtttgttgaatgttttacaattattttggccatctttcatcttattctgctatgtgttctgattttttttgtttgttcgtttttgagaaaagcctcactctgttgcccaggctgtagtgcaatggtgtgatcttggcttagtgcaacctctgcctcctgggttcaagcgattctcatgacttacccacctgagtagctgggattacaggtgtacaccaccacactcagctaatttttgcatttttagtagagatagggtttcaccttgtggccaggctgctcccaaactcctggcctcaagctatctgccaatcttggcctccccaagtgctgggattacaggtgtcagccaccatgcttcacagtgttctggaattttagtttgcaagtttatcttatgcagaagtttcttccccaccttccccacctttctgtcatcttcctgactcttggtgtctggtgcttccgtgggtttcagcagggttccccactcaagaacaattttatattggtggatcaggacttttgtttgaggaactaatgctgatcagtaataagaaatttggtccagttcctgttgttccttcttggccactctaggcaatggctctgtgaaggcctccaatagtgatgatgcactgactttggttaatgggttggggaagccctcatggcaggacaatctcgcttgactcagtgggcctgtctgctctctttccccacaatgattagggactttcatccttgttgtcatagtagaggtgaaaactgtctgcctgttatggatttcagagctactgcttatatcctgcttatatccctgtatttttttttctctgttttttttttctccctctggagtcatttgtatgtgaggaaaagtgtgtgtttgcgtattttcttgtattatgtctttgctattttggagtgaaggcaagaggcagaaaggtggtcttctatatgaaatcgtataccatcttgaccagaagttcagatttatattttagaaaggtaagtctgaaataagtatatagtaggctagagcgcactgaggcctgagacatgagttcctttctgagatattttaggactttttcctgaaaaagataagagtgttctgtgacaagaataatggaggagaaagagataaattccagagatttctttttttttttaatgttttcctattcagtagactttttttttaattattgttatactttaagttttagggtacatgtgcacaatgtgcaggttagttacatatgtatacatgtgccatgttggtttgctgcacccatcaacttgtcatttagcattaggtgtatctcctaatgctatccctccccgcttcccccaccccacaacagtcaccggagtgtgatgttccccttcctgtgtccatgtgatctcattgttcaattcccacctatgagtgagaacatacagtgtttggttttttgtccttgcaatagtttgctgagaatgatgatttccaatttcatccatgtccctacaaaggacatgaactcatcattttttatggctgcatagtattccatggtgtatatgtgccacattttcttaatccagtctatcgttgttggacatttggattggttccaagtctttgctattgtgaatagagcctcaataaacatacgtgtgcatgtgtctttatagcagcatgatttatagtcctttgggtatatacccagtaatgggatggctgggtcaaatggtatttgtagttctagatccctgaggaatcgccacactgacttccacaatggttgaactagtttacagtcccaccaatagtgtagaagtgttcctattcctccacatcctctcgagcacctgttgtttcctgactttttaatgattgccattctaactggtgtgagatggtatctcattgtggttttgatttgcatttctctgatgtccagtgatggtgagcactttttcatgtgttttttggctgcataaatgtcttcttttgagaagtatctgttcatgtccttcgcccactttttgatggggttgtttgtttttttcttgtaaatttgtttgagttcattgtagattctggatattagccctttgtcagatgagtaggttgtgaaaattttctcccattgtgtaggttgcctgttcactctgatggtagtttcttttgctgtgcagaagctctttagtttaattagatcccatttgtcaattttggcttttgttgccattgcttttggtgttttagacatgaagtccttgcccatgcctgtgttctgaatggtaatgcctaggttttcttctagggtttttatggttttaggtctaacgtttaagtctttaatccatcttgaattaatttttgtataaggtgtaaggaagggatccagtttcagctttctacatatggctagccagttttcccagcaccatttattaaatagggaatcctttccccattgcttgtttctctcaggtttgtcaaagatcagatagttgtagatatgtggcgttatttctgagggctctgttctgttccattgatctatatctctgttttggtaccagtaccatgctgttttggttactgtagccttgtagtatagtttgaagtcaggtagcgtgatgcctccagctttgttcttttggcttaggattgacttggcgatgtgggctcttttttggttccatatgaactttaaagtagttttttccaattctgtgaagaaagtcattggtagcttgatggggatggcattgaatctataaattaccttgggcagtatggccattttcatgatattgattcttcctacccatgagcatggaatgttcttccatttgtttgtatcctcttttatttcattgagcagtggtttgtagttctccttgaagaggtccttcatgtcccttgtaagttggattcctaggtattttattctctttgaagcaattgtgaatgggagttcactcatgatttggctctctgtttgtctgttattggtgtataagaatgcttgtgatttttgtacattgattttgtatcctgagactttgctgaagttgcttatcagctgaaggagattttgggctgagacaatggggttttctagatatacaatcatgtcgtctgcaaacagggacaatttcacttcctcttttcctaattgaataccctttatttccttctcctgcctaattgccctggccagaacttccaacactatgttgaataggagtggtgagggagggcatccctgtcttgtgccagttttcaaagggaatgcttccagtttttgcccattcagtatgatattggctgtgggtttgtcatagatagctcttattattttgagctacgtctcgtcaatacctaatttattgagagtttttagcatgaagggttgttgaattttgtcaaaggccttttctgtctacatgcccacaagagaaagcaggaaagatccaaaattgacaccctaacttcacaattaaaagaactagaaaagcaagagcaaacacattcaaaagctagcagaagccaagaattaactaaaatcagagcagaactgaaggaaatagagacacaaaaaactcttcaaaaaattaatgaatccaggagctggttttttgaaaggatcaacaaacttaatagactgctagcaagactaataaagaaaaaaagagagaagaatcaaatagatgcaataaaaaatgataaaggggatatcaccactgatcccacagaaatacaaactaccatcagagaatactacaaacacctctacgcaaataaactagaaaatctagaagaaatggataaattcctcgacacgtacactctcccaagactaaacctggaagaatttgaatctctgcatagaccaataacaggctctgaaattgtggcaataatcaatagcttaccaaccaaaaagtgtccaggaccagatggattcacagccgaattctaccagagttacaaggaggaactggtaccattccttctgaaactattccaatcaatagaaaaagagggaatcctccttaactcattttatgaggccagcatcattctgataccaaagccgggcagagacacaaccaaaaaagagaattttagaccaatatccttgatgaatattgatgcaaaaatcctcaataaaatactggcaaaccgaatccagcagcacatcaaaaagcttatccaccatgatcaaatgggcttcatccctgggatgcaaggctggttcaatatacgcaaatcaataaatgtaatccagcatataaacagaaccaaagacaaaaaccacatgattatctcaacagagatttcaaaaacagtatccagttagagatgaacagtggttctcaacagggctacactgccccccagggggtcttttggaaattgatggtagtattttgggttgtcaaggttatggtgggaagcttctgatatttagcaagtaaggaccaggcatggttaatttccaggaatgtgcaggacagtcctgttcaacagtcttgtatgtcctgaatgactttcaaatgtcccaggcagacactcatatgggtgaagcacctatttaaaatcatttaagtgcaaacctattttacaagttaatactatgtatttttcacaagattttattatatactgaattttccaggaaaactacaacattaattcagtgaagattatacgtattttgtttgggacttcaccatgaattattcatcatttcagaaaatcatttcactgacagcaacagtgattatggtattaaattaccataataacaaatctggactattttgttatttgtgatgttcattcacaatagagagaataaaaaattcttttgaataaacttaaaattaaatattatttaatgaaatcacatgaagaatgaggattttgctaaattttattgtttcttaagagagtttcatattatgaaactggtggatcaggacttctgtttgaggagatagtgttgatcaataatatgaaattattattgatcatattatagtcatcacatatattttttatcttttttagtgacacaatgttaaatatatatattggaaattgcataatgaaattagttattgcttttgggatcctgttgcttttcaacattactctagtactgtctccaaaggcctagcacactagttctctttagtcttttgtactgaaattccttgcttaaaaatgaccctttatttttatctattaaaagctatgctttctagagtctttgtaaattttgagactaaatgcatgcttcaacatgtagggagatttcaggagagatgataatatttttgcactgtctcatgtcataacagaaggatgcttttgacactacacttatagcttagcttatttgtgagagtatctttgtgagggtatcctactttcactcatttcttccactttgaaagcatgtgactaatctttgtatttatccttactttattcgatgttatttttctctttcccttatcttacacaaaggattttggtttattaatatgtatcttaccaggttttattctagtgctattcatgttgctgttcttttcttcttccaactaccttgaatagttggcttctgatcatctttcttttcttaaatctaaacattctcattataagtagatgcaatcacctgactacttcaaaatgtcttctattgtagtcatgtctgagaaattatatattggaatacatgtgattttatcataaatttacttttaaaaattttccttttatactatagttaggacattatactgattattttgatgtttttgtggactgaattttgttttcccctcaaattcctatgttaaagttctaactctagtacaacccccagtgtgatagggcctttaaagaggtaattaaagggttaggtgacatcatcagggcaggaccctaatccaatatcactgatggcctcttaagaagaggaagactcactagggattagggataggcacacagagagaaaagaccatatgaagacacagtgagagggaggccttctgcaagccaagaagaaaggcctcaggagaaaccaagtgaactgatatcttgatcttggacttccagccttcagaactgtgggaaaataaatttctgctttttaagcctaccagtctgtgatatattgttatggcaggcctagcaaactaatacaggtattatatctgtaggcaggtgaaattgtctgtacttatcgctttcaagcaagttaagagagtatcacaaaacacttgttacaaatgaggtttgggaaagtcatggagtactcacaaatagccacatgctctcccatattctccagcccccaagcagcttgctggagccataaaaccagtattactcctggctgtgagcagaaatacttacgttatttctggtctgagctatagatgagtcagaatataacttctagcggtgtctttttacctgtaacagcaatgagcaaggtcctgcgttcaaatggtggagcacaaggagctagatctgagacagctgctcttgaggattgaaaaaattcatattggacattgtgtgagtaagaaacacacttttctcagggttacaaggttcattttttaagatagcaaaacttattgctattctgattatacaaaatttggcataggaagagggatgctatcataacaaaagctgaaatatctttcgttggcttcactgtcaggtagtgggtagcagggagactactggagtccaggaaaatggtgatctatgttatacagcgtaaaaatatattaacactactatctttggtaatatagaaggctagcaagcataaggaagtagttggaaaagaacattaactatgtgtactgggtgctatgggtgactttcaggaagatataagaaaagaggtgaaatgagtaaagcattgtagtgaatagagggagttcaggaccttgcggtgatggagaagccaactgctttgagatcctagatgaaagagatatttaaacaagccttcagaaatcaataccctgaaaacctctcaggtacctaaaaatcttcagggaaaagattagatagagaatttggtctccccatagtagcccagcaacttcaaggtagcagccaccaagttaaaaacaaatatacaaagaaaaaacaaacaaacaaaaacacaccaaaaacctcacgtgggtaagggagaaaataagtacagattaatgacatcacaaaaagacccaaagttgtagtttctggaatattgttctcaaaagaagcagatagataatgagacatgagtctggtatgaaaaagctgtgactattggagatttatttattttaatttttatttatttgttttaatttaatttaatttttatttttccccgtaagttattgggatacaggtggtatttggttacataagtaagttttttagtggtgatttgtgagattttggtgcacccatcagctgagcagtgtacactgcactatgtttgtagtcttttattccttgcccccctcccactcttccccccaggtccccacagtccattgtatcattcttatgcctttgcatccttgtagcatagctcccacatatcggtgagaacatacgatgtttgattttccattcctgagttacttcacttagaataatagtctccagtctcatccaggtcactgcaaatgctgttaattcattcctttttatgaccgagtagtattccatcgtatatatatacatatatatcacaaaaatatatatctatcatgaaaatatatatatcacgaatatatatatatatatatatataatggtttctttatccactcattgatggatgggcatttgggttggttccatgattttgcagttgtgaattgtgctgctataaacatgcgtgtgcaagtattcttttcataaaatgacttcttttcctctgggtagatacccggtagtgggattgctgtatcaaatggtagttctacttttagttctttaaggaatctccacactgttttccctagtggctgtactagtttacattcccacgcagtgtagaagtgtttcctgatcaccgcatccatgccaacatctactgtttttttttatttttcgattatagccattcttgcaggcataagatggtattgcattgtggttttaatttgcatttccctgatcattagtgatgctgagcatttttgcatatgtttgttggctgtattagttcattttcatgctactgataaagacatacctgagactgggaagaaaaagaggtttaaatggacttacagctccagatggctggggaggcctcagaatcatggcaggaggtgaaagtcactccttacatggtggtggcaagagaaaaaatgaggaagatgcaaaaacagaaccccctgataaagccattgaatctcgtgagacttattcactaccacgagaatagtatgggggagctgtccccagattcaaaatatctcccaccaggtccctcccacaacacatgagaattatgggagtataattcaggatgagatttgggtgggaacacagagccaaatcatatcattatgccctgggccccttcaaatctcatgtccttacatttcaaaaccagtcatgccttcccaacgtccccccaaagccttaactcatttcagcataacccaaaagtccacagtccgaagtctcatctgagacaaggcaagccccttcctcctacgatcctgttaaatctataacaagctagttacttcctaggtacaaggggggtacaggcatttggtaaatatacagccattccaaatgggagacattggccaaaacaaaggggctatagggcccatgtaagtccgaaatccagtagagaagtcaaattctaaagttccagaataatctcctttgacaccatgtctcatatccaggtcacgctgttgcaagaagtaggttccagtagtcttgggcggctccacatttgtggctttgcaggatatagcctgcctcctggctgctttcacaggctggtgttgagtgtctgtggcttttccaggtgcatggtgcaagctgtcagtggatctgaggtcaggatgatggtggccctcttctcacagcttcactaggcagtgtccctgtaaggattctgtgtaggggctctgaccccatatttcccttctgcactgccccagcagaagttctccatgagggccccacccctgtagcaaacttttgcctgggcatccaggagtttccgtactttttctgaaatctaggtggaggttcccaaacctcaattcttgatttctgtgtacccacagaccgaacgccatgtggaagctgccaaggtttggggcttgcaccctctgaaaccatattggacattgaaaccacattggactttggccccttagcaatggctggagtggctgggatgcagggcaccaagtcactaggctgcacacagcatggggaccctgagccaggcctatgaaaccattttttcctcctaggcttctgggtgagtgatgggaggggctgccatgaagacctatgacatgctctggagacattttccccattgtcttgaggacatttggctccttgttacttacgcagatttctgcagccagcttgaatatctcctcaaaaaaatgggtttttcctttctgctgcatcaagctgtaaattttctgaacttttatgccgttacctttttaaaatggcatgcttttaacagcactcaggtcaccttttgaatgctttgctgcttagaaatttcttccaccagataccctaaatcatctctctccagttcaaagttctacaaatctctaggacaggggcaaaatgccaccagtctctgttaaacataacaagagttgcctttactccagttcccagcaagttcttcatctccatctgagaccacctcagcctggaccttattgttcatatcactatgagtatttttgtcaaagccattcaacaagtctctaggaggttccaaacttttccacattttcctgtcttcttctgagctccccaaactcttccaacctctgcctgatacccagtttcaaatttgcttccacattttcgggtatcttttcagcaacaccccactctattggtaccaatttactgtatttgtcaattttcatgctgctaataaagacatacccgagacttggaagaaaaataggtttaattgggcttacagttccacatggctgtggaggccttagaatcatggtgggaggtgagaagcacttcttacatggtggcagcaagagaaaaaatgaggaagatgcaaaagcagaatcccctgaaaagaccatcagatctcgtgagactcattcactaccatgagaatggtatgggggaaaccgcccccatgattcaaattatctcccactggatctctcccttaacacctgggaattatgggagggcaattcaagatgagatttaggtggggacacagagccaaaccatatcatcggccatttgtatatcttcttctgagaattgtctattcatgtcattagcccactttttgatgggatttttgtttttttcttattgatttgtttgagttcattgtagattctggatattagtcttttgtcagatgtatagattgtgaagattttctaccactatgtgggttgtctgtttactctgctggctgttccttttgccttgcaaaagccctttagtttaattaaatcccgactacttatctttgtttttattgcatttgcttttgggttcttggtcatggaatctttgcctaagccaacatctagaaaggtttttccaatgttatcttctagaatttttatagtttcaggtcttagatttaagtctttaatccatcttgagttgatttttgtataagatgagtgatggggattcagtttcattctcctacatgtggctagccgattatcccagcaccgtttgttgaaaagggtgtcctttccctacttcatgtttttgtttgctttgttcaaaatcagttggctgtaagtatttgggtttatttctgagttctctattctgttccattggtctatatacctatttttatatgtataaaatgttgttttggtgacgatggcctatcgtatggtttgaaatcagggtagtgtgatgcctccagatttgttctttttgctttgtcatgctttggctatgtgggctggctcttttctggttccatatgaattttagaattgttttttctaattctgtgaagaatgatggtggtattttgatggggattgcattgaatttttggattgcttttggcagtatggtcattttcataatattgattctacccatccatgagcatgggatgtgtttccatttgtctgtgtcatctatttctttcagcagtgtttttaagttttccttgtaggggtcttttgactccttggttaggtactcaggaatacccaagtatttttattttttacagttattgtgaaaggtgttgagttctggatttgattcttcacttggttgctgttggtgtatagaagagctactgatttgtgtaaattaatcttatatccagaaactttgcttacttcttttatcatttctagaagctttctggaggagtctttagggttttcgagatatatgatcatattgtcagcaaactgtgacagtttgacttcctctttactgatttggatgcccattatttctttctgttgtctgattgctctggctaggacttccagtactgtgctgaagaggagtggtgagaatgggcatccttgtcttattccagttctcagagggaatgctttcaacttttcccccttcagtattatgttggttatggatttgtcatagatggcttttattacattgaggtatgtcccttctatgccaattttgctgagagttttaatcataatgggatagtggattttgtcaaatatttttctgcatttattgagatgatcatgtaatttttgtttttaattctgcttatgtggtatatcacatttattgatttgtgtatgttaaaccatccctgcatccctggtatgaaacccacttgatcatggtgtattatctttttgatatgttgttggattcagttagctagtattttgttaaggattttaccatctatgttcttcaaggatatcagtctgtagttttcttttttggttatgtcatttcctggttttgacactagggtgatgctggcttcatagaatgaatcagggagagttccttctttctctgtcttgtggaatagtgtcaataggattggtaccaattcttctttgaatgtctggtagaattctgctgtgaatccgtctcatcctgggatttttttttgttggtaatttttaaattaccatttcagatggccaaataggaacagctccagtctacagctcctagtgtaagcgatacagaggacgggtgatttctgcatttccaactgaggaaccaggttcatctcactagggcttgttggacagtgggtgcaggacagtgggtgcagcccaccgagcatgagccgaagcagggcgaggcatcacctcacctgggaagtgcaaggggtcagggaattcccttgcctagccaagggaagctgtgacagatggcatctggaaaatcgggtcattcccaccctaatactgcacttttccaacagtcttagcaaacagcacactgggagattatatcacgcacctggcgcagagggtcccatgcccacggacccttgcttattgctagcacagcaatctgagattgaactgcaaggtggcagcgaggctaggggaggggagcccgcccttgctaaggcttgagtaggtaaacaaagtggcaaggaagctcgaactgggtggagcccaccactgctcaaggaggcctgcctgcctttatagactccacctctgggggcagggcatagctgaacaaaaggcagcagaaacctctgcagacttacatgtccctgtctgacagctttgaagagagtagtggttctcccagcatggagtttgagatctaagaacggacagactgcctcctcaagtgggtccctgaacccgagtagcctaactgggaggcaccccccagtaggggcagactgacaccccacacggcagggtacccctctgagacgaagcttccagaggaacgatcaggcagcaacattggctgttcagcaatattcactgttctgcagccactgctgctgatacccaggcaaacagggtctgggagtggacctccagcaaattccaacagacctgcagctgagggtcctgactgttagaaggaaaactaacaaacagaaaggacacccacaacaaaaccccatctgtacatcaccatcatcaaagaccaaacgtagataaaaccacaaagatggggaaaaagcagagcagaaaagctgaaaattctaaaaatcagagcacctctccccctccaaaggaatgcagctcctcgccagcaatggaacaaagctggatgaagaatgactttgacaagttgagagaagaaggcttcagacgatcaaacttctctgagctaaaagagaaagttcgaacccattacaaagaagctaaaaaccttgaaaaaagattagatgaatggctaactagaataaccagtgtagagaagtccttaaatgatctgacgtagctgaaaaacatggcacgagaactacgtgatgaatgcacaagcttcagtagccgattcgctcaactggaaggaagtgtgtcggtgattgaagatcaaatgaatgaaatgaagcgagaagagaagtttagagaaaaaagagtaaaaagaaatgaacaaagcctccaagaaataagggactatgtgaaaagaccaaatctacgtctgattagtgtacctgaaagtgacggggagaatggaaccaagttggaaaacactctgcaggatattatccaggagaacttccccaatctagcaaggcaggccaacatccaaattcaggagatacagagaacaccacaaagatactcctcaagaaaagcaactccaagacacataattgtcagagtcgccaaagttgaaatgaaggaaaaaacgttaagggcagccagagagaaagatcgggttacccataaagggaagcccatcagactaacagctgatctctcagcagaaactcaacaagccagaagagagtgggggccaatattcaacattcttaaagaaaagagttttcaacccagaatttcatatccagccaaactaagcttcataagtgaaggagaaataaaatcctttacagacaagcatatgctgagagattttgtcaccatcaggcctgccctaaaagagctcctgaaggaagcactaaacatggaaaggaacaaccagtaccagccactgcagaaacatgccaaattgtaaagaccattgatgctagaaagaaactgcatcaaataacgagcaaaataaccagctaacatcataatgacaggatcaaattcacacataacaatattaaccttaaatgtaaatgggctaaatgctccaattaaaagacacagactggcaaattggataaagagtcaagacccatcagtgtgctgtattcagtagacacatctcatgtgcagagacacacatatgctcaaaataaagggatggaggaagatctaccaagcaagtggaaaacaaaagacggcaggggttgcaatcctagtctctgataaaacagactttaagccaacaaagatcaaaagagacaaagaaggccattacataatggtaaagggatcaattcaacaagaaaaacgaactatcctaaatatatatgcattcaatacaggagcacccagattcataaggcaagttcttagagacctatgaagagacttagactcccacacaataataatgggagactttaacaccccactgtcaacattagacagatcaacgagacagaaagttaaaaaggatatccaggaattgaactcagctctgcaccaagcagacctaatagacatctacagaactctacaccccaaatcaacagaatatacattcttctcagcaccacatcgcacttattcgaaaattgaccacatagttggaagtaaagcactcctcaacaaatgtaaaagaacagaaatttaacaaactgtctctcagaccacagtgcaatcaaactagaactcaggattaagaaactcactcaaaacggctcaactatgtggaaagtgaacaacctgctcacgaatgactactgggtatgtaacaaaatgaaggcagaaataaagatgttctttgaaaccaaagagaacaaagacacaacataccagaatctctgggatacatttaaggcagtgtgtaatttatagcactaaattcccacaagagaaagcaggaaagatctaaaattgacatcctaatatcacattaatagaactagagaagcaagagcaaacacattcaaaagctggcagaaggcaagaaataactaagatcagagaagaactgaaggtgatagagacacaaaaaatccttcaaatgtcaatgaatccaggagctggttttttgaaaagatcaacaaaattgatagactgctagcaagactaataaagaagaaaagagagaagattcaaacagacgcaatgaaaaatgataaaggggatatcaccaccaatcccacagaaatacaaactaccatcagagaatactataaacacctctatgcaaataaactggaaaatctagaagaaatggataaattcctggacacatacaccctcccaagactaagccaggaagaagttgaatccctaaatagaccaacaacaggctctgaaattgagacaataataatagcctaccaaccaaaaaaagtcgaggaccagatggagtcacagccgaattctaccagaggtacaaggaggaactggtaccattccttctgaaactattccaatcaatagaaaaagagggaatcctccctaactcattttatgaggccagcatcatcctgataccaaagcctggcagagatacaacaaaaaaagagaattttagaccaatatccctgatgaacattgatgcaaaaatcctcaataaaatactggcaaactgaatccagcaatacatcaaaaagcttatgcaccatgatcaagtgggctttatccctgggatgcaagggtggttcaacatacgcaaatcaataaacgtaatccagcatataaacagaaccaacgacaaaaaccacatgatgatctcaatacatacagaaaaggcctttgacaaaattcaacaacccttcatgctaaaaactctcaataaattaggtattgatgggacatatctcaaaataataagagctatttatgacaaacccacagccaatatcatactgaatgggcaaaaactggaagcattccctttgaaaactggcacaaggcagggatgccctctctcatcactcctattcaacatagtgttggaatttctggccagggcaatcaggcaggagaaagaaataaagggtattcaattaggaaaagaggaagtcaaattgtccctgtttacagatgacatgattgtatatttagaaaaccccatcgtctcaggccaaaatctccttaagctgataagcaacttcagcaaagtctcaggatacaaaatcaatgtgcaaaaatcacaagcattcttatacacgaataacagacaaacagagagccaaatcatgagtgaactcccattcacatttgcttcaaagagaataaaatacctaggaatccaacttacaagggatgtgaaggacctcttcaagaagaactacaaaccactgctcaatgaaataaaagaggatacaaacaaatggaagaacattccatgctcatgggtaggaagaatcaatatcgtgaaaatgaccatactgcccaaggtaatttatagattcaatgctatccccatcaagctaccaatgactttcttcacagaattggaaaaaactacttgaacgttcatatggaaccaaaaaagagcccgcattgccaagtcaatcctaagccaaaagaacaaagctggaggcatcacactacctgacttcaaactatactacaaggctacagtaaccaaagcagcatggtactggtaccacaacagagatatagaccaatggagcagaacagagccctcagaaataataccgcacatctacaacaatctggtctttgacaaacctgacagaaacaagaaatggggaaagaattcccaatttaataaatggtgctggaaaaactggctagccatatttagaaagctgaaactggatccctttcttacaccttatacaaaaattaattcaagatggattaaagacttacctgttagacctaaaaccataaaaaccctagaagaaaacctaggcaataccattcaggacataggcatgggcaaggacttcatgactaaaacaccaaaacaaatggcaacaaaaaccaaaattgacagatgggatctaattaaatgaaagagtttctgcacagcaaaagaaactaccatcagagcgaacaggcaacctacaaaatgggagaaaatttttgcaatctactcatctgacaaagggctaatatccagaatctgcaaagaactcaaacaaacttaaaagaaaaaaacaaacaatcccatcaaaaagtgggcaaaggatatgaacagacacttctcaaaagaagacatttatgcagccaacagacacatgaaaaaatgctcatcatcactggccatcagagaaatgcaaatcaaaaccacaataagataccatctcacaccagttagaatggcgatcattaaaaagtcaggaaacaacaggtactggagaggatgtggagaaataggaacacttttacactgttagtggaactgtaaactagttcaaccactgtggaagacagtatggcgattcctcaaggatctagaactagaaataccatttgacccagccatcccataactggatatatacccaaaggattataaatcatgctgctatgaagacacatgcacacatatgtttattatggcactattcacaatagcaaagacttggaaccaacccaaatgtccaacaatgatagactggattaagaaaatgtgccacatatataccatggaatactatgcagccataaaaaatgatgagttcatgtcctttgtagggacatggatgaagctggaaaccatcattctcagcaaactatcgcaaggacaaaaaaccaaacaccgcatgttctcactcataggtgggaattgaacaatgggaacacttggacacaggaaggggaacatcacacactgggtcctgttgtggggtcaggggaggggggagggatagcattaagagatatacctaatgtaaatgatgagttaatgggtgcagcacaccaacatggcacatgtatacttatgtaataaacctgcaggttgtggacatgtaccctagaacttaaagcataataaaaaaaaattaccatttcagtctcactgcttgtttttggtctgttcaggatatctaattcttcctgatttaagctaggagggttgtatttttccgggaatttatccatctcgtctaggttttctagtttatgtgcataaaggtattcatagtcttttgtatttcagtggtgtcagttgtaatgtctcctgtttcatttcttaatgaggttgtttgtattttctctcttgttttcttggttaatcttgctaatggtctatcaattttatttatcttttcaaagaactggtttcttgtttcattatcttttttttgtttgtttgtttcaatttcatttagttctgctgtgatcttggctatttcctttcttctgctcggtttgggtttggtttgttcttgtttctctagttccttgagtgtgaccttagaatgtcagtttgtgctctttcagtctttttgatgtaggcatttagtgctatgaacttcctcacagcaccaattttgctgcatcccagagtttttaacagattgtgttattattgtcattcagttcaaagaatttttaaatttccatcttgattttgctgttgacccaatgctcattcaggagcaggttatttaatttccacatatttgcatggttttgaaagttcctttggagttgatttccaggtttattccactgtgatctgagagagtgcttggtataatttcaattttcttaagtttattgaggcttgttttatggcctatcatatggtctatcttggagagagttccatgtgcttttgaatagaatgtgtattctgcagttgttggatgaaatgttctgtatatatctgttaagtccatttgttccaaggtatagtttaaatccattgtttctttgttgaccttctgtcttcattacctgtctagtcatgtcagtggagtattgaagtcccccactattgtgttgctgtttatctcatttcttagatcttttagtaattgttttataaatttgggagctccagtgttaggtgcatatatgtttaggattgtgatattttcctgttggacaaagccttttaccattttataatgtccttctttgtctcttttaactgctgttactttaaaatttattttgtctaatataagaatatctactcctgcccccttttggtgtccatttgcatgagatgcctttttccacccctttaagtttatgtgagtccttatgtgttaggtgagtctcctgaaggcagcagatagttggttcatgagttcttatccattctgcagttctgtaccttttaagtggagcatttcggctatttacattcagtgttagtattgagatgtgaggtaccattgcattcatcatgctatttgttgcctgtgtactttggttgtttttttgtttttgcttcttaacttgtatttttgttttataggtcctgtgtgatttatgctttaaagaggttctgatttgatgtgtttccaggatttgtttcaaaaattagaactccttttagcagttcctgtagtggtggcttggtagtggtgaattctctcagcatttgtctgaaaaagagtgtacctttccttcatataagatgcttagttttgctggatacaaaatccttggctaaataattgttttgttgaggaggctgaagataggggcccccaatccttgctagcttgtagggtttctgctgagaaatctctgttaattgataggttttcctttataggttacccggtgcttctgtttcacagctcttaagattcttttctttgccttaacttctgataacctgacgacaatgtgcctaggcgatggtctttttgtgatgaatttcccaggtgtcctttgtgcctcttgtatttggatgtctaggtctctagcaaggctggggaagttttcctcaattattcccccaaatatgttttccaagattttagaattctcttcctcctcaggaacacctattattcttaggtttgattgcttaacataatcacagacttcttggaggctttgttcgtattttcttattcttttttctttgtctttattggattgggttaatttgaagctctgaatttctttcttccacttgtttggttctattgctgagactttccagagcattttgcattgctataagtgtgtccaatgtttcctgaatttttgattattttttccttaaactatctatttccttgaatatttctccctttacttcttgtattgttattttagattttcttgcattggactttgcctttctctggtgcctcccttattagcttaataactaacctcctgaattcttttttaggcaaatcaaggttttcttcttggtttggatccattgctggtgaactagtttgatttttttgtgggggtgttaaagagccttgttttgtcatattaccagagttggtttcctggttccttctcatttgggtaggctctgtcagagggaaggtctagggatgaagtctgttgttcagattcttttgtcccatggggtgttcccttgatgtaatactctcccccttttcccatcagtgtggcttcctgtgagccaaactgcagcgattgttgtctctcttctgggtctagctgcccaggaattctagcaggctctggggctggtactggaggttgtctgcacagagtcctgtgatgtgaaccatctgtgggtctcttagctgtggataccagtgcctgttctgatggaagtggcagggaggtgcaatggactttgtgagggtttatgctctatttttgttctggttggcttcctgctgggacatggtgttttccaaagagcattagctgtggtatatggagaggaaccagcagtgactggggccctagaactcctgagattgtatgccctttgtctccagctaccagagtgggtagagaaggactatcagttggaggcagggctgggcgtgtctgagctcagactctccttgggcaggtcttgctgctgctgctatgggggatgggggtgaggttccaggtcaatggagttgtgtacctaggaggattatggctgcctctgctgagtcatgcaggttctcggggaagcaggggaaagccggcagtcacaggcctcacccagctcccgtgcaaaccaaagggctggtctcactcccaccgtgccccccttaatagctccaagtctgtttccaggtgttgagtaagctgggcttgagaacttgccccaggttacccacctcccagctgcaaaagaaaagggcttagttcttctcctgcctgtggagtctgcacactggatttgtgccctcctctgagttctggccaggaggcttctcacccagttcaaattgttaccaagttatctggagatttccttctccctgtggtgttcacccctgccctctgattcctctgtccaccctctcgatggatcactgtgatgccatgcagaaatggcctgcctggggatccggtgagcttccagggcctttctgctgctttctctacctctgtgttttgcttggttctctgaattgactcagctccaggtaaggtcagaaacttctcccgcaaacagacctttggtttctcctgtgggatgtgtgttctggagaggaggctctccctttctcacttctgcagttggggcactcacagtatttggggtgtctcctgggtcctgcaggagcaatctgcttccttcagagggtctgtgggtcctcttgggattgctggtttgtgcttgcagttactatgtgagcctctgcatgctgctctgtccgtctgagttggaactacaatctattcctgcctcccatctgccgtgatgatgacttgtcaggagatttaatacaaaacttactacagtatgattttggtggctttatacaaccaactttttttttctcatttacctcagatctgatgctagtatgatgcttcacatttattggcccattgaatttcatcttctatttatattttttggctcatttttctcttggtatttaattctttttaactgatttacatactgtacatattaatcttgtgtctccatgtagactccaaatattttccccatttttcatttgtttcttaactttgtttacattgtcacttttttaacataaaagttttaatttttcatgtgattcaaactgtcagtccttatggccacctaaacatttctaagtgttccttatatataaaatactctttttcttatcttattaggcctggccctctagaaaaatgtcaaagagtggcagtaataaaagtcatcattgccttgttcctggttttaataggaatatttctaaaattttaccataaaatagtatatttgctataggaatgacttgctttaagtattagatgaggtcctcagcacataaactataaataatagctataatttattatttggtgaactgcttaaatttctgttccaagtctctccactagcaaacaagggattgggtctggataatctctaaggttctttccagcatagtgagtcttgcaattccagggcaatttttttttcttctttttgagacggagtttcattcttgtcgcccaggctggagctcagtggtgtgatctctgctcactgcaaactctacctcccaggttcaagcgattctcccgcctcagcctcccaagtaggtgggatgacaggtgcctgacaccaggcccagctaactcttgcatttttagtagagacagcatttcactatgttagccaggctagactttaactcctgacctcaggtgatctgcctgcctcggcctcccaaagtgctgggattacaggcatgagccaccatgcctggcctccatgataaattttcaaaaagcttcatgtcattttatcaacctaaataatcactaatcttatctataaaataaaacacataatctcaaagccacataaacacacaagcacaagagagcctctcagccaccttagtaactcatatttagatatataaagtggtcttggtaaaggattttaactttcctatatttatagtcactttataaagttgcttggcaacttttattaaaagagaaaaaagaaattgagaggaaatgaaagcgaagcaatgattggaaagtcactggtgaatatggcagtatcccagcttcaaaagccagctgcaatctagtcagtgttggagtagaagtgctggggctcagaaaacaacaccccaacaaaaggcccaaggaacagccttagaagcaaagtctctgtctgaccttctcctgtcttcttgtctcttccccctcattctcccctgaggcaaggcatagaaatgagaatctctgttcccctgggcaggtcagagaaaccagagccattttttccccaaagccagcaataaaacctaaaaatattactctcagctcccagcaaactgcctttctgtataacagctggtcataaagaaattaagaccccatttcagaggggtcctaccccatatccgagaggaaaaaatgctgcagagagtccaaaagaaattttggacaggtcttgctgagtttccacactgaagtctcttggcattagattatacctgttttgtcctatcatatttttacatggctgtccatactccattcaacctaagcataaatcctgtgttacataaaactctgatcaaataagtctgtcacgcttttctcttctgaacttgtctttgttagagtagtgccagccgtgacctttatgatggggaggaatgggatcgctccctttccattcttacaaaagcaatttttaaaattattattattgttattcttaccccccagtggggtggagactcaatgtctgggaggcattgagaggaagaataccaaaattgggaataaacaatttcctatctcccataaagatacaagaagcaaaggaagaaggcaaatgctcattgggtgtaagcaattgaaattgctaaagaatgagaactgagaagcagccagaaattatgctgagcggaggagcagagattgtgagaaattggcaggcagtcacgatagatgaagccaggaaggaacacacaaagggcctgaaatgaatcagactttataaaaggagttataggggagggacaataaagcatgaatgtgggtgcctgcctgggacagaggagggtgagaagggtaaggaaagggtcaaaaatgcaaggttaaatccagttcaagaagctacctagaaacaaaggtctaattagcagattgtcagagagcagattgtggataaaaaatgcccaacaaattggaatacatggtgccatccaaactctaagaggcaggggaaacatagttaagatacagtgaagttaagagcaaaaccacctccagtgaaccagatatggcaaaagctattatgggaggcaggactttgatgaggaacaactctcacattgttttattttcagaaatggaataagagaacaaatggaagcccacatttctcatggttaaatatttaaaagttataaattaagctaccagactgttaaataaaatgttctatttacccatcttgacaaaacaccttctttttttttttttttatatatgataaatttatttcataacagtaaaaaagtctgcattattgaacaaatagtatataacgtttgtcaagtatagctgtaaaaataattaatgcatttttaacaacttaccccaaaatattttccaaatggaaaagatttaaagatttaaatgtagaaaagtaaactcatacaaatacttaaaataaatgtaagatatatattgtatttatataatttgtgagtggaaaaggtttctctaagcatggcatcaaagcttgaaagcataaaagaccaatagagcaaacaaactaataacaacttataattgtaaaagatttaaaattatattaggacatgagaaaaaatctatttactacatattataacaaagtatcatttctaagagacttgtgaaatcaataaaaacacaaatatgctttttacggaaaatataaaaaggaaatgaaaaagcaattcacagaagaactataaatgtccaataagcctagaagaattcatgagcctcagaaatgcaattaaaatttcactgggatttcattttatttattaaattggctaggatcataaacaacagtaaaactctgtgctaagcagcacaggaaaaaatggttgctttttttttttttttttttcttaaagacataaaaaatcagattcccatttagaattcttaatttttttttttttttgaaacagggtcttcctctgtcaccaaggctggagtgcagtggtacaatcatagtttactgtagctttgacctccctggctcaactgattctcccacatcagcctcctgcgtagctgggactacaggtgtgtgccactatgcccagctaatttttattttggagagatgcggtctccccatgttgccagggctgttctcaaactacttggcttaggggatcctcccacactggcctcctaaagtgctggtagtacaggaatgagccaccttgtccagcctcttaaactttttgaagttagccagattgtggcagtattcaaagagttgaatgttcattgtcctggggacttgacctctattcttctcaacttgccttcagcccttctcttccgtcccttgctctgttctgcaccatgagggcctggcttactaagtgtgggtaccctacctagcgtgtattcccaagctgcattccccttacctttttaaaaacaccatgtgcaaatgccttttgctcactcctcaagcccaggtgctctgttggaaagaaagaacaaacctgggaaaggcttatgtggctcttagaggaagtttggggctgtttgagcaggaattacaggtcctgagcctccagagcatggcctttgggcagctgggcagttctggtcctgttggctcctcatcccttagagtggggatcactcaagagcatgggattagggcaggacagcctcctgtccaggtctaagggtagtgcttgactctgaaccctgtcaaatgaaactaggcattcttgtcactgagagtttctagcagaccaaagctctttggaaagcacgagtacttcattggttgactctcaagttttctggccatttttggcttatatcgggttccaagagttttccttcttagtttccatgtactgaccattaagttcagtgtttcttgtgcccagagatgagaagaaaccaaatatggaaaagtcgaccaggctttaaaaaaaattgtctgtactgtggcacatatggagtctgggtggcagtgctctttggtatataaaaatataattaatatgatttaacacacattttgtcatgttcacaggtaaatatctatttgctaaatttccattacaacttgtctcactcctattaattttcacatctttcccctcaaggatattcttatttctgaaacacttctcagctcagtccccactggtgctgtgacttctgagcaccatttggcatgatatatatgtcaacaagcaggccatgaatgccaggttgaggaaagaggagagtgagaagggcagattcatttaggagtttattcttcagcaaccacattgtgaaatgacacatcccacttcctggctgagggtgaagagcattatttaaatcccctgaagaatctacaggtgtgtgtgtatcttcttggatcaagcattggcatcaaatggagtattttgatctttcacactttttgcagaaagcataaggttagaatacaagtcacaattagtccttagaatgtaaatgaattagtttatagggttttttttagtactctgcaggggaatatggaatatagtataaagaaactaataccactgactgtttggcagaattctattttaaattccttggaaaagtaagcttttcatttctgaacaaaatcagaatctagtaaagactttgaactagttttcaactagctcaagtttaaatttaggtccatgaagcgtgggagtgcctacagcctggcaaagaataaagtactcctgcatagatcacttagcttgggtctctgctgtggagggtcgcattggggccagttacttatagctcaaggtttcataatttcagcacgatacacatttcaggctggataattctttgttgtgagagcctagtctgtgcattataggaatatttagcagcgcccctggcctctatccagtagataccagtatcctgtgccacacttccctagttgtgacaatgaaaaatgtcttagcattgccaactatgccctggggaatcaaaattgtccctgattgaggacttcccagcagctagtttattttctactctcctatgtgcttttcaggcaggaagagggagagagaaagctgtaggtgacatgaaatctgcttttggcttctgaaacaacatgagagaaatgaaagagaaaacgaatacttactagcatctgttgtgcactagaatacactccatttgtgcttttacataaatttgggcttcttaaactagagagtgggccagagttgcactaaaccagaaggtaaacatatagcatcaattttacttgatggtaaaaattctgaaatatttatttttctttaaatcacatgcatacagagtagaatataatgtgtgtgttaatattgaagttaaagtataaaactacaaataaattttgcatgagttggatttcttatgactggccctgctcccagaatctgcataggcatggatgcactctcaatcactgtgggtatctttggtggaagcgtgtaagaagcatgatgtatattaatcagtttacatttctgtgaactaagtaggtatactcctatcatttacttacttttttagataaagaaacgaaggctcagagaggttaagtaacttatctaagctcacacagctatggtacaaacactataggaacttttcaaagtcttcaaatactatgttcttttcattttctgatgaattaataggcagggttaggtctgggtaaatttttgagaaaggtgaaaatttgtcttttctttctttaatttttgtactatctttattctctcctcgtgtaacccctcttcccagaaataaaaaaacacccagtgctctttctctgttcagatatgaacatccatctgctaagcattgcaggtctgcttatttattaactggaagaaatggctgatatttcagaccttgtacagtggttctacatggtgatggtgatggaggtgacagtagcagtaagtgcaagagtttcccttaagtcacgtatgtagtcaaatctgttcttgttgaggctaacctagagagtggaggtcagtagtgggcagagattgaaaccagacaaacctctctgtgtgacttcaaagacttccttgtctttaactccaggagtctagtggtagtagggtcctaccacttatctggtagggaagatcaaattgtcttgaattctagaaactcccagatggaacaaaacaaaagaaagtaattgggaggcacaaactgtaccctcctggcgccttcgtgggagtcttaccatatttttttccctttccccttctcagcactgtgctgtcgcccaagcaccaggggaacccagctgcctggttttctttggcggggtcttgtggctgctttttagtctgtcttgttatctctctcctcagctgaccctagaaatgcttaatttggctgtgtgaaagtaatgctaatttcagtcatttaagtaatcatttgccatttatactaaattgccgtgtaatattacagtgattatgcatatcattaaatatgtgtcacattagtcttgtggtgggttttatttgattatagcactaaatcatgctcaggattcttagacttcttagtttgttgcttatattatattgtgatcattacataacttaaaaacttagggagaatgttgccattgagggaaagtttgagagaacacatctatttcccttcctgcctcattataaccatgaaattgacagcattggtatcattcacatctttcaggtctctaaatttacctttttgatctcacaacgtggattgtctacacaaattcatccttttgaaacatttaatgaataatctgttttaaattgtgttttaaaaagcttatctgcatttcctattgaatcaggttattttctatgttcaccatgagtcttcacccatatgcataatgttaatgtataaaaaagaataattgctgtcctaagaatgaacatagcttctttttccatgggaatacaatcttaaatgatatacactcagtgttagcagtgcttatctacatatagatcttgcattatgggatttttttaaccttctttatattttttggtacttttgtttttaactaacaagcatgttgttgcacttattttcagaaactaagtaatttaacaccaaaatgtttcttgaatatatgttaatttttaattgacatcttcaatattaattaccttcttgactataatatcaaacacatgtaatattttgaccctttgatcattttactttggagcataaccataggcttattatcttataatgtataaaaaagcaactaaatttttattctccctgtccaatcagttttaattcacttcagcaaatatcctctctattccatatatctggaaataccacaggacccaattttacaccagttggagtcctcatctcctgttttttttaaacttgattttatttgtcctttttaaaatttattataagatgcttcacattattttataaaagtggaaaggcatggaaaaaggtaagactttgtcctgatgtaccagtgctcacaagaaaaagactgccgttttatgagtgcttcacggtggaattgggaggtaatagctgctgttcttcattttctccacatagtgttttattcacatactggaatgctttgtggacacaattgtcaaaggcagggaaccccagctgccatgcagtggtttatctccgctatatgaaaaatggcagattctgacttatagtttaattccagatttctctgaaaggcaggagagaggaaagggaaaaaatacaggagggtaaagataagaacaggctaagatttgcacctatgttttacaaagttatctgaaaagcataatttcacaaagtatttccctttaaattaaattactgagctgggttttacacctgtctctcttagctgctgagacaagtcccaaatggagatgacatgactgatggctttaagtgtttatccattgtgtctcctgagcaaggattaaaacagctacctcctgtcatgtttgcttgccaagttttagacagatttttaaaaagaatttgatttgagaactgttcttgacttcggttgcagtgatcaaatttaccactagacagagctgtttgtcttatttttaaccattgcagactaagatttgcaagacaattagaaccaatgaaaaggaaaaccataaatgataatatcttttatgagatggacactcttaaagaatatacttattgcccttttactgctgaaaatacataatttacaggttgttcagtgtcattgtcacttgggaggctgcaactcaattctcaaatttccactcatcagcaggaagatttcaatagctaataaagataatcaggatgtattatgcaattttctcattcttttatattaccgtagctaaagtcacagtgacatcctacatcctaagcttttactggaaacatctttgtaatttattctctgctcttttctatgaaaactacctattttgcaagcacagcttttggaattataagaatgttatactattgtatacattatatgttttatttgcacagcaattttctaccaagatgtgcaacatgtttaaaatttttaaattgctaccatccaaactgagtccatcctaagcccaatccacaaaaccctaaattctggctaaaaccataatctaggggttcttctgaggaagggcctgggcagagaacccaaagcaggtctttagtctttacatgcatgagtcacctttacttgtcaaggtatacaactccatagtgcctcaaacagtcctcagagtttagtctctggacaagcagcagtacatcccctgggaacttgtgagaaatgcaaattgtctggccaaccccaacctactgaatcagaaactctggggatgcaactctgtaatctgtgttttgataagccttttgggggattgtgaagcaggctaatgtttgagatttgctgacatttccaaatgaaaaagagaaaccaaattatgaaaaaatagttatctgaaatagaaacaatacacagaacagtagagaacatccaaggaactataattaatgatctcaaaaatatacaagaatgctgtgaaagagaagaagaaagagctcctgaaaatgaaatattagtatataaaatattcaatgaagagtattaaattaactaaatgaaatttaaaatcaaaatttaataaagagtatgaagataaagttgcagaaagtagtataaagaaaaaaacaggtgggaaagaaagactagataacaactttgaattatgaatacatgacttccagtatctacttaacaggattttcacagagacacagaggaaattatcaaataaacactaaaattgaatatttaaatacagaaccaccaaatgatgtaaaattaattccaattactttttaaattttcctttatttaacgtggtttatttctcaaatttttcatatacaatataatctgtcagctattctctttttgcaaattttaatttaaatgaaagtgaacattcacgtttgtatgctaagataaatattgtttgttgctgagctatacactctactatgtgtatgatgtttcctcttttacataactttttgttttctcctaaagttaataattgattttttaaaaatttgcttagtttttattacctatgacctatgtgatagacctttcaactgcttattgataatattttccagataatctaacatgggatgatcaagtatttcattttttttttttttgcctagagacctcaatccatcctcctgccccaacaatctgacaggtagttttctgggtgtgctgagcaattgtcatcccagaacttccactgtcacttttcctgtgttggatccactgtttcctagtgccatgtctccctagtccttgatttaccctttaactttgttgaagcacacactctgcttgcatcataggaaaggagacacacaagtgggataaatattgtgaatcattgcatgcctgaaaaattctacattcttgattagctcagtttagtattttagactaaaatttattttcacttcaatttttgaaggctttgctctgttgttttctgacttgctgtgttgctagtgagaattcagatgccattttcactttctttttcctttttatgtgactttttgactttcccatcaaacttttaggatcttctgttttagtaggtgttctgaactttcacactaatgtgccttgctgtgagccttatctcatgagcagagcactgaatgagccatttcagtcaagagactcacacttctcaatcctgagaaattttcttttagtgacttttgggttaatgccgaaatgagctgagactttgggagactgttgggaaggcatgatcggttttgaaatatgaaaatatgagatttgggaggggtcagaggcagaatgacatggtttggctgtgtccccacccaaatctcgcctccaattgtaactcccacaattcccacgtgtcatgggagaaacccagtgggaggtgattgaattatgggggtggtctttcctatgctgtttttgtgatagtgaatgagtctcacaagatctgatggttttaaaaatgggagtttgcctgcgcaagctctctctttgcctgccgctatccatgtaaaatgtgacttcctcctccttgccttctgccatgatggtgaggcctcctcagccatgtggaactgtaagtccaattaaacctctattgtttgtaaattgcccactctcaagtatgtctttatcagcagcatgcaaaaagactaataccagtgtcgtgctgataatattagttttggtactggcaaggggactccccaaatgatcctaaactgaacttgaaacttacctaccactcatctttcctatctcagtgattggaaccaccatctgactagttggtcaggctacagacatggggatggcccattaattcatttaatagacattgaatgcttacgacatcctaaccactgtgctgagaactggagatacaacagtgaacaaagcaagatccaactctgcctcaattcgaggagcttatatccaagtagtgggagatagttaataaccaaaataaataaactgtacatcataattcaaagagtgataggcattaaaaagaaaatttggagtactgtcatggaggttgaaatttttagtggtatgatcagaagaggcctcagtgaaaaggtgatatttaaacaaagacttgaagaaggcaagagtatgaaccatattgttatctggatggaataaatagcaagggcaaggctctgaagcaagatagtgccagaaatgcttgggtaccaccaggagattggtgtgagtgagatggagtgagcttgcaggaggcaatggggtaggggtaagtggggtgatgggtttggtgtaggcttcgtcagtccctatagcccactgtaaagactttggctttcattttgagtgagatgggaaacaccaaaggatttttagctgaggagtggatgtgacctgagtcatcggttgagaatgatgacttcccacttccttaaccctgccagccaatcatcatgggctatcagttctatttccccaccccccactgtctctcagatctgtcccaccttcttttcccctcatcattgctgctaccacacactagtccaggaaaccataatttcttgcttgagttattttaatagcttcttagtagggcttcctgattcttatttgctgacttctaattcatttcccacaatgtttccagagtaaccactctgaaaatttgatagatttacacttctggttaaagccataagtagccttcttttccctctgagaatagattgcaaaatcctcaacatgactttccatggtctattccccaatcttcagcttcacatgttccctgtcctcctatttcacattatacgttctggccatcctgaacttttcattccctgaatatatgatgttttcctttgcttctgagacttcacagactacttgctccaagagccttccttggtttttaaatctggattggttcattatctttttgctcttctagcaccctctacttcccctacactgaaactgtcatcctatattccaactgtttcattatctatttcctcactcttcttttgcaataggtgaggactgtctgtcttgttcacacccagagacgcattgtctgtgacatagaaggtgctcagtatagatgggggtgaatgatgaatggatgccaaaactgctctatagatactaacactttgaggacattaatgaattacttcttgtcacagccagaagacactaaaatatatgttgagtgcatgaaagaaggaataaatgaataaatatgtttttaattctttatattctactcatttgcccctcattgtttaactgctcatcaataatggtaatatgtggccacccactagccctacacatatgtgcagcaggtaatggcttacacagggtaacctcatgagtagtcctcactatgagttctcctcaccttcagcccttgaagcagtggcatgagcagcactggctttggctagctttgaacatgtggtcagctcagaatgctaagccagcaatgatctaagtggtggtcagcccggtcagtgacgttagtggatgccagtagttgcacagccaagggaaaagcttaatactggcttccaattatagtgctgtttcctttatttaaatctgaatgtagtagaagcctcagtagtcaatggataatgagaagattgggttaagagtacatttgagacatatttcaggtcttttagaaatacattggtagtttttggccaagcatgtggctcatgcctataacctcagcactttgggaggttgaagtgggaggattgtttgaagctaggagttcaagattagcctggccaacacagctagactccatctctacacaattcttttatttttattttttatttttttgttatactttaagttttagggtacatgtgcacaacgtgcaggtttgttgcatatgtatacatgtgccatgttggtgtgctgcacccaccaactcgtcatttagcattaggtatatctcctaatgctatccctccccccttcccccaccccacacaggccctggtgtgtgatgttccctttcctgtgtccatgtgttctcattgttcaattcccacctatgagtgagaacatgctgtgtttggtttttggtccttgcgatagtttgctgagaatgatggtttccagcttcatccatgtccctacaaaggacatgaactcatcatttttcatggctgcatagtattccatggtgtatatgtgccacattttcttaattcagtctatcattgttggacatttgggttgattccaagtctttgctattgtgaatagtgtcacaataaacatacacgtgcatgtgtctttatagcagcatgatttataatccttggggtatatacccagtaatgggatggctgggtcaaatggtatttctagttctagatccctgaggaatcgccacactgacttccacaatggttgaactagtttacagttccagcaacagtgtaaaagtgttcctatttctccacatcctctccagcacctgttgattccagactttttaatgatcgccattctaactggtgtgagatgctatctcattgtggttttgatttgcatttctctgatggccagtgatgatgagcattttttcatgtgtcttttggctacataaatgtcttcttttgagatgtgtctgttcatatccttcgcccacttgttgatagggttgtttgatttttttcttgtaagtttgtttgagttcattgtggattctggatattagccctttgtcagttgagtagattgcaaaaattttctcccattctttaggttgcctgttcactctgatggtagtttcttttgctgtgcagaagctctttagtttaattagatcccatttgtcaattttggcttttgttgccatttgttttggtgttttagacatgaagtcctagcccatgcctatgtcctgaatggtattgcctaggttttcttctagggtttttatggttttaggtctaacgtttaagtctttaatccatcttgaattaatttttgtataaggtgtaaggaagggatccagtttcagctttctacatatggctagccagttttcccagcaccatttattaaataaggaatcctttccccatttcttgtttttgtgaggtttgtcaaagatcagatagttgtagatatgtggcattatttctgagggctctgttctgttccgttggtctatatctctgttttggtaccagtaccatgctgttttggttactgtagccttgtagtatagtttgaagtcaggtagcgtgatgcctccagctttgttcttttggcttaggattgacttggcaatgcgggctctttcttggttccaagtgaactttaaagtagtttttcccaattctgtgaagaaagtcattggtagcttgatggggatggcattgaatctataaattaccttgggcagtatggccattttcatgatattgattcttcctacccatgagcatggaatgttcttccatttgtttgtgtcctcttttatttcattgagcagtggtttgtagttctccctgaagaggttcttctggcacaagacagggatgctctctttcaccactcctattcaacatagtgttggaagtcctggccagggcaatcaggcaggagaaggaaataaagggtattcaattaggaaaagaggaagtcaaattgtccctgtttgcagatgacatgattgtatatctaggaaaccccgttgtctcagcccaaaatctccttaagctcataagcaacttcagcaaagtctgaggatacaaaatcaatgtgcaaaaatcacaagcattcttttacaccaataacagacaaacagagagccaaatcatgagtgaactcccattcacaattgcttcaaagagaataaaatacctaggaatccaacttacacaattctttaaaaaataattggctggggctgggtgtggtggctcatgcctataatcccagcactttgagaggccaaggcgggcagattctttgagcccaggagttcaagaccagcctgggcaacatggtgaaaccctatctctactgaaaatacaaagaaaattagctgggcatggtggcacatgcctgtagttcaagcatgagaattgctcgaaccggggaggcggaagttgcagtgaactgagatagtgccactgcaccccagcctaggtgacagagacagaccctatctcaaaaaaaatatatatatattggctgcatgtggaggcatgtgcctgtaatcccggttactcaggaggctgagatgggaggatcatttgagccctgaaggccaaggctgcagtgaaatatgatggtgctgctacacttcagcctgggctgcagagcaggaccttgcttttaaaaaaaaaacataaaaaagtaataggttggtagttttggagctgagattctgcaattatgactaagtgggcatatttaactcttgtctttgccagtaattaatcagagaaatgatattacgtacttgaacattgtattcccaggctgctgtgacctagagaaatataagtaatacattttacatataatgcctattggactcctccccaaatcaccaggcaacctattaataaagcaatgctaaatttattagagctcactgcagttagaaagacgtttaccttaatagtcataacagtgactcagaaggagaaagtcagaaatgatttaattttagtgccttgggatctgagctgacatggtttgaagtatgtctttcaaactgaggaactcatttgaattgggcaaaatttgtaatatattagttaaaaatttgtagaccctgtgaagtgagggtcttgaaacaaggcttggtaatttggtatgataagaaaatgtttgcccaggtgagcagactcttatctctgataagtactctgtagaaatttcctgaaacagtgaggtgtttttgttttgttttgttttgttttcattggtttacagctttatctctcctaggcaaagtttcctggaacaaataactaattcatgatgacatagctggtctgtattcttaattaagtcatgtcaacacagatagtctctgcactcataccttttgctttcattcatacacaccttgagacatttttctgtcttgatggtttataagatcaggatttgaaaaaaggagagaatgagagtatgaagcctgagaagaggaagaagcactactgaaagggtggcattgaaaaaatgaaggtgacaaaaataaacttacttttgtgcaattttgtttgaggcaggacttcagcaaatataacaagcaaacacatatttgatcttcctttccagaggtatcatctataaaaatgaaccactacttttaagtaattgagatggaagtcttctgcctcactccaggcagctgcaaccactggaaatagatattccatggatcttgttggattggatgatggtttcttaactactcttctttctcaatccaggcatatgaacatcatggtgatacgtcaagatgtaccacagagaaatgataatgtaccacagcaaaaagagaactgtgttctgatatcaaaatggttgtggctatttgattatctatgcttaatgctctaaaacactgtttctagtcagaagcttaggtagatactctctcatctactgatttaacatggctgaatttacagttacagtggatatttgcaaagttgtagattacagcaattgatagcccaatctctggagtgaaatagaattggatatgaatcctgaccttattttagttttgtgatcttaggtaagttgctacttagttgcatcttcagttttttcatatatacatctcagcttttttttttccacatataacatggagatagttaatatctacctgataagattgtagtgaataacagctatgtaaatctttcagtcttagtgtgaactcagtaaatgttagccattattattagaactactagcagtagtaaggtatgctttgtttatttgaagaggagagtcacggaaacatagattcggagaatagtagagttgggaatgatcatagagatgttgtagtctagcacctttatttttcaggagagggaactggaggccaaagggagcaaataacacatagattgaaacagccagttaggaaaaggcaggtatcatgtttccatggtttgctttgcaggccaatgtttgcctcttactaacagctgtgggaaatgtgcctctagagctctgatgataaccccctgcacagagccttttgtttatcactatgaaggttagaacccttgtccaatgtgctgtattttcagtaaacaatagaaagtggtcagacataattttgagtcttggagctcagatcctgcagttcgttgggcacagtttcatcacttggcaatcactgatatctttacagtgtgatgtaaatatttaagattaatacgccctatgtgaatgctaagctcctcatctgttgacacattctttctgtactcagcaactactcccagcgattcctcttcccccaaaaatactaaatattgttgaaagaacaaacagctgcaaatattgaaaacctgtctttttaagaggttgaatggaaaaacacaaagtgattttactgtgaagtgaagctgacctttaagaagttgttatttctagttgtaaatcaataaaattttattgagcatttgctttatacaaagcactgtaggtgatttaaagaaagaagttatttttgcttttgaggtgctgacaatgtagtaggaaagatgaagataagtaaaagttaaattacaaaatgcaacctaaataacatttgaggatgaaaaccaaaggacatttttaggcagagcctgatgaattgatatatgagtagtgcagtcaccatttgcttaacatgcattcctcctttcagcgacagtacccaattcagtttttggaattattttcctcttgcagtcttggagggctataaatcaaagcgctctgcatttttttagccaaagtaagatcttgtgaaccagatcatgcctgttccactgtcttccagagtgactcaaaaattgaaaaatttagttgtagctgatgaaattgttaacccctttgactgaccttgttgctgagctctgctgagatatcaatcactacaattatggtcaattcctatgcctttagctcctcaatattcttgaaataaactccttttctgcatgagttagtcatacttgacatatgtggtagtgtcagatagaagggaaggagaggccacttttcaaggttgttgtctaggaagagaggaggtgacatatgagtgggacctggaaaggggaggagagtaggcagagtcacaggattctcagtttggtgactttttattatttctaattctggaacacgattagaaccatttctataggttggaagaaagcttattcacaaatcctgaggatttaatgccttactaaatgcgaaaccagggcagtagagttggaaacattttaggttcttagttgggttaacaaatataaaggactgtaaagatatgtctacagatgcaactacaactaagataatatttatttctaccctgaaaatagcttgggagtctcttcttactgtgtttaaaatctgtctctctttctctctctctctctctgtttttctatcttggctttatgatgattcacctttaatagtagagaaattcattctttttttaaatcaagattcagtaaatataatctatacttgcttcactaaacaagataggatatttggaaaccatattctctccatgtgatagcgtttgttaatatttgaaaccatatatggttcctgtaaagtgctctcaggcactagtaaatatgattttctgaattcactttacatgcaaaacagttgtattccttgattaaataatgtcagttaaattttgtctggcaatacacatatgcttcctaagccagtaacagataaataccaatattttttttgctagaatttgctttaattagcactctaaaaaacaattttactgttggcacaatggaaatgtgaagaagaaatgggaaaagaaaaatggagagattagcaaagtccatcttcttttctcctctaaatgtattgttttcttcttataagctaagctctctttaaattccagaaaaggaaaatcttttttcttaacatgatttttaagggggtagggagaagcatttgtgcttctgcttgtggaattaaaacatttcttacactgatttttatagcaaactggtaatgcctacatttgaatttctggcaagccccagacataacactatacttgtttggcatttattcctcactggctggacgaatttttaaaacatgagggaaatcaagtgaaaagattaaaatcagatggttttgcagagactaccagtaatgaggggtaaaactggcattcttccatctgcttatttgattatacattttaaacttatttttaaggccgaactagaagagttggaacgtatcattgaagtccaaaagggaaaatatttcttattcgtttttataatgagttttgaatctttaaaatgcctgtggccagactatgctgggacatgatcaagaaggttttctcccttcaaagagtttagtcaaaaaatgtgtttgtggcagaggcttctcatttagtgcatctatgggagatctttgagagttttccccttatctgtttatgttgccatgggaacatccatgtttatatctttggagggatacagtactgcttttcagagtggtgcaacagaaagcacacgggcctcatagttaagaaatagtgcatctacttctggcttcaacctctactagctgtatgactgtgggtgaaatatttaagttctcagagctttgttttttatggctgggagccgtgactcatacctgtaacctcaggactttgggaggccaaggcaggaggatcccttgagtctaggagtttcagaccaccatggtgagaccccatctctacaaaataaataaataaataaataaataaataaataaataaataaataaaaaattagccagggtgtgattgtgcatacctgtagtcccagctactcaagaggctgaggtgggaggattgcttgagtactggtggtcgacgcttcagtaagctgtgatcaccccactgcactccagtctgactgacagacaaaaaaaaaaaagaaaatcgttacctttttgtttttaaaataaaattgaagtaattgccctcttaaagggttgttatgagcattagaagtaatatattaggtagaaatcctgggtgcatcagaaggcatttagtaaataatagtaattattattattggtgcgatcatgacgagatgtctacacatgtaagtattccctgcctgactccatgcttacttctttctcagagagctttctgtctctgtcagctcagtctctggatccattcatgatgtgaaattagaaaaaatgcaagagaaggagctgacctgagaagtgaaagaaaaagaagggctgaactgagtgtccaccgtttcatttcaagagctggggacactggggtaacaggacactgcacaggcgggtgtcagagtttggtagtcggttacagtagaggcatcgtccaatagaacttcctgcagttatggacttgttctatgtctgagccgtccgataatgtagccactggctgcacatggctattgagcacttgtctgtggctcatgtgactggagtatttcaaatttcatttcattttaattattagtactttacagcttaatagctacatacagctaatgtctactatatcagacaacaaaactctagagaatcaaggggatatgagagactgagggaagacaggagaggagaggaggcaagtgtgatggattgtgaattagatttttcttatttcttgagagataaaactaaaagatcaaaatttatctgaaataagtttcgatagctggattacgtgtgtgtgtatatacatatacacatgtacatatatatgtgtatatacatacacattgagtgtatatgtgtatatatacacattgagtgtatatgtgtatatatacacattggatgtgtgtatatatatacacaattaagtcatatatacaccatatatatgagtcatatatatatagtttattcataaaatgtgtttgtggcagaggcttctcattttgtgcatctacgggagatctttgagagttttacccttatttgtttatgttgccatgggaacatccatgtttatatctttggagggatacagtactgcttttcagagtatatatatatatatatgtatgactcacagctgaagacaagatagatggggccctgattaatattattattacatgagtaataataaaactgttctttcattaacatgatgataattgattattttcacagacataaaactcataagggaaagggattatttatataaattgttttaattttaaacacatacctatcagtatacttttcaccttaaactcaacctgatatataaatattaagtttaaatatttgattttgaaaattagaactaaattagaatgaattctctataggcttaccagaatttgttttctcagcagcaactactacaaccatcaagatctattttctctctagtaatccaaagaatgggtcttgaaacttcaagaaactcaccccaaaatactttaaaaattgtgtgtgtgtattttttttttctaggaagaacctaacattcattcgaggttttatactggatatttatctttttttcccctttctctgcctggcacctggcagcccttccatgaatcttgttcacctcccactgtggaaggtgaaaatgccagacaaatgcttttgtatcctcccttgaagctgtggtgtgaacacttgccccttactttaccagtgttcctgaactgtatttgggaactagagacccaaacgtggggtatgcagggaactctctgacggtggtggcagaaggacgctgctagttttgcagtcctgcccagtgacaggtgatggtaattcaagcagcaaagccttagcacggatactcagagatgcagctggggtgtcctcactgaaactgattctgaagaaagattttgggcagagttcctgcatgcctaatcccaaagctgattcctcatcatgcccaacaattctgtaaactatccactatacctttaatgtatcagagttccgcttaaattgagcagaactggcttttgttgcttgcaactaaaagacattgactgatgcagatactcaaagtggtctgtgacccccacatacttaagaactatatgataaatcctcatttattgtgactacatgaccactacaagtggtatgattaagaactgaaacaaaaaatccagagttgaagatgagtatattttctactagtcatacaagcatacacttcaagtgacagctagttttgctcaagaatataaactgcacggacacgtaaacagaaatgggaacttagaaaagatccttggtttgggaagaaaaaaatatcaagattccgcatcatgtccattacagtgaacaacttagtaatgcaggaaccccctactctgactgaaggctcatggatcctgagcgaaatgccagaagtcgtgacactgtccttgtactcagacatgtgaatccagtgacacttagtatccttcatctttcattctctctctcccaatttgatatcaataatgtttacagtcaacactatgacaccttgtctaaacattcaaagtactcaaacacatataaacctcagtctacaatttgactatgcctctagatttgtagaaactagggcaaatatacagtcagaagattcagtctcagaaattgatatgcagtaagtgaattatgaaagtacaatgtttccctgcatattttaatgagtatttcagctaaaaagtagattgggctagaaatataatgatgctggacagtatcatcttggggctagaagtctgagatagaatcccttcttcacaaacagaataataatatttcattaaagaaagtatacattatgttccatcatttgctttgtgtttacacaatattagcatcgctgaataatagacatgcatcaagggaggaaaaataagcattcctttcttttggcataatgaaagttctaaattgccatatactttgtatttaattataaattcagaagtgtgtgttatatttataaatgaactattctgcacacatgtcctcaaacacattatggactgaagtcttcaatattcccattctttctcattctgggaaagaaaaataccataaaacttagaaaataaatttctttatactttgtaatggaaatttttggacatacgaaaaagtggcatgagtagggaagtgtacccctgtacctattccacagctttaatcattgtcaacactcagctacctttgtttcatttcttttcccaacccctgccacctcattacaccttttcttatttttgcctggagtaatttgaaataaatacaaaatattatgttatttcacccctgaatactttcgaatgcatttccaaaaaaagtaaggacattttctaatatatccacaatggtaatatcatacttaaaaaattaatgtatacttccccgatgttatttaatatgcgctccatatttaacttttgttgattttcttaaaactgtctttttacagtccctttgaatcaagatcgaaacaaggtattttccacattgtttattgttgttatttctcgtcctttaagtctaccctccccctcctgtcttcctgctcacttcctcccctagcaccccaccttgttttttcaagccattggcattttgaaggaatcaggtccatttacctgcatgaggtcccacctaaccggatttcactgttgcttctttgtgcagttttacttgtttctcttactgtgtagacaatgctagctctaaaggcaggttccaacttttttttagaacaaaagacttcatcagtggtgctgtgtatttcatattgcacaacttttatgatgctaagattaattcatgagttcagaagatgaaactctgatcccttcactataaagttgtccttcagcattttccctcataattttgacatctattgatgaccattgtctgaatcagatttttcacttagaagctgcaaaatgttgattttccaactctctcattcctttcacatttggtagttgagattcctttttattgaactgcctctcatccattaatgctacaaggttactctgccaattcacttcaaaaagtcagaataaaagctgaattatttttctttagtaagtaacttttagaggaacgagttggagtcagaagttgatgccatggtgtatcactgacctcccttcaggaatgaagcactcattccacagctgtgggaaatgttagaagctgctgctcaaagctgaaccctccacaagaatgtcctctgcagaaggcagctgtattacccaaggttatgcaccagcctcttccctgcagacagacggatccaatgactggtcactgggatgggagggggaaaagtcctgaccttttctcaaattgtgacaaatctgaaaggccatcctcatgaccccccacacctaataatatataatcaagacaataaactcaactcattattatgtgaaaaagagatttggtaatttcaacaaatggtttatttggaatttcctatagcactaactatacacggatatgtttacttacaatgcattacattattttgtgctgattgctaatagcaactgggtgagccaaatcataattaaattacaagaaaattaatatgcaatacataattgataagatgaaacaggaaaatcgtacaaaacaatgtataataatgcagctgcaaaagaatcactgttttctcacactattaattttatatgctccaacaagaatgttgtttactgtgttatatttggttcacagtgcagtcttctcttgataatcataccatgttctattaaatggaattctctattgactgaggtttctacatctttaaaagtgtgaattaatgttaggaaggatgtgaatctgagtagtcatagaaagggttagcactgtggacaacattattttaattccaagagccctctgtttcttgctacttccgtgatacttgacaataataaggggcaattgttttcaaatggttctataagtcctgtactcttcacccaatggtgggaacagtgacaaaacaagaaacaggcacagtcggtggaactcctgcttcattcagagcaattccacttcttacttattttctatactagcatttcatgcacagttttatttgcaaaaaatgttccagtgctaccataattttgaaaaccactgagaaagggcatagatgctaattaactattaacaagaaagatttaattaacaaaacatgccatcttgactcagaaaatagtggatattctaaagattttctatcttttttttaccttctattatgcagaaatgtggatgtatctcatattatataatttctggatccttgttggatttcacattgagccttattagaaaattagtagtacatttgttctggccaaaaaatggctcaaaaatataatggaaataagcttaactctattttaaaagaaagctagtattttcattaaaatatgcaaatgcactatgacttttaatacaattaaaatacatagcaatgaactgataaaatatattggattagaaaatgacagcaaactctgtgcctattagtttccttcatatttttctgatggcatgtagagaacatgatctgtttcctctttagcatcaaatgtctcctttagcctttttcagagaaactcctcttttttcatgtattcttctcatccaaaaccctagagctggatctgggttagtataaatgagaatcatcacatggaatttacctaacatgttttattggtgcatgtatttcaggtttgccccattagacagaatgagtactttatattctacaattgggagagatgttttctttcctgctctatgtgattaagaaagcccattgccccagttgcatctgccattaggcatacccacaaggtgggcctgtctcagaaagaagggaaaagaaaggccagcagagcagaaaaataaaaagagcttgcgtccttgttaacatcactaggctgctgaatcaacccctagacttcccctaatggaacttttttttttcctaattgcttagcctggttttaattgggatttcagttattttcagcagtctccctgctttccctccgtaaaaaccccgccaaataaataaaatgggcataaatacagaaggcagtccattatgaactctttttccatcttagctttttcgttggaattctctcaactctattctgtgtttaaatccagcactggactaacatgttttctgggaattccagggaagccatggtgctgcagtttgttgctgataggaagaagcagaaactgacacaggacactggaggcctggttccgccagctgactctgtcatcttgcctgctttccctatatgtttactccgcttgagtttttggtcctgacatctggtcggtattattaaaatttgtcctgttagtgagcgtgcaacttttttgcgtgccagattttttcatgttttactttattttaatgacttagtggttttaacatatgaattgggttgtttcaagaagtattaaagacattggtggcaaatttagatgctacagtagaaaataaagcaataggtaagcccatttgctacagattaagtaatatcaacagtaggcaaaacaataaggatcactgaagggaagaataatagagtgtacctgcagagctaagaaagggtttcttttccagacaatttattcctatttagatttaaatagtttaaatatgtgtgtatatgtgtagaatttttattgaagaaatctattaggaaaatgtgttggcatgaaattatcctcctagtttcctaggcatattgtttattactggtgggaaatagcacgatgttgtgtaccatctcacttttttcacttactctagatctgtgtgtgcttttgatcattcatgacttcaaagcccctcagatgttcatgatttcaggccttaactttagccaacgtgtttccccagctcaagatatattcattcaattgtctataggaggtcaccaccagaatttctgcaggcagctctcttttgtcacatccaaaactgaatctattgttttctcagaagccagctccttctttccttctccaagcaaacatttatgaatgtctagtgtgttcagggctttgtcttaagaactccaaccctcaaagggtacattgtagtgaggagacagataaagcaataactatagtgttgtggctagtacagtgctagttataagaggcaagtgtgtgatcttggacattttgcatgaactctccgtagtttagtttctttatctgtaaaatgaagataataaaatctccttagagagttaatgtgaggattaattcaatcacatatgtgaagagcacagaacacactacacactcaatgattattagcaactatcatcattattattagttacattatataggaagtgaaaattaagctttaaacatcacatttaatagtgaaatattagagccatgctatcctcactaaggcaattagatgagaaaagttgaaacataaaaattggaaggaaagatgcaaatgtcaatctggagattatttgactatatgcatagaaaacccaaataatcaaatgataaaaataatagaagcaataggtaaaaactccataaaatagctgattacagtattaatatgcaaaaatcagtagttgtacaatatataaaaaccacaaaagaatgtgtttgctcttgcttctctagttcttttaattgtgatgttagggtgtcaattttagatctttcctgctttctcttgcgggcatttagtgctataaatttccctctacacactgctttaaatgtgtcccagagattctggtatgttgtgtctttgttctcgttggtttcaaagaacatctttatttctgccttcatttcgttatgtacccagcagtcattcaggagcaggttgttcagtttccatgtagttgagcggttttgagtgagtttctttatcctgagttctagtttgattgcactgtggtctgagagacagtttgttgtaatgtctgttcttttacatttgctgaggagtgctttacttccaactatgtggtcaattttggaataggtgtggtgtggtgctgagaagaatgtatattctgttgatttggggtggagagttctgtagatgtctattaggtccgcttggtgcagagctgagttcaattcctggatatccttgttaactttctgtcttgttgatctgtctaatgttgacagtggggtgttaaagtctcccattattattgtgtgggagtctaagtctctttgtaggtctctaaggacttgctttatgaatctgggtgctcctgtattgggtgcatatatatttaggatagttagctcttcttgttgaattgatccctttaccattatgtaatggccctctttgtctcttttgatctttgttggtttaaagtctgttttatcagagactaggattgcaactcctgcctttttttttttgttttccatttgcttggtagatcttcctgcatccctttactttgagcctatgtgtgtctctgcatgtgagatttgtctgctgaatacagcacactgatgggtcttgactctttatccaatttgccagtctgtgtgttttaattggagcacttatcccatttacatttaaagttaatattgttatgtgtgaatttgatcctgtcattatgatgttagctgggtattttgctcgttagttgatccagtttcttcctagcctcgatggtctttacaatttggcatgtttttgcagtagctggtaccgattgtaaatattatgaaatattccttgtaacaaacctcctaacaagttgttattattatgctcatgttatagataaggaaactgaggtacagataggtcaagtaatttgctcaagatctcacaacctgtaagcgggagaaccaggcttcaaattcaggcaacctggctccagagtttgtgctcttaaccagtacactgtgagacaataagtaaaacaatttgttacaagcccaagaacaaacagagatagaaacataagagtctaggaagagatatagatatacatgaaaatttagtatgtaatgaagtataccttttaagtacggaaaaatgatggattattcagtaaattgtgttagataatagtgaaaaataaaggtactttttttttcatcaaatttcatgtggatcaaaatttaaatataaaaatatattaataccatagagtactataaaaatatgaaggaattttttaaaataatcttttagtgggtaagactttctaatagaaaaattcagaagccataaaattaatcattttcatgtggtacaagttatattctgaatttctcatttctccttacaaaagtctaaaaaaggtcaaagagaaatttgagaacttttgttgtttatggtgtgagtgatgtgcatgtaatgtatatatgagccatttattaatgtaaaaccaaaagaacccatggttactggagtaagtttcttgaaatattctgttaacttttttagtgatgctccccctgccttctttctcatatgaattaggaaaaaacatttatttacttgtgtggtgggttgggggaggaaatcaaaacatcttttgtatctaagtttaaattgagcaatggataagatattaaaatcaatgattccggttagatgtagcaattaatattttgcttaactctgaatttcatcttcttcatggatcttgaggatcagaaaggtgtttttaagaaaacttcaaatgtataccaacatgactcagagaagctctgtttataataacttcagaaaatttaaaatattaagtaaatataattaaattactaaaattgatttaaaatattacagaaaaaggtagaaaatgaaacacaaaaagttacttataatactactgctataatgtaatcatcactataattttggcatatttctttcaactctatttttttcctatgcatccgatctcctgcaaagtaaatatcagaaaatatgtaaaactgtaatagcaagaaataagatgatttattttacaaatttaacagcccaaatatgttttcctaggcacgtggttttttttttgaggattctttgttaatgttccttgttctttttgttagaaatccatgattttctcattgatttttatgggctcagtgaaaaataagatgctagttttttttcatatttatagcatatatgttggatattttaacctataggactttaaacaatatctgtagtcaaatttagcataccttatctttcgtatttttgctttttttgcattttaacattttaagattgtaaactataatatggaaaagtatgcaaatataaaatttagccatttccgagttgaaatctagagagttaaacatgcattcttaatttatcaacgtcgtttatctttacccacatatttactctcttttggtcttcattccttaatgtcttttagttttcatttggaatcatttgttttctgtctaatgttttagcatttactttaatgtagttcttctggtaacaaattttctgtttttgtttgtctaaaaatatttcaatttgaattcattcttgatacttttgctaagcatataattttaattttgcaattactttctttctgcatgttaagatatcatctcactgtctttcaacttccatagtttcaccatagtttcacataagaagatggccatctaattgttcctttgaaggtactgtatcagttgcaattgctatgtatgaaatcatcataaacttattacctcaaaacaagacacatttataatctcacattttctatgggttggagccaaacaagggttacttggagtttctgctcaggatctcacaaggctgaaatcaaggtcagctggggctgtgatctaatctgaatctcaggtgtctcttccaaggtcattcagatttttgcagaattcagttccttgcagttgtaggactgaggttcctgttttcttgttggcttttcactgtggattattctcagctcctagaggccaccagtttctagtcatatggccatcttacaacatggcagcttacttcttcaaatccagcaggaaaatctgtctttagcctgctgccagtgagtcttatgtaatataatcacaggagtagctatcccaccacctttgccatgcactgaaaactaaccaagggagaactatcccatcatattcacagatctcattcaagaggaggaggaggaattctgcctactatagctactttgagatttcttccttgtcttttgttatcattggttttattatgatgcatctaggtgcgaatttatattttatttatccaattttgaagttgattggtccttaatctgtgaatcaatttcattagttttgaaaaattcttaggcattatctctaaccatattttctttttttctttttctttttagttgacccatagtcatgatacatatttatgggacatagaatgatatatatatatgtaacgtataatgatccaatcaggataattaacatatctgtcacctcaagcattaatcatttctttgcactgtgaacactcaaaatcctctcttcttaatgcttttcaaaaatttgcaatacattatagttaaccatatttaccctaagtgctgcagaacactataattcatctctcctatctagctgtaattccaaatgtaatttctgacctattcttttttttttttgctttcctttggaaacaacagttactatatgtaacatgtttttactatgtcctctatgtctcaggcactttcctatattttccattctttactcctttctaaatattttcttctgagctctcttcctgttcactaatattgccttcatccaagtctaatctactactgaaaccaggcactgagttcttaatttccattacagtttttgattatagggcctccattttattctttttcacattgactatgcaatgttttaataattaattcttgctacaatttgttttatgctgttataagtacagttattgtattagtccattttcacactactgtaaagaactgcccaagactaggtaatttataaagaaaagaggtttaattgactcatagttccatatgcctggggaggcctcagaaaacttacagccatggcagaagaggaagcaagcacgtcttacatggtggcaggcaagagagcaagttcaggaagaaggaactgtcaaacacttctaaaactatcagctgtcgtgagaaacctctcactatcatgagaacagcatgagggaaccacccccatgatccaaccacctcccactaggtccctccctcaacatgtggggattacagggtttataatttgagatgagatttgggttgggggggcacagagccaaaccatatcactcattttaaagtctgtgacagataattctaatacatgaaacccctctaggtatatttattttatctgttatttttattatttctcattcatgttgccttttctatacacgtacctagttatttttgatggtagacttaacaaggtattttaaaatttgtaaaaatttaaaggcctaggataatattatcttcatacagagagaaacattttatctgacttttttagcttcagttcaatgaaaattaaagatttttagaattcaattttgaggaacaagatttgctgagctatctgagtgatgcaaagctggtctgtagttcatctttacttgtttatttttggttcattattaccattagggtacgtcctttcaggattcctacctaaagggtggtgttttataaggaccaacatcctttgctattgtacctcaacctttggttcctaacattataggactgtcaaagatgccagtctttcagctaccagtgttatttgagcccaaaaatgacaggcttaactctctgaatttcatagtcttccaagatcttaagcaggtaattcttcactatttttaaacttcttcatttttttgagaatatgtttttgtattttattcagtttttctagttgttctcagtaggatggttggtccaacctagcacactgtttttcaaagtagaattcctgcacttttatttcctgaagttgttgcatgatgtttaaacttagcattctcctctaaagttatgataaatattcaatttaaaaatatttgcatatgttttatttaatttgcatatataatatatatgtatgtatttcttcaatatttttctattattatttaggtatataattctctattaattactcatgtattttccaaggagacagctaccaaaagaaaatttctgttttgaaatagcaactcattctgttactcagttggattgcagtggcactatcatagctcacagtagccttgaactcctggactcaagcaatccttctgcctcagcctcctaagtagctagtactatcggtgtgtgctaccatgcctgactaatattttgtatttttttgtacagatgggcacaactaaatacatcatttcattaaaatatcaaatattctttatttttctttaaatttgaaactacttaaataaaattggagtatgttaataggttaactgaagaattgctaccacaaactaactagaatatgctctctaactaatggctacattatgcttacactagtgactaagaactgatgcacactttttcctatatttttcagttttatgaaggaataacatgctgaagaacattagaacatgttgtagttgaaacactcctacaggctatggagaatgctttcaaaatttgattagccagggatcaaaataaggatcattcaaattttagctcaatatcctgtttaattgttgttatcaggttgagtgtctttttgtttcttctccattgctatcttaagcaaaactaatttaaagagaaaatttttctgttaataaaaaagtgggtaaaatagtttgaggccagtgactttgtatgtgtgtgactgtctttgtaggtgtttccatgtaaatgaaataaaaagctccgttatctttataaaaatccaatttcaaacacactaatcttattatataaagattgccatataaaatatcattctgtgttttaagatagacttagtaggtagatatccttcttccagcagtgtatgtgtgtgtgtgtgtgtgtatgtgagcacacatgtgcctgtatatttaggtagaactggtgcacgtggttggggagagtctgtggggagacgtgctgatgtgctgatggaatacagcttaggagggagggatagctggagacaggaaatatttttcctgttgctttgtgatttagcaattcatagctagagttgctgccaagcattctgaaattttctgaagtgactgaatttaacatttggggtaactttttatctctactcacctgccctttgatttagatgttgttcagagtagaataagtcatacttggatttccatccagctttatgctttctgttgaatggtttcaggaaagttatgtaacttccctgtgcctcagtcttctcattggtaaaatatcaataataatagcacttatttcatagagctttaggaagattgaatgaggtaaattatgttaggtgctaagtagaatggctggcactcattaatgtaaacaattattgtaattattaaatcttaaacattgaaactggaagggacctttaaaatgcattggactaaacccttaattttatagagtataaaatttaattactgagatataaagtactacttttaaagtcatacaaccaactagagtagagctcaaacttgaggttttcatgactcttaggattgaatattctgtttactgaaaaaaatcagataaataaataaatgaacaagagagtattgtaaataaagattgcagataatattcaagatacattctagatataattgtgattctaaaatgtagagaatgaatcaagttttctggagattctaaaaatattttggattgttatcactatgaatggtttagatagggctttggaacacatatgacaattacaggcatacttcattttattgcacttcactttattgtgctttgtgcaaatattgcatttttaaaaaatagaaggtttgtggcaacactgcatcaagcaagtctattggtaccatttttccaagagcaggtgctcactttacttcaatctgttacattttggtaattcttgcaatatttcaaatcttgttattatatctgttttgcagatctgtaatcagcaatctctgatgttaccattataactgtcctggggtgtcacaaattgtgcccatataagacaggaaactcagtaagtaaatatgggcattctaattgctccaccaattggccattccctcatctctctccctttcttcaggcctccctattccctgggacacaacaatattgaaattagaccaattaataaccctacaatgtcctctaagtgttaaagtgaaatgaagagtggcacatctctcactttcagtcaaaagttagaaatgattgaaattagtgaggaagacatgtggaaagccaaggtaggctgaaagctaagcctcttgagccaaaccgttgtgaatgcaaaggaaaagttctcaaagaaaattaaaagtgctacttcagcgaacacacaaatgataagaaagtgaaatagtttcattgctgatacagagaaagttttagtggtctggataaaagatcaaacaagtcacaacattccctaaagccaaagcctaatccagagcaaggccatacctctgtgcagttctttgaaggctgagagaagtgaggaagctacagaagaaaatttaaaattggcaaaggtgggttcatggggtttaaggaaagaggccatcttcataatataaaagtgcaaggtgaagcagtgagtgctgatggagaagctgaagcaagttatccagagatcaagctaagataattgacaaaggtggctatgttaaacaacagactttcaatatagacaaacagccttctattggaagaagatgccatctaggactttcatagctagagaggagaagtcaatgcctgacttcaaagctttaaggggcaggctgactctcttgttaggggccaatgaagctggcaacttcaagttgaagccaatattcattgatcgttctggaaatcctaagttccttaggaattatactatacctactctgcttgttctctataaatagaacaacacagcttgggcgacagcaagtctttttacagactgtttactaaaaattttaagcccgctgtggagacctaatgttcagaaaaaaagattatttccaaaatattactgctcattgataatgaattggtcatccaagggctctgatggacatgtgcaaggacattgatgttatttttatattttatattttattaattcctctgataggtcttggcaaagtgagttgaaaacctcctggaaaggattcaccattttaaatgccattaagaacatttgtgattcataagaggaagtcaaaatatgaacattaacaggagtttgaaagaagtcgattatcactcttatggataactttggggagttgaagacttcaatggaggaagtaactgcagatatggtagaaatagcaagagaactacaattataagtgaagcctgaagatgggactgaattgctgcaatctcatgatagaactcggatggatgagtgatgaggagttgcttcttatggatgcacaaataaagtggtttcttttttcttttccttttttttttttttttttttttaatttttgagacaaggtctcactatgttgcccaaactggagtgcagtggcacaataacatctcactgtagcttgaccttctgggctcaagcaatcctcccacctcagcctcctgagtagctgggactataggtatgcaccatcattcccagcaaattgatttttttttttttttttttggagagagagtgtttccctatgttgcccaggctggtctcaaactcctgggctcaagtgaccatctcattttggcctcccaaattgctgggattacagcaactactgcaactggccagaaagtgtttttttgcgagggaatctgttcttggtgaagatgctgtgaaccttgtttttttttttttttttttttttgagacagagtctcgctctgttacccaggctggagtgcagtggtgcgatcttggctcactgcaaaccccgcctcctgggttcacagtattctcctgcctcagcctcctgagtagctgggactacaggcacctgccagcatgcccggctatttttttgtatttttagtagagacggggtttcaccgtgttatccaggatggtcttgatctcctgacctcgtgatctgcccacctaagcctcccaaagtgctgggattacaggcgtgagccaccgtgcccggccctgtgaacattgttgaaataacagcaaagaatttagaatgttacataaacatggttgattaggcagcaacagggttggagaagattgactccaattttgaaggaggttctactgatagtaaaatgctgttaaacagcatcataggctacagaaaactcttctgaaaggaagtgttgacagatacaccaaagttcattgttttattttaagaaattgccatagccaccccatccttcagcaaccaccactctgccaacagtcaccacaattgaggtaagatgctccatcagccaaaagattataactcactgaaggctcaagatgattgttagcatttttcacaataaaatatctttaaattaagatatacacaaattttaagacataatgctattgcatacttaatagactacaatatagtgtatatataagtaaataaaaaatttatgtgacttaacttattattatactctctttattgtagtagtctggatccaacccacaatatcttcgaggtatgcctatacagagtctgtaggaaaaaaggaaacaggagggaatgtaacacataataatttaaatagagtactgaaattgtatggttattcataatgcaatgctacatatatgtgaagaagttgagaatcgtgatattatgtcctttattttacaaacgattttgcaaaggagacccaaaagagaagcagggagtgggtggctcacttaaatgagcattaaatcagacctccgtaagtgatatactataccagtatttcccatttcaagagctagatcaatgtgtagactctcactgctgacttgtggatcggccatgtctgtttttactagtatcactgggactccttgatattgactgcttcccgttattgccattgtgatctcctctcacttgcagtcttctctaggcagctgatggagggaatgggtaagccttgtgccactggggaaatgggagaggtgatggttgaaagaattgcagaatggctctgggaatagccatgaatgtagtcctgagctttttctcactgggtaaagcaatgaaacaaggaatcctaacttggagaaaaaaaagtttttttctttttaggaaagataataagagtgtgaggaaagggtggagtgagcagtaaaatgaatcggagagaaagagggcagtttttaccatttgcatttagtatctaactttaagaccttggagatgattatttttggcatgaatccattatcatacagatataactcttcaataatgaggtcattttaaaaacatgcagtaaaaaactgggataatgcaggtccaggaggagggcctgtgttgtgtcactgggaggttcagcatatgagggcttgtgttattgctgcttatggcggagacaccctaggagaaggcctgtaggccctgtgtctgcctcagctgtctcatttctctctgtatctctctcagggatctattcatctcaattacataataatcatcccacgtatcagatatggcttacatttcttgatatagtgtgtgtgtgttttaatgatgagcatggtgctcaatgttaagaggggcagaaaagtggcaacatgcctcataagttcagtaaagtggaaagagaaaacgattttgctgaattttccacgtagcttgtgaaagttatgatagggtggtttgttttctatctaaaaataaagtcaagattgttggcttcttcctctcctcccagtaggaagtacatccactccagtttctctattctattccttcaacttgcttgtctattcatgatacatttattcattgattaaccaacatccttttaagatctgctacaaagctggacactgtggtagctctgaggagatgatgggagacagccattagtcccatactcatacaaatataatcaactgtgacatgtgctatatggggctagaaagagtatattacagagactcaactccatcaagaccatgtcagagaaggcttctctgagaaagtgatgtttgggctgagatctgggagatgactagaagttaatcagaaaaagtcaagcaactagaaggggtggaaagaagagattcagagtgacagcaatgttttggttgggcaaatattagactccacattgggagtctaatatttaagttagtatctaactttaagaccttggagataattatttttggcatgaatccattatcatacagatattactcttcaataatgaggtcattttaaaaatgcgcagtaaaaaacaagactaattcaagtccaggaagatggcctgtgttgtgtcactcggaggttcagcatatgagggcttgtgttattgctgtttaaggcagagacaccctagagacatgggagaaccatgttgcatactgcacaacactggtgatgactctgtgccctagcacagcaaaacatcttgacctggcaccatcatctcactcatgtatgtcattttctatgggcactacaatatttttcctcaagtttatgtaagatattttggaactcttctgaaaatttaatatactcctgctgtatcatcactttgtttcctgtctcttacctcaactcaaaagccttttcctaactcattatcacaaaggagaatacaatgtggagatttaactgaattatacaatataggatttctggtatttggcaggatcccataccatttactatattgacacatgatggggcctagaattaaactctctttaatcattgactcacctgcaccagagatgtacatattgtgcctcacaatcccactggtatagaaaactgaacattgaaattgttcccatcctctgaaaaaacctgctttttttttgtcaagcagctcataaaagcatgacctagaatttctttccttgctgtttttttctcatttattttgtacattttaacaatttctaagctggctacagaccttgaactaacaattgagaacacttttataagtctcagttaagagctcatgaaccattatatagctcagcaagaaagtgtgtggctgagaggtacaattacctatccattggagttgcatttcccccctccccacctccagttgaaggtaaaaagcctcttgaggtcaccaaattaaagaatgttctgtctctcaaaagaagaggtacacatgttctcagcaaatcaaaatgttctgatgaaagtacttcccaggaaaaatggcaggaaaatgttgaaactgtgtttcatatttggttcaggttctgccaagatagattctttttcacaaggctggggaggtaagcatgttggagctagaaaagagagaaccctgctggaactgtactgaaaaacctgccgggtaatgacactgtttcctttttatttttgtttgagctgcaataaagctggtacttcagaacacaaaagctagattcctgctgtgacttctcaaaaactgcttctcaaaatactcatgcaacagctgacacataaaaaatgtacatgaatgtctggatggcttcccagacctgtctggaagtacacacccagttttcaggtaggttcaatgtatgatgctctgaagtctgtttttcaagagtcataatcttgggaggctgaggcgggtggatcacaaggtcaggagatctagaccatcctggctaacacggtgaaaccccatctctactaaaaatacaaaaaattagctgggcgtggtggcgggcacctatagtcgcagctactcgggaggctgaggcaggagaatggcataaacctgggaggcggagcttgcagtgaaccgagatcacgacactgcactccagcctgggtgcagtgagactccatatcaaaaaaaaaaaaaaaaaaaaaagagtcataatcttcccatgtagcttgaagttgtggtctatcctgactgacattcatgaagtcatacataaccttagaaaaatccattcctgacttcttcaggatgtttgcttgcatttttagggttgcttctgtattctggagttaatcaaggaagatgggcagagtcctcagaaggcatcatgagtgcagggttctgttatggttctgctaccaggcttatgtttaatgttgatcttttactggatgtcagtttcctcgtctgtaaaatgaacagatgaaaaaggatgacaagtatagaaggactgtataaagtgattgcagtagggccagctaaaaacctgcccggttgatgccagagccacctgggtaccaagaagtttttattcaggccaagcttctgtcaattataataacatgaagaaatttttgaatcaaacctttaaagaaacatcgtaaggattagttgagaatgaatgacaactacatgcatgttagaattctgttaattaacatatacccaggggtgttctgatatcttgatggcttagataaccattttcattttctgctctataaataattaatgtaaaagaaaccagactgcactttttcctgtctttctcaaacgtaagtcatttctgagtttcttacttttttttttttacaattctaattattagttatgaaaaacattgtcaggtcctacatttttctcaagatttattccaaatactaagttttgatatcagaatttctaaataatatactctgcaaaaagccaactacgtactttgttctttggtccccaaaagactttgctttctgctcagggctgccactctctctgctaacagctaacattcactgagctattggggcagacactgggcagagtgcttacatgtgtcacttcacttagtgaccacaactccatgaattaaaatgataatttatcctcattttacagatatgcaaactgagactcagagatgtcaagtaacttatccagagtctcacagctagcgcgtcactcattctagaaccaaacagctgatttatctttctgaactaacctgtggccttttaagtgttctgtgtttcttcctgggtgtctaccttctttgattttttctgagtgctgttgtgataagtaataagtttaaactacttttagtaggaagtatcactgaaaataaattctcctactggtagttctgtgatagtcatggcatttcctgtgcaacatcatgaactgttctcccttgctgaagcaacagtttaacatgctacaagttaacctttcaacactgattaacgtgtaagtaaaaaagaaaaaataacactttaacgaaagtcactataaaattgcagtcattatgtatagtgcagtaattttcaatccaatttcagtagtgggatctattcccattaggggctttccatatatatacttatttcagtaagcaccaaccactttatgatttctgatgagtccctgtgttagaaagaaggttgagattctctggtatgtagtaaatctcagtatgtagtacggaccttgatataacctgcaagaaaagtctgcttattcactgggctctgtgaacacagtgccaaagctctaggttcttttaaggagcccacgtaaatgtttgtgacaaggaaaaggaactaatggctccaaaatataaaaaagaagttgcaaaatgaaaaaaaaagtttaaataagtatttatatactgtaacatgtcagtcttattaatcttttaaattttattcataaaaacttcattacatatgaaaacaatttgtaggttagattttttatttgtatgtaaaacgattcctgagaaatcatagcacagtgtaaattaaatggcttaattacagtctctgaaattatcttgcttatttttccccttgcttattatctgtctccttctatgagtatacaagctctgtgggagcagagaccttgtatttctttttcatttttgtatctccattgcctagagtgtgtctaacatatttatgaaagataatcaataaatatttttaagtgaatgaagcaaacatatgcatacatacaaacactcacatatggtaagttactacaaggcatcctatacttacgaggcagtatatgtctgcttaaaggagatggagaatggattggcttatgtgaggataggcagaccctgaaaagaataggaatgaagtgaaaggggagtattagcacctccttctctcccctgtccctctgccccctgctccaatcaggatgccatgttaactcctcagtgccatacattacaatggggcaggaggaaagccgattgatagtagaaagttattttctatgtccacatagttgctagcatgttgtaccacctggggtaattctgaaaatttggtgattccatgtagattgtatgtaattagctccactcccagagatgcataagtatcaagatttcagtgtggaacaggatgagtgagagaactgtgaagcacatggtaactggaataccgctttttaaaagcaaaataaagcaacacaatggaaacagtcacttttgcagcaacaatgcagaccccaagatgatggcagaactttcaagtattgccacagtgcacacagaagcggcttgctgcttggctgtccacttgcccacgtggcaacccctcaattctcacctttttgtcctcagaaaaaggaagctgtggcacttttcctttagagctgaaatatcttccaattgtatattccaaatcaaattttttttttattatactttaagttttagggtacatgtgcacaacgtgcagggttgttacatatgtatacatgtgccatgttggtgtgctgcatccgtcaactcgtcatttaacattaggtatatctcctaatgctatccctcccccctcccccaccccacaacaggccctggtgtgtgatgttcgccttcctgtgtccatgtgttctcgttgttcaattcccacctatgagtgagaacatgcggtgtttggttttttgtccttgtgatagtttgcttagaaggatggtttccagcttcatccatatctctacaaaggatatgaactcatccttttttatggctgcatggtattccatggtgtatatatgccacattttcttaatccagtctatcattgttggacatttgggttgattccaagtctttgctattgtgaatagtgccacaataaacatacatgtgcatgtgtctttatagcaacacaaattataatcctttgggtatatacccagtaatgggatggctgggtcaaatggtatttccagttctagatccctgaggaatcaccacactgacttccacaatggttgaactagtttacagtcccaccaacagtgtaaaagtgttcctatttctccacatcctctccagcacctgttgattcctgacttattaatgatcgccattctaactggcatgagatggtatctcattgtggttttgatttgcatttctctgatggccagtgatgatgagcattttttcatgtgtcttttggctacataaatgtcttctgttgagaagtgtctgttcatatccttcgcccacttgttgatggggttgtttgtttttttcttttaagtttgagttctttgtagattctggatattagccctttgtcagatgagtagattgcaaaaattttctcccattctttaggttgcctgttcactctgatggtagtttctttagatgtgcagaagctctttagtttaattagatctcatttgtcaattttggcttttgttgccattgcttttggtgttttagacatgaagtccatgcccatgcctatgtcctgaatggcattgtctaggttttcttctagggtttttatggttttaggtctaacatgtaagtctttaatccatcttgaattaagttttgtataaggtgtaaggaagggatccagtttcagctttctacatatggctagccagttttcccagcaccatttattaaatagggaatcttttccccatttcttgtttttgtcaggtttgtcaaagatcagatagttgcagatatgcggcattatttctgagggctctgttctgttccgttggtctatatctctgttttggtaccagtaccatgctgttttggttactgtagccttgtagtatagtttgaagtcaggtagtgtgatgcctccggctttgttcttttggcttaggattgacttggcaatgcgggctctttcttggttccatatgaactttaaagtagtttttcccaattctgtgaagaaagtcactggtagcttgatggggatggcattgaatctataaattaccttgggcagtatggccattttcaagatattgattcttcctacccatgaacatggaatgttcttccatttgtttgtattctcttttatttcattgaggagtggtttgtagttctccttgaagaggtccttcacatcccttgtaagttggattcctaggtattttattctctttgaagcagttgtgaatgggagttcactcatgatttggctctctgtttgtctgttattggtgtataagaatgcttgtgatttaaacatggaaaggaagaaccagtgccagccactgcaaaaacatgccaaattgtaaagaccatcgaggctaggaagaaactgcataaactaacgagcaaaataaccagttaacatcataatgacaggatcaaattcacacataacaatattaaccttaaatgtaaatggactaaatgctccaattagaagacacagactggcaaattgtataaagagtcaagacctatcagtgtgctgtattcagggaacctatctcacctgcagagacacacataggctcaaaataaagggatggaggaagatctaccaagcaaatggaaaacaaaaaaaggcaggggttgcaatcctagtctccgataaaacagactttaaaccaacaaagatcaaaagagacaaagaaggccattacataatggtaaagggatcaattcaacaagaagagctaactatcctaaatatatatgcacccaatacaggagcacccagattcataaagcaagtccttagagacctacaaagagacttagactcccacacaataataatgggagactttaacaccccactgtcaacactagacagatcaacaagacagaaagttaacaaggataaccaggaattgaactcagctctgcaccaagtggacctaataaacatctacagaactctctcaaccccaaatcaacagaataggcattcttctcagcaccacaccacacctattccaaaagtgacctcatagttggaagtaaagcactcctcagcaaatgtaaaagaacagaaattataacaaactgtctctcagaccacagtgcaatccagctagaactcaggattaagaaaatcactcaaaactgctcaactacatggaaactgaacaacctgctcatgaatgactactgggtacataatgaaatgaaggcagaaataaagatgttctttgaaaccaaagagaacaaagacacaacataccgtaatctctgggacacatttaaagcagtgtgtagagggaattatagcactgaatgcccacaagagaaagcaggaaagatctaaaattgacaccctaacatcacaattaaaagaactagagaagcaagagcaaacacattcaaaagctagcagaaggcaagaaataactaagatcagaacagaactgaaggagataaagacaaaaaatcccttcaaaaaatcaatgaatccaggagctggttttttgaaaagatcaacaaaatggatagactgctagcaagactaataaagaagaaaagagagaagaatcaaatagacgcaataaaaaatgataaaggggatatcaccaccgatcccacagaaatacaaactaccatcagagaatactataaacacctctatgcaataaactagaaaatctagaagaaatggataaattcctggacacatacaccctcccaagactaaactagagagaagttgaatctctgaacagagcaataacaggctctgaaattgaggcaataattaatagcttaccaaccaaaaaagtccaggaccagacggatttacagccgaattctaccagaggtacaaggaggaactcgtaccattccttctgaaactattccaatcaatagaaaaagagggaatcctccctacctcattttatgaggccagcatcatcctgataccaaagcctggcagagacacaccaaaaaaggagaattttagaccaatatccctaatgaacatagatgcaaaaatcctcagtaaaatactggcaaaccaaatccagcagcacatcaaaaacttatccaccatgatcaagtgggcttcatccctgggatgcaaggctggttcaacatatgcaaatcaataaacgtaatccagcatataaacagaaccaatgacaaaaaccacgattgtctcaatagatgcagaaaaggcctttgacaaaattcaacaacccttcatgctaaaaattctcaataaattaggtattgatgggacatacctcaaaataatcagagttatttatgacaaacccacagcccatatcatactgaatggacaaaaactggaagcattccctttgaaaactgacacaagacagggatgccctctctcaccactcctattcaacatagtgttggaaattctggccaggggaatcaggcaggataaagggtatttaattaggaaaagaggaagtcaaattgtccctgtttgcagatgacatgattgtatatctagaaaaccccatcgtctcagcccaaaatctcgttaagctgataagcaacttcagcaaagtctcaggatacaaaatcaatgtccaaatcaaatgttttataaaagtaagtcccctgaatcgagccaccaggtggctcagaaggtgcttgcttctcctgccttttcttccatccgtagccccaggatatgatccactatttttttttttttttgagatggagtctcactctgttgcccagcctggagtgcaatggcgccatctcaactcactgcaagctctgcctcccaggttcaagcaattctcctgtctcatcctaccgagtagctgggactataggtgcctgccaccacagttggctaatttttgtatttttagtagagatgaggtttcttcatattggtcaggctggtcgccaactcctgacctcaggtgatccccctgccttggcctcccaaagtactgggattacaggtgtgagccactgcacctggccccattgactatttaagaagagtggcttatggaagagttgttctcaagagatggtattttcatatgtaattacctggcacatgtagttgtcatagaagacacagtggtacttttagactttggggaagaaatttgaaatgagtattagggtattttttaggaaatactatatctatttcaagtttcttcctaaaaatagtcataaattttgatttctaatattcacagaacaagtctattttgaaaacttaggttagagtttgacagcctttagacataacaaaatacaaactcaagatttgggggaaattagttcaagtaatcactaatttaaatctttgcgggggtaaaaatagcttacaatttaagtaaaatgtgaagaactgttaattagttccatatttatttgattttttgatcctaaaagactttatttaggtttttgtttccactatgcctacttccatgaggtttaatcagattttttgaagaaaataatttgtattcttattcaagaattaagtcccttcctgaaaaaaccagatgtcattgagattcattgttccatatgtgtgtgtgtacatgtatatatattttaacagaaaacagtaagattacttctggaaaaatatttaaatggtttatgacttggagaaatattttatgtaaattaactccagttgtctatgggcaagaaataaaattgggcagttgaaaatttcccagaggataggtgtggaaaatcttttataatgtaatttttgaaacttatcaagcatgtgaattgatagtaacaatacaagtgtcttggcaacctctttaaaaatgattccaacttttaggtggggggattgtaaaatttgttggaatttggggcttttggcctgttaaatggtttgaataatgatttggctttaatgcctcattccctattgctctgtatttttttttaaagcattttcattgttcaaactgcatcttggtccaccagctcttaaagtgacagccatccttttcaacatgatgatcacacagaatctgatgaccattcaaggagcatcgcatttgaaaaggctgggaaaaagaattttatattacatctagggctgttggcaaggacgatggaatgagctaactgaaggaaaagaactggttttaacctttgccctatcagcaacactgggaaaccttgggaagtctcttaacctttttgggctttgtctataaagtggacatgctcctagacttaacctatctcacagtaataactaggcattatacatggatatgcctgaaaaatataaatgctataaaaccaaatgacgttattaagttgaatcacatttttgcatcattttgacaggtgaaatggtcaaatagaagcatttctatagagtttttgaatctatctgaactatattatgttttgaccaacctgcatatgcatcaatatcttattctgtgaaaaaatgagacagtggtattgggcagaatattacatttaaggatttagtaaaatgcctgcaataactgctctatcaacaaacagtgacagagtgcctactttgtattagaacctatgttgagtactaaggatatagaatgaataagacagagtttctgccttcaaggaatctgaataagtgctaatatgaaaatatttcagaaacttcttttagccaagctaaagatgactttatgaaagatctgaagttttgatatgaatttgaaacatttaatcactcccacttggtgtcttcagtgccctttgaagactcttcccacagggcccaatgcagagtgagcctgagaagcagtggatttgggcaggtaaaggggtgtattcctagcgtagagcctccacagcatccacagatgaactagtttggactgcgattacccagcattgttctttgtattgtggccctctagaactcccagactacttcacgttcactttcttcaggccctggaaataaaccctgaattcaggctcagaattaacctatgtgtggggaatggccccatgtggcctcagacagtttgcaaactcaagggttcacaattcagtcactcccctgggtttttcttgcccttacccgctttgacttggatcaggaaagataaatacagaaatcttttcatcagtgttcaagggtgggaaaatgttatattgctgtgatgagtaactggagaaatctgctagtcaattatatcaaacagctgtctaaaagtttctttcatatccatcccctgccatcactgaagcctgcataggtttcgggtttctaggtgtctgtttgatgatttaattcttacaagtctttaaaaaacagcacttgagcatttgcaaaaagactaacatgtttgcttcactttgatttatatccacaaagaaatgttaagtgtcagagccccagttgatctgatagaagtggttccttttctatttgcttatttgtgctaaaaggcagagatttttaacatttgttcttgaactcaccacaatgtggcactatagtaatttctttatctctggacgcttctaggtgatggagatgtcttcaaaatgttggacttctagcaagagttctctgcctaaaactgtgagtcatcctccaagatctccacttacgaagtcatgggggttcccgttaattaagtatgtgtgctccgcttacatgagtgtttccctgtgctttgcttaaaacacgagaacaaaaacaaagcatatttttcttaattcctcagtcattatactttctctttctggaagatagtctagaaaaattaaaatcaaaatcttatattaactgtggaaacaaatctaaaacttagtaaatttttttagtaagtaactatgaacacagaggtgtggagtgaaatttctggttcgtggaagacacaagtacatgttagagaagaacatttatttcaaatacaggaaaagacagcaatattactccgtgaattttgatgggttcttccccagaaaatttgattttctgatgtggtgtgcaagctcagtgtagtagactcttcatgacctacaggtttgatatcatcatagtttctagaagactcaattgtaagagacttgaaagtgtcgagccgcttcaccatagcagtatatctgagttctgtgtacccgcattttgactatcactttgacacacaaacctaaaaggaaagcggttatggcatgaacatgtaatatattgattcttatttaggaaagatttagacctgaaattaagactcactaacaatagtaaatagtacttagtaagtagtaagtactcagtattagtaaatccctttcctagtactgttatcatcattgcaaaggaattttctatcctcttttttaatgtttctcctcatatttatatgcatataaaaaagaaatagtaggaaaagagagaagaatgaggaagaaattgggagagagagaaatttagaatacttttttcttagcttgtaggatttcagcctcctctctatttgtggttaaaaaactaaaaagaatgaaatgaccagtattggccaaaccagaacaattattaggcatttcccaaacattacatttaaggagcaaattatgcaatagccaaaaaaagaaacaccaaaaagcagaaataaaataaaataggtatatggttttacaaaataaaatggaattggatttgaaagactgacctgcttgtccacatcattagcaagttgtccttaactaatttcacattattttgttgtttttgacctttgagttcactgaaccagtcctgtttcttattgccatgagactaatttctgacatattcctcttgatttattaccgacaaactatgactaaaagtaggcctgtgctacatttccatcatctggaaatgataaaaacttgcaaaatgtattttgagtattcatatattcaactgttacccaccagttgaatagtttcatcactcttgaaacttctatctcctagaccccaagctttaatcctacgacttcttccctttcatactgcatctgctcttcatattaattatggtctctgaacctttaattcaactttattttccagtttgtttcctgatgatgttttaacttatacctgaattggacccagtaaagagttttccctggactactatggcctgttgaccttccatgacatctgctttcccagactcctaacccaggcttcctacttctctgagcagagttatggaaagaacatggtcagtgaagtcaggctgacttgaatcaaatttcaattctattaattagctctttattttcaaatgatgtaacatttctgtccccatcacctactctaaaaggtgaagatagtaataccttcttcagagtgattgtgtggtttagatgagaaggcatgtgaaaagtgctctcaatgttagccctcttcctccgactttacctcagagcttatggtcattgctggagaaaatacagatttaaacccactagaaattctgaccatctaatccctgttatttatttcttatttgctcttgtttgaatcagagcttctgattgccagcaacagaatccactctagcctgcctgcctcctgtttctctccctccccctcctccctctttcccttccttcctctcccccttttttctatcctttctcccttcctttcttcctccctctgcttcttttctttcttgctaaattcgggtataacataaacatagcctgggggagttttatgtatgtttactctgtatccagcatcccagtgaagacatagaacatctttagcagcctggaagcctactctttgcctcttcctattacatgcctcttgtacccctctactgaggtaaccaccattctttttatcaccagagattagttttgcctgtttttaaactttccatatataggttcatatggtaagtctttttctgtttttgttttcttttgctcagcaatgtcagtgagattattccatgctatgtgtagtggtagtttgtatttttatttgaaattgatgtgtggtattccattgatattgtaatttatctattttttttttttgtatggtcattttgggttttgcctgtaaatagagctgccataaacattctttttttttttttttttttttttttttttttttttttgagacagagtcttgctctgtcgcccaggctggagtgcagtggcacaatctcagctcactgcaagctctgcctcctgggctcaagccattctcctgcctcagcctcccaagtagctgggactacaggcacccgccaccatgcctggctaattttttgtattttagtagagatggtgtttcaccgtgttagccaggatggcctcgatctcctgacctcgtgatccacccacctcggccttccaaagtgctggtgagaggtgaagccagctgggcttctgggtcgggtggggacttggagaacttttctgtgtagctaaaggattgtaaactcaccaatcagtgctctgtgtctagctaaaggattttaaatgcacccagcattctgtaaaaatgcaccaatcagcactctgtgtctaactaaaggattgtaaatgcaccaatcagcactctgtaaaaacacaccagtcagtgctctgtgtttagctaaaggattgtaaaagtaccaatcagcactctgtaaaatggaccaatcagcactctgtaaaacggaccaacgagtaggatgtgggcagagccaaataaggaaataaaaactggccacctgagccagcagcagcaatctgctcggtccccttccaagctgtggaagctttgttctttcactcttcacagtaagtcttgctgctgctcactctttgggtccacactacctttatgagctgtaacactcaccacgtgggtctgcagctttattcctgaagtcagcgagaccacgaacccacccagaggaacaaacaactctggacacgccagctttaagagctgtaaccctcactgcgaaggtctgcagcttcattcctgaagtcagtgagaccatgaacccactggaaggaagtaactctggacacatctgaacatctgaaggaacaaactccagacacaccatctttaagagctgtaacactcattttgaaggtctgcggcttcactcctgaagtcagcgagaccacaaacacactggaaggaagaaactgcggacacatctgaacatctaaggaacaaactccggacacactatctttaagaactgtaatgctcaccgcggcttcattcttgaagtcagcacgaccaagaacccactggaaggaaccaattcgggacacatggggattacaggtatgagccactgtgcccggccccataaacatttttttaaagaagtcttttggtagatacaggtatgttcatttttattgtgtatatacttaagggtgaaattattgggtcttaagaggcacatattttaagcttagtagctacttcaaccaggaagtaatttactgaggggtatcagatagttcacggattaaatggacaaacaatatctatggctgaattttcagaaacaccttccagagtaggagcactgcagagctggcctggtgaggccattgttgcttcagctgacccaaaaccatgctgcctctgatataacaggaagctccaacggtgccatcaaccctgaaaacccactgctggattgaggaggaggaggattaccttgctgcactgtgtggtagagacaacctgagagaccaccacctttgaaaaatgactttcagccaatcttcttgttttaagcccatacttagaaatatctggtacttcaaattcctgagacttgctgtaatgaaacatttatggtgcctcttatttttaccattgcaagagtatgttttagctttctaaagatttctaagtggatttccaattatccttcttcttgctagctttcaactatttattaaaatctcagatcttctccttattcttctcttaactttgctcttgtgccgttttttattgccttattgtcatttggtggagattcaggatacaaatgctctgtgtatagttcacatttttagaagcagaagtctacttactgtatcccttaaaatgctgctctaaaacttatctatttatttttccaaatctttcccgaattctttccttactctaggtctaacagatggcctcagttcctatgatctcagttcaactctccgtctcaaaacttctctaaattgttgtctattttagtgctgtgagaaattagaaggacaaatctgtcctttccagggataattcttttgtttgtatccatagctttctctgggcacttgttccatcccttttagcctgtaatatgcacttttggaattggaggtacaaccgaatcagtgctctgttaagtccttgtggtacagcctctttggaagttgttaccagaatagtctgttggtaaaatatcttctgttttctccaaatttcttgaaatcataactgtcagccacagttttttccagctacaactaatgtaattggttgtcagtcctttctagcttcagtgaagtttttgtagcccttcttaattgtcattaattactttctattaatttggtcatttccctgatggtacctggaactgttgcaaaatcttcatgtttacatcaagcattctttctttgtctctttgtggtggttctagccccagcatactttgttagccattattagtccaaactgtgggccagacatttggtattttctggaatataaaataaatatcagagaaagagtttgcattaagtaaacaaaagccatatctcagaatggtgtggtagctgagattacttccatttggaagcattaaaacatactggcttagagtatacaaaagctttcagaacatggaaagatcagtgtttatcactgttctatagccagttgtgtgtgtgtgtgtgtgtgtgtgtgtgtgtgtgtatacatgcattgaattatagaagcatacacacacacatatactgtttaggtaaattgtttcagtgacaaatagcattgtatcctcggactctgttgagtagtgtgggaattatcttttatctttccttctctactgggtacattttccctaaaaaaatactcaggtcttctatatactgaaataagctttttatctaccttgattcttacaatttttttccttttaaaattcaaacatgtcacaattgaagttttttattcatttatgtaacccttgcttcttgactccttgaaatttgctttttatctcttactgcttcacttaaactacctttattcatgacactactggtctcctaatcctggaatttattgacatctttacagtgttgatctttacttccaggaacatttgtcactcttgtcctgcctcttctgtataaaaatctctctttgctcatcttcctctgcgttttagcgtcctagttttcctatatttctacatttccccttgtcctttcttttaaataaaaccatttcttcaaatcctgtatctcctctcttatacttattcccatccccatgctccactctttctttgtatgtttaaacacactccaccatgttgtcttcaactattaccactgtgtgaacatctacatttgtcctgatctctcttaggatctccttttggtatttccagctgcctgactgatttctgcactcaaacgtaatgcagtatctttattgcatgtctgaaacaaatttacttttgatcttgccaataaatttctctttttgacgtccttgagtaccccattctctaaaattctaagttgtcctcgtctcctctcctttcttgctttcctgtgtttttattattatactttttattgatacataataattgtacatatttatgatgtacatatgatattttgatacctgtacatgatgtgtaatgatcaagtcagggtattcaggacatccattggctcaaacatgtatcatttttttttgtggtgagaaaaattcaaatcctctcttctagctattttattgttaagaaacaacaaaatttgaccctaaatcaattaaggataaaaggatgaaaattttaaagactcttctagagaaaagatgttagcagagttttgaaggggattaaagggaatcaaccaagagggaaaatcaaggttgggcataaaacagggaagtgagtgattcccagtggcaaggagacttaaaggaatctggagtcaaaggaaattgaacattcagtgttgtttatgtttccgtgatttaaacgccctccatctctccaagtctgacatacattcttctcatgtgcatgttttagagggaaaaccaagaagtcttatgtgtgggtaaaagtcttggtttggtattactataaaggaataccagaggctggagaatagaaaacagttttatttgactcacgattctgtttgctggaagattggatatctgcatctggtgagggccacaggctgcttccccttgtgctgaaagataaaggggagcttgtgtgtatatcagagaccatttcatgagagaggatgcaagagagagaggagagagatgacaggctctttttaacaatcagctcttatgggaactaatagagttaaaactcacttactcacccctgcctcctcaaggaggacattaatctattcatgagggatcccctcccatggcccaaacacctcccatcaggccccacctcctacattgggaatcagattataaaatgaggtttggagggtcaaatatccaaactttggccatgaatagggaacagaaactgtaggtgagggactaaagatgagaatgaaattgagtctgagtaagagccagaagttcaagccaagacattatgttggaactccaagccagaattttccaagagaaactacagtcttgggaacacagtggcccttttgcaagatgtaggagaaagacctctggaaaattttacgtatttctcaactcaaagaatagaatgactttggctgatatctaggttacacatataagcacccaattaattggaaaaaatgggaccagcttaggacatcataaagaaaagcattctgtacatgccattcctttcctcttttactataatgactgaggaaaatgtgttgaaataaaaaataaacaaacaaaagatgccgctttttaggctgaaggaccttaaaatcttagcactgtctcttttatggcctttggtaaatttcctacaatttaaatttgtttttctcatgagtaaaataatcataataacatgtcatgccaaggttatgcagggcacaacacctggaagatagaagctacttaattacttgttaccgcagttatttctttttttcttcttcaacttgaagttcaggggtacatgagcaggatgtgcaggtttgttacataggtaaacttgtgccatcgtggtttgctgcacaggtcatcccatcacctaggtattaagcccagcatccattagctattcctggtgctctccctcccacagcctatcttccaccaagccccagtgtgtgttgattccaaccccatgtgttcatgtgttctctttgttcatctcctacttataagtgagaacatgcagtgtttggttttctgttcttgtattagtttgctaaggataacggattccagttacatccatgtccctgcaacggagatgatctcattcctttttatggctgcatagtattccatggtgtatatataccatgttctctttatccagtctatcactgatgggcatttaggttgattccatgtctttgctattgtgaatagtgctgcaatgaacatatgcatgcatgtttctttataatagaataatttataattatttgggtatgtacccagtaatgggattactgggacaaatggtatttctgcctctaggtctttgaaaaatcaccacactacactttcttctataatggatgaactaatttacactcctacaaacagtgtaaaagcatacatttttctccacaacctcaccagcatctgttgtcttttcgactttttaatattagattggtgcaaaagtaattgcgattttgagatggtatctcattgtggttttgatttgcatttctctaatgatcagtgatgttgagctttttttcatatgtttattggccacataaatgtcttcttttgagaagtgtctgttcaggttctttgcccactttttaatggggttgtttgggttttatttttggaaatttgtttaagttccttgtagattctggatatcagacctttgtcagatggatagattgcaaaaattttctcccattctgtaattttgtttaagttccttgtagattctggatatcagacctttgtcagatggatagattgcaaaaattttctccaattctacagaatggagaaaattatttgtttactctgatgatagtttatttttctgtgcagaaactctttggttgaattatatcccatttgtcaatttatgctttcattgaaattgctttcagcatttttgtcatgaaatctttgcttgtgtctatttcctgaatggtattgcctagattttcttgtagggtttttacagttttaggttttgcatttaagtctttaatctatcttgagttaatttttgtagatggtataaggaagggttccagttcaattatctgcatatggctagccagttctcccagcaccatttattaaacagggaatcctttccccattgcttgtttttgtcaggtttgttgaagatcagatggttgtaggtgtgtagtcttatttctgagttctctattctgttccattggtctatgtgcctgttcttgtaccagtaccatgctgttttggttactgtagccttgtaggatagtttgaagtcaggtagcataatgcctccagctttgttctttttgcttagaattgtcttggctatttgggctattttttgattgcatatgcattttaaaatagtttttgctaattctgtgaagaaagtcaatggtagtttgatgggaataacattgaatctgtaaattactttggatagtatggccatttttacaatcttgattcttcttatccatgagcttggaatgttttccatttgtttcttctctgatttctttgagcagtggtttgtagttctctttgaagaggttgttcactccccttgttagctgtattcctaggtattttatttttgtagcaattatgaatgggagttcattcatgatttggctcttagcttgcctgttgttggtgtataggaatgctagtgatttttccacattgattttggtatctcgagactttgctgaagttgcttatcagcttaagaagcttttgggctgagataatgggtttttctaaatacaggattatttcatatgcaaacaaagacaatttgacttcctctcttgctatgtgaatatgctttatttctttctcttgcctgattgtcctgtccaggacttccaatactgttgagtaggagtggtgagagacggcagccttgtcttaatgccagttttcaaggagaatgcttccagcttttgcccattcagtatgatgttggctgtgggtttgtcatatatggctcttattattatgaggtatgttccttcaatcctagtttattgagagtttttaacatgaagcaatgttgaattttattgaaggtcttttctgcatctactgagacaatcatgtgattttagtctttagttctgtttatggggtgagtcacgtttattgatttgtgtatgttgaaccaaccttgcatcttggggatgaagccaacttggtcatagtggataagctttttgatgtgctgctggattcagtatgccagtattttattgaggattttttgcatcagtgttcatcagagatattggcctgaagtttgttgtggttgttgttgtatctctgacaggttttggtaaaaggatgatgctggcctcatagaatgaattagggagaagtccctccttttcaattgtttgggatagtttcagtagaaatggcaccagctcttctacctcttgaagaattcagctgtgaatccgtctggtcctgggcctttttttgattggtaggctatttattattgcctcaatttcagaactcgttattggtctgttcagggattcagtgtcttcttgattcagtcttgggatggtgtatatttccagaaattcatccatttcttctagattttctagtttatgtgcatagagattatagtcttgtctgatggttgtttgtatttctgtggggtcagcggtgatattcctcttattatttctgattgtgtttaatacttctttattagtctagttagcagtctatctattttactatttttttaaaacagctcctggattgatattttgaagggtttttcatgtctctccttcagttcagctctgtttttggttatttcttgtcttctgctagctttggggtttgtttgctcttggttttctagttcttttagttgtgaggttgtcgatttgagatctttctagctttttgatctgggcatttagggctgtaaatttcccttttaacactgcacttcagctgcatcccagagattctggtatattgactctttgttctcattagtttcaaagaacttcttgatttctgcctcaatttcattatttacccaagtgtcattcaggagcagattgttcaatttccatgtagttgtgtgattttgaaagagtttcttaatcttgagttctaatttgattatgctatggtttgagaaaccatttgttattatttcagttattttgcatttgctgaggattgttttacttccaattatgtggtcaattttagagtaagtgccgtgtagagataagaagaatgtgtagtctattgtttttgggtggagagttctgtagttatctatcaggtcctcttgaactagaattcaagtctagagctgagttcaggtcctaaatatctttgttaattttctgtcttgatgatctgtctaatattgtcagtgaggtgttaaagtctcccactattattgtgtgagagtctaagtctctttgtaggtctctaagaatttgctttatgaatttggatgctcctgtattgggtgcatatatatttagaatagttagttcttgttgaattgaaccctttaccattgtgtaatgcccttctttgtcttttttatcttccttggtttaaagtctgttttgtcagaaactcagattgcaacccctgcttttttctcttccatttgcttggtaaattttcctgcatccctttattttgagcctatgtgtgtctttccacgtgagatgtgtctcctgaagacagtatgccagtgggtcttggctctttatccagcttgccattctgtgtcctttaattggggcattttgcccatttacatttaacattagtattgttatatgtgaatttgatcctgtcatcatgatggtagttggttattatgtaggcctgtttatgtggttgcttcttagtatcactggtctgtgtacctcagtgtgcttttgtagtagctggtaatggtttttcctttccatgtttagtgcttccttcaggagctcttgcaaggcaggcctggtggtgatgaatggcatttgcttgtctgaaaaaggatcttatttctccttcacttatgaagcttagtttggccagataggaaattctgggttggaaattcttttctttaagaatattgaaagttggcctccaatctcttctggcttgtagggtttccactgagaggtccactgttagtctgatgagcttccctttgtaggtgacctggcctttttctctggctgcccttaacatgttttctttcatttcgaccctggagaatctgaaaattatgtgtcttagggctaatcttctcatggagtatcttactggggttctctggatttcgttaatttgaatgtgggcctgtcttgctaggttggggaagttctcctggatgataccctgaagtatgttttccaacttggttccattctccttgtctctttcgtgtacctcacaagttaagacacactggcttggaattccaggcagacaatggcaataggtaagaatctgcctgagagggaaaccagttcctgggggaaggggtggcctccatctctacacttctgtaggctcagacattccaccctgctggtattggagaatccaaacagtctggaagagcacaactgccttgccagatcatggccaaactgcttctttaagtgggatcccaatccattccttctcactgggcaggaccagtgagtcatagtttggtctctttacctaatcccatatttcttggagttttgtttattccttttcattctttttttctttaatcttgtctgcctgtcttatttcagaaagatagtcttcaaggtctaagattctttcttccacttgatctatcctgctgttgatactggtgattgcattgtaaagttctcgtgttgtgtttctcagctctatcaggtcagttatgtttctctctaaactggctattctatcagctcctgtattgttttatcatgattcttagcttctttgcaatgggttacagcatgctcctttagctcagcaaagttcattattacccactttctaaagcctacttctgtcacttcagccatttcagcctcagtcctgttggccacctcttacaggaacactcaggacagcaacaggtcagtagccccctgggacagagcttccagaggaaagagcaggtggccatttttgctgtttcatggccttcactggagatacctccaggtataggaaaaactgaggcaaccagttttttctagttgttgggatgtctcacccagtcaggaggaacaggatcagggacctgtttaaagaatctcagtctgattgctttttggtagagcaggtgtgctgcactggggggacccttcctcgtccagactttctgggttctccaaatccggcaggctggcatggcttagccagctagaccacagagatggtggctgcccttcccccaaggagctccatatcagggagagatcagagctctctccataaaaccctggctgaagcagctgaagcctccacaggaagttcccgcccagtgaggaggaatggattggggtcccacttaaagaagcagtctggccaccctgtggcaaggcagttgtgttgcgttgtgggggacccttcctcctccagactgtttagattctccaactccagtaggctaaaacgtctgaatctaccgaagtgcagagatggaggtcacctctgccccggaggaactgggtcctatctcaggctgactctagcctgcctagcattgccattggctggctggaattccaagccagtgtgtcttaacttttgaggtgccatgggaagtggggcctgcagaatgacactccttgactccctggattcagcccctttgctgggcatatgtacaggcagatctccccccttgccagggatcctggagctggggtacataaagctcctgggtctttgtgtgtgcccaagtagctgttctgctgagactccacacagctttgtgtatcggactcaaggtcctgatgacatgggctcacgagaggatctcctgatctgcagattgcaaagatccgtgggagacacctggtttcccgggatgtggtttggggttcatttggctccgtggtgctcctgggtgggccatcgccccactttgcttttcttcattctctatggattgagttgtttgcctagtcagtcccaatgtgagaacttggatattttagttgaaggtgctgaattcactcgcagctttcattcctcttcgtgagtgccacagaccatagctgcttctcatgggccatcttggtccctccccttcattgttatttctactaataaataagaatagttatcattatcatgtacttcatatgtgctgggcactccttctagcactttacttgatttgtctcatttagtactcacaacaacctcataaggtaagttaaaatatctgtatcttacagatgatgaaatggagacaaggtggtggacaactttcccaaggtcacatagtcagtgtccaagtcaggctgtgaaaccaggtgaagcctgttctctctacccagtaagctatggaagagcataataggtctagggatcatcaaggtgaactccctctgataaggtggccttcagcttggcatgaaagtatctagaaggtttactgagtcatacttcacttctaaataaacatagggaggcaggaataccatggtgatcagggtaagaagaaaagcagtaagaatggatagaatggtagaggcttatgcaaggctgtagttaggagtaatgtggaaaagtaacttgaggtgagaagttcaaaggtgtaatgggggtgagtttggagaacagtttattaattttgacttatagaatatcaacagattgtgtgtatgttgggtcgatcagttgattgactaaagttagctcaaaaattgtacgtcttacatcccatgaggccaaatcttagcagctggattattcagtgcttatgttgtgaaaactgagttcttttcctgatgacccagattagagggattacacaggcaattagctggaagcaatccagagcaaagactaagtgatgcaagtttactctacctaccccttaacaagatcatataagttcatatagagaggagaagagaatacaaggagagggaaaaatgggaaggagggaaccagtgcaataaatcaattggttacacaaaaaagccatgtgcatttcagtatctctagttttgcccacatactcctgaccagcattttctctgcccatggctagtttacttttctgggctgcatgatttcatcaggtcaaattaattctgcccctttccatacctttttggccacgttactggtaacattaagcatcaaaccatacactgcctgttattattatggatgaagacttagaagtcatgcatttgagctcaacgacatgggcaagtatgtgtatttatccccatttccagatgcaatgatggaacacatcaaggctagttctttgacctcatgctgctatatttgatctgagctgaattgtattgaaacaaaacactgtttctatattgcattgtagttatctctttatgtcaccatttctcccatttgtgtgctgcagctgcagagcccagcacactggtaactggcactaagtagggtaaatgcttactgaatgagtgaatacaattatactgaagaggagctgaataaaaggtgaacgtaaggtgttaccggctgaaataaatattcagaaatattctgacctgacccaacagttgtctagataaatttgtatcattggtcccacaggattgttttcctttagttctctctcatctcttgatctcacttacatacttgacatttctttccaccaaacccatgccctggcttttgctgcatcattacaccagcaaatgttttaaactcagtactgtgagcagtgtacaatacagcagtaatcccatgaggataagaagctgacttttcagaatatgtcctagttttgaatcagactaattatttaacaaaccataaaaacagcaactaaaatcattgacatatagtctttccttttcataaaataattgtgttctctgatgaaagaattttaagccctcagctgtgttctacacttactgctgtaggggacattagaaataatttagccctatgatgacagagcttaatttttttctccttagtgttaaattctactctgaataacagttacgaagctaatgctaagtcattattttatgataaaataagatcttcttagcttacaaggttataggatgcatggataaagtgttacaggatgaaaaactgcataaagattttcctttcctaagaattgtttctcttcccccacaaaattactagaaatgacatacttaagtaaaaatatttttcatccaaatgtgtctaacataacttttaaacactgagttcttttataaagtgattatgggagacacaatagattagcaactttttgttttcattttactccttctgaaaagccctatatgtcatattttttatttcaaagccctgaaaaccaaagtgagattgacacatgccagtgcgtgttaaagctggtgatctggaacaggtgcttatgcaggtgatgcaccatttcagccctcagaaggctccattctttgtctactgcctgctgagccccccagatcacttctcagtcagcttgtggcatctctttgccctttccaatgccccacagatcccagggattaaatttcagcttcattcattcttaactctgccctggggcttctttttcccccaaatatgcttgtcacagagttacaggctttccttctctttccttcttttctgtttccttttcagcacactgtaaaatgcaagtaatctctttcatgtaaacaatcttaatgttaattattaaaaagagagatactggacaatgaaaatgacacaaacatgcacatttctcagagtcattgagatgaaatatgagaaagagtaacttttatagggcacgtgacaagctttgatcgaatttcaaaggaaggctgtacatactgtgttgttttgtcattcaggtcacaaaattcttaaatctaataaatagaattcatttggttaagaaatttatattcaataataattgaaggagttcttcaattctggacttgtaaagcaaaaggatttgttaagaataattaaattgacactctgtaatgagaattgtatgctgttccgtaattatggtcagagtataaatggtcaacggcatatttgataataacagctataatttaattcatccttattattgtgggaattatactaagtgataatgatcttccccacaatcatttgataccacacctgtcccccaactcttaatagatggtcttgccaccagattccacatggagaaaatagaaatcaccttgatttcccaccactgaccctgcttatttttgtgaatctgtattcatcttttctttgttccttcttatcacagttgagatggtgtccctccctttaagaccaatccaatagtcttctgctaatgtttaacaaatagccttctgaaaaaagaaatcctgatttgcaacatttgctgatttctgtagtgtaaaacttaccaccatggctgattttaagctactaatatgacatcaacacactatgcatggaaagagatgagcacataggctttgcatctagtacaactcagctctagcccacccctgcctcaatccctcttgtcttctgaagaagcagtagaaaatggtagatccgtatacagactttatagtcaggtttgcctgagtttgtatcctggttctaatccttaatatgtctaaagttttgaacaagtcataatttttctgtacctcaatttcctaattggtaaaatgatgattaataaaaatacaccctgtggtgtatagcaacattatcctctcaatctgtaacaaaaggataaaatatctttgaagtatagtactattattaatatccattttacaaatgagggcattgagaaactagaactactgctctaattctttctctttatttaaccaaattttatttcatttcctcctctcccacctactcctcaatacattccaaactggcatcagtacccactctgcatacagatttgactttcgggaataagtttaatctcaggttgggttttctggaaacagattttagaaagaggtttgtatgttggaagtttatggagagtactttcagaagagactataaagaatttggggaggcaggattgaaaaggagagcttgccaaactgatgcatttgtaccagaggcctttccagatctaatgggaactctggaactggcatggttcttcagagtttttctgaattgatgtaagagggtaggtcctttgtctatagttgtattaaccagcattaaaatagaaggggagaaaccttgggtaaggaggttccctttggcacttccaggagagaaatacagctgtgaggccccagcaactaacaaacccatcagtcacctggggaaatgaattcctcttttagaaagatggcatgggtgaatatatccattggcctgctcagatccatttgcttcatatggtaagttcaccacactgaggagtagttgctccaagcttcttattggtctcatttcttgggaaatcttacacaatgaatgttaataggaagaactagagctccagctgttatatctagtcttgagaccacaactgattttcatacccattccctcatggtgacccaaagtcaccatgtccttctcgggctatggttgctggacttgtccatttgcccagttcatttacagttgggcagaagagtaccaagagatgtcccagtggatcacttgggtgccagtaacactcttccctatccacattgtgtaacagtagccccacttccttctgatcaaggtcaattacctttgtcatgtgacaactcctttccttactttttggtctcttggtacaatggacctgaatttagtagccataactcaaagttaagtggaagtcctgctgtgtcttctcatgaaagaatttcctctttgggaattagggtctctagacccgtaatgtctaaacttgtggtagaaaattcccaactgagtcactaggagggatggtaagtgaggccattcctactttcacccctttgccgctggtcccatatactctacctactggaaacacagcaccatataatgctcattgtttaggatgtataattaatcctggtagatgatgtcccatccttttagggtctcacctccatttggtgctttagctgcaccttggaaagattgtcttgttgttctatcaggctggaagctactagttggtatggtgtggtataggcttagtgcatgccatagtcattgccatacctctttttctataaagtgagtctctttgtttgaggtgatgttatatggtatttattgtcaattgagcagtactctgtaggctcttagacagtagtgctgcctaaagccctgtgggcagaaaaggtaaaccagtacccaaagttgtgacaagtctagttgagataaatttctgctcatttgagaatagatggagtccaaactaccttttcaccaagtgcttaaggagtgatactatattgggagctcagtgtttatttctgctgctggcaagttgaccattccatagaagaagctagattatccttagtaagttgaagctcatactgttggatccatgtagagtctctatccctgttaccatggccatggcactcatgagtgattatgccagcaataacagaccctggctgacatcaattagctgactcattctgcctacctggttgtttagtgcctcttccatggttctcgggtgggtgttaacatgtgataaagaaagcccacagaggccagggtgtgtggctcatgcctgtaatcccagcactttgtgaggctgaggcgggcagatcacctgtggttaggagttcaagaccagcctggccaacatggtgcaaccctgtctctactgaaaatacaaaaattatctgggcgtggtggcatgcacctgtaatcccagctacttgggaggctgagggaagagaatcacttaaacctgggaggcggacgttgcagtgagccaagattgcaccactgcattccagcctgggtgatagagtaagccaaaaaaaaaaaaaaaaaaaaacaaacaaacaaaaaaaaaaacgaaagaaagagagagaaaaagcaagcaagcaagccagcctacagaaagcaaacagccttgcagactcttctagcatccttgatacataggaaatcatgcagccagatgacaagcccaatatttggttttcagagaaccagccccagcatcacaaaacaaagtaaaggtgagtgggtttggagttgaagatctatcccaaaataacagataggaccaccactctgcatactttaatttttaatggtgagattaatctgtcattactcactttgatattgttttttaaaatttgcaatctcagttttggataggaaatcaattccaggagtttacacacggtcttggcaactctgagagctcttatatcacatgtcactgaatcaacatagggttactgccaattacgaagtgtgtccagtttgagctttcattcaggtagtagagaaataatcatgaacagagatgacctactctaatcccatgtacccctcactctaatatgggtgtcaagataatactttaggttgttagatatccacagcaattcagactcttaccaacattctcaaaagttctgactattacctggtatgtgtttacccaaataaatgaccataggtccctttggagaagaactaaggagaatccttaccttatgttattgttatagaattaaatggttctttcccatgagaatccaaaccctttttagttaatgtgtttcaagcctaagatctaccttaggtttggaaactgggtaagtcatcaatatttttgggagggtcatttgccctcaaccttccaattatcatattcaatttcttttggttataaaaattaaacaatatttttctggttttccacctatttttatcctagaacaccacattctattaaacatttctgtagatctctgcaggtcaggatccctggatgactctgaccttgtcatttgttccaaaaattgcacctgtttctgacaccaagctttgttactctggggtcctatcatcactggtttttgtaacagcacctcctaccttcagccctgggatccataagacaaccgtcactgagcttctcaatcacgttaatacttctctcaccagcatgctctgtattgctttggtaaatccaatgtcctctgggccctcacatggatcatagtcagctaataaattttctagattaaatactacattcattctggcatggccacttctctgctcgttttagtctttcctaccactgactgctatggcagtgctagcattactacttcactgttttatcaccatctcttgaggtgtttgccagcatattaaatttcgtgttacaagagagggttgatccaatattgatatactctcccttatccaagttcatattctgttctctcacccccattttcatacagcactttcaggatcctatatacactctcctgattcttgccagttcatgtcctggagaagatactagagccctacatttgtataatacaccttccctgctggttatactgtgaattagccctagtcattggcctggagaccaggaggcgaggtgcggctaaatcttgatgggcacaaatgatatcgtgtatgatggtcggttttatgtgccaacttagctagactataatcaacagttattaaagcaatttctcatcaaagtggtgctgtcaaggtattctgcagttgtgatgaaagtctataaccagtttactttaagccaggaaaattaccctacacaatctgggtgagtatgattcaatgagttgaaaggctgtaagaactgaactgaggcttcccagaagaaatttcacctgtggactgcagtttcagtattgcttgaaagttccaatttgccattcctgatagcctgccctgtacattttagacttgccaagctagttgtcacaattgcttaaactaatttcttgcaataaatctcttaatgtatatttcctacgggtctaatttctctgatggaatcctgaccaatacatctttcatggcagagaccttgcatcatcttcaacaaaggaggcattgctagccttaaatagaaacaaattgtccaattctccaggtccggaggactcagggactttaaggattaataaatctccagtgcacttgcccagatgtctttatcccaagtctcccgaccccactctttttcaaaaatggccctgaccttggtatagcatacctgagggggtggaggactcaacttactctgcagttgctctgttgttgtaattaatcgtgggcccaaccttcagattattctactgtagctgcagggaatgggagactctatgtatactactcctgatgtcctaagaatactttaaccttatatccacgaataaacttatctttcccttcaaatgtgactttcttctattccataactcttattgatgagtctaccatctatcaaattctgcaaatagaaatgtgggagtaattctgataaattatctccttatttacttttattttttatcagcttctgaatgcagttagttttgtcttccaaatacttcttgattccatctactttcttttatttctctcaccacaaatattctagcctaagcactgccatctatctgctagattactgttatagcttctaactgatctcgtgtccactcttgctctactccaatcactgccccacaatatccagaatagtctttaagaagttaaactctgatagactggattaagaaaatgtggcacatatgcaccatggaatactatgcagccataaaaaaggatgagttcatgtcctttgtagggacatggatgaagctggaaaccatcattctcagtaaactatcacaaggacaaaaaaccaaacaccgcatgttcccactcataggtgggaattgaacaatgggaacacttggacacaggaaggggaacatcacataccggggcctgtcgtggggtggggagagtggggagggatagcattatgagaagaacctaatgtaaatgacgagttaatgggtgcagcacaccaacatggcacatgtatacatatgtaacaaacctgcatgttgtgcacatgtaccctagaacttaaagaataataataaaaaaaagaagttaaactctgattatgtcactctcctgcttacaacttttgtatggcttctccttgctctttgggtatccaccagaagctgtatacccagtcaaggccctttagtgatctcctgttacccttgctacactctgcccctccctcctgtgctgctacagactctcagttccttgaaagtgcccttctcccttccaccactaggcctttgtgtgtgctgtgccctccccttgcaacacctgtgtcacatttacccctttcactagctcttggtcattgattacatcccaacataaccatcactacttcagggaaatattcttattgggcaaattgatagaaagggcttgaaagtcctttaagctgaaagaatctcctcttatttgcaatcaactgaaaatggatcctttatttgtgaagcatcctcatggctcttgcttgtgttacaccattgagcatttccaggcaaatgtagaaaagggcattgctgtttaatcacttcctgattaatatcatatagattacaaatgctctctaaagtgctagccaagtaatactcctcattcatatttcacgtgacaaaagtccctgattcttatgcagataaagatcttattcactcttttgtaccaagaaaactgggagtaaagtgaactggaggtggttactctcatttttactgctcttcctttccttcagactgaggtctgagcaaacataaatattttgttccaggtttctatgcctgatacaactcatgtttcctctgcctgaaattcttccctttttgaatcaccctgtgtactaccacctgcctacagccccccaaagtgtgcacatatcttagattttcaaattctatccatgtttattttttccatgaaagttgttttcattccatgtcccaacctcgtcctttttttcattccatgtcccaacctcttgtcccagtaatccctttgatcacaattcacactattttccaaaactctgctatggtaggctcatgtatccttctttttattttagcctcttgtgtgcaggctttattataatgtttgactttcaaaaattcctcgctgtaggggccgggcgcggtggctcacgcctgtaatcccagcactttgggaggccgaggcgggcggatcacgagatcaggagatggagaccaccctggctaacatggtgaaaccctgtctctactaaaaatacaaaaagtagccgggcgtggaggcgggcgcctgtagtcccagctacttgggaggctgaggcaggagaatggcgtgaacccgggaagcggagcttgcagtgagcagagatatcaccactgcactccagcctgggcgacagagcgagactccgtctcaaaaaacaaacaaacaaacaaaaaaattcctcactgtacgtggcacagtgccttgctcaaacaaggtcatcaataaatatttgttgaataaaaaatttaatgaatgaaaaatgttggtgaccagtgaggaatcaaggaccacacaggagccagggcaaataaataaagcagtgggttgaaaaccagataaagaactcaaaaggcagagaacagagacacctctccaagaaaagcagaccatgggaccataagacaaagcttaacattagatgattccgttgaaatggctgaaattgtaggaattccaaaatcaggatcaagttaggtgacgcgtgttgagtcataaaaaaaactctgcttaaaagaggatgctggttggtttaaattatttaagttattttgggtagttttgctttcctaatctaaagtcagggaaggaaaattgtgtttcctttgagtgggaaggcagctgggaagttatgaggaaaagagagatttttagcaataaaaccaatcttggggagtagaatgacagatttaaaagagaaaacagtaagattttttttgtaaaacttttcaaggataaacaggaatgtaatctctcagaaaatgtgagatcccaaagagagagtatagagtaaaatgattcagtggcatggtattagatgaaagcctaaagaatcagaagggcttgctaatacaagaaataaagcaaaaataaaatttccatgaagctttaggatttatactttgttatccttcatctgtatttttggtttgtattcaacactttctggttgactgaatttaattttcatcctgatgttctgattttatgtaggcacagtttaaaaatctactgaaaatagtaccaaatatatcttcaaaaacttgactgattcttctaggttttctttcgattacgcagtcactttgaacaaaaggtattaaaagttagaaaatttagacttcaaatgactataaccacatcattcaatcttatagtccttagattcaaagagtcaaataagattaagatctttatttgacattaaggcataccaattttcaatacctcagttcacactaatacatcttatgcatgagctcatctcttctttcatattatatgcattctttgctgcttgtaaaagtttctcaacacaaggctcattgtattctatcactcttatattctaggatgccagcacccaaatagtaatgatctcatagttgatgaatcaagtcttagatgtagtatgaaaaggacaaattattgctaggagaatcaggaacattaaatgcaatggtattttcaattttgaattatacatgcacatacaaagagaaactcaattttgtgtagtatctgtgataatatgtaggaatgcctttagttttgaaggcagacttaatagcctgcatgtcatttatgtatcaaagtaaaaattaaaagcattaaatataagccaaatcactgcagtgattattagaaaaaactattctaaattgcaaagcactattcaagaaacaagaaagctttggttatagcttggcattcaggatagttgggtagaatattgcatgaatctgttaaatgtcagaggagaatgagaatagctccagcaaatacttttcttagtctgtaacatacatgtttttttttatatatagtattttaaaattttctgttacctagcaccaaagaattcttatttatcttttttgctggataataatcttaggatatatttgtctttcttttgtctcctttttctttcttttctttttttcattttgaggcagaggagctgaaataaacattagcttatagtgccaccataaataaataacttccagaattatctgagacttcttggagaaatagttctcagaatatctattactgtcatccctccatatacactggggattggttccagaaccactacagtacacccaaattcatgcatactcaagttctgcagtcagcatcacccaatctgccaatagggaaagtcggccctttgtatatgcaggttttgcatcctgcaaatactgtatttctgatttgcgtttggttgaaaagttaacctataagtggactcttacaattcaaactcatgttgtacaaaggtcaactgtatatttaaagtcccatggaatcagtgggacttaactgttcttatataacaataaatgtttttcattagggtgcaaagattatgtgaattggtcattttggataattgttctaaccatggatcagtagaagaattaaatgcacatgggcagtacattgtccaggcctgaaaactttctgaaatgactatcaacattttatgtgtggtttttatattatgccaggccaaatttattttattttaagtcttaattttatcttttgcggaattacatatgcacataatttgagtcaaagagttgtacaaagtttgttaacaaaacagcagtgtcaactctttttctttctcttttcctcactagaggcaacacttttacctgcttcagttgattctcttggtgtcatgtgtttaaacatggttttaattgttactctctgatttttcatttttagccattacctattgaatttctattatgtatgacaaagatgaagctctcttttctctcctagccttcaccatcctcctcaaatactgtgattctgcttagacgaatattcaacacttatattactataactgtacaatgcaattcacagagaagtcatggagtaaactattatttctccttttctatgcagctatttgttttcaaaggtgtcaattatcatcctttattttcttttgcttaattttctaatgtgcttattgtgaatcattctgaaacctttttggcaaacttttccttaaaaatattctataaatcattgacgcttttaatccttacaccttgcagtctcttttacaactatgcaaatctgctattgtagattgggcccatgggctgtatgtagtttgcagttcctagagtaaatcatccctcaagatgttcagttgcttcagatattctattaatttttttttctccagagaagtttctctttgagatccctatactgctttctgtacctttgccataggcgccatcctggggtctccctcgcaatgaccctgggatttcctttgcctcgtgtctctcgtgggatctcctgtttcctgtatctcatatttttctttttcttggctaatgcccttgttttggtgaaaaaccttttccaaaagcttttagagaagggacacagatgaaataatgcaaattctttattaacgtgattttccaataattcactatgatgtgagatggttttatttgcttgcttgcctttttgtcacactttccattagacttaccagaatttgaccaagaaaaactaatgaatgctaaattaattttatgtaaaattttgtttgtttttttttttcttttaaataagatcaggaaacaaaaagagtcaaatagatgtctgggacttgtaactacaatactctactgactcattttagttttgatggcaaggaatgtgaggatggtaatatataaaaatgggggtgaaattaaattaacagtaatttgttttttccataaacttgtgatagcttcagaatgacctccactgcaatcctcattataatggtggactaattggttcatagtatgctccggctaggaagtttcagggaattaatattgatgccttagatatcaacatgtttccctgagaagaagggttttgctgcacattttagggtctttcttaataaagaagaaattttataaaattgaaatttgtttataacacttatagtaattgattacagtattgaaaatattttaaagcaattgatttttgacaaagaaataaaatacttaaaatatgttaaactaaattagatttaaaaataattttgtggcaatttgtttagaaaatcaaaggggaatgcatggtattcttgtgccaagaaacctggtttgaaatgggtttctaaagaagagagtgcttgtgttcccagagatctcttaagaggtatgttcagaatattaatgaattagatgggaactatccttgagcacactgttctgtactaacatacttggtggctcgtttgaataaagaaccaagtagaaacatggagttcctgaggctgatgggtggctttaactttgacctttgtggccttagtaggtttcttttcccttaatgtgatttttttgtcttttaattttaggtttaatatgaatgtggatatgtcatgtaattgtggctttactatggtaactgcttggcataaacagacctcaaggcagttgtacctataagttagactcatctttcattagaaattttgcataatctatttttaatttatgccctttcatatgggttgaaagtaggcttaacatccatctcactactcaaccctcttcatggttaagaaagctatgaagcacatgaaagcccctttgttctgagtgtgcctttagctttttgattctatctttgtaaaacttctctgaaaagactatttttaattctactctttctttcagatgtaagcaatataattccttggctttattttagaaaagtattgaatgcatcatacccagtaaactaagagtctacttttgtaaataatagctttaattactttggggtgaaaaatcactctcatatttggcaaactataggtaaaattggatctcatttttctggaaggtataactgacttacggaggctgcctaagagtcatataaaaatattgataataagagtcacacattttaaggatgtggcttagaaaaacatagcctactcctaagtgtgaaaatgaatgaagaccattgaaatgagaataagcataggctatttatttaaagcttgctatagcaaggaagtcagccaccatcatttgcatttggcagaaactcaaaggcaggtagtgaagtggaaaagctttatagtgggaaaaaaagcaaggcttcaggtctgcccttaatggaggctgttggcaggagaagctggaggtctactaactcatggggcatcctataagattggttaggggagcaatatttggctttctcccattgatcgcaagttggaaccagggacaaaagttaagaagctgtcaattattgatcaagtcctaaccatttttggaccaagtgctacagaggttgtggtttggcttcctggactggttacagcaggttatgggccagagttctattttaatatgtaatctagcagttgtgcatcttatgttcagtctcttacaaggagccagaaatgtctctcattcgatgacaaattataaataattcacaggaactaacttaaaattcaggataattttccaatcatcatattgttctaggtattttttttcttttcatcagtaaagaaaaacataattgatgtgctccttttccagttaaggagaattcttgacaactattacaaatagttatagagtcaaaattaatttttgatttagtaatattaaaaatcattaaaataatttaatcacaaaaggctttcccttgcttctgtgaaaggatgaagatcctctcatctgtttcaaggtctgtaaacacagtgtgctttgaatttcttataagaaaacttctattgcataaaaccaagcaaaggctattctctatacacttttttcattttgctttggcctgatattaccaatggactttttgcaaactactaatatatttactcttcaatgtcaaatggtcctcaaatgctacactcttgtcactggatctaaaaatctgttgtgttagatataggcaaataaaaatacaatacaaaaaaaagtgtgtatacaggcaaattatgctaatggagttccacttttttgacatagaacactctgaaatggcagttaatggtaattaataagtgataagcaaaacaattaaagtcagtctgcaactaacctcgccagactgctaatgttgctctgactcccaccaatcagtcaagctaattaggaggatcagacagtcattaatagcttttgtctctgagacaagtggcatattatgaatactgtagagttaaaggggctgcactgaggtgtgactatcccaaaggcagaaaccaacagcaaaagagaaagtgcttctccaattgtttcctcataggctcctatttgcacctttttctaataatgtattattcaaattttatattcgtggctcaagggaagtattatatataaatactataattattcaattgtgttttttaaagtgaaaaatatgttaaatgtgcgttctttttattctttcatgaatatttatttaggtggcttataattataaacaataccagcatctaccttacctctgtagcctctcattttcacaatgaagaatgtgtattagtttacttgcgtttttccctatataaatcattggcaatgagaaatgataaactcattctgcccagtattatgtgggtgatcaataattagtattagaaaacaactttacagtgcattgttgaacattattgagctgatgatgtcttagataaaatcatttccattttgaatgtggcaaattcatattaaagacactacatatgttcttggcattagctcccaactctgaacttttgcagtaaatagagacaaggtgttaattaagagaactgccagtccaaatgaataatggagtgctggaaatagcatgggtgaacgcttgaccttctgcatcaaagaggtgctccaatgatgaagtctcaattttggaattatgactgcagaataatgagaatgtggaagggtaagaaggatagtgggatctccattaactcattcagctactcctaattagtttttaaaaactgtcaggcaatgtttaatgaaaggcttctcaggaatatgaaatgaataaaggtcacagtacatacaatttcttcaaccccaaagggtaccaactaaatattaagtaataatagatattttgtaagacccttcctaaataatttgcattaagcagcattaaaaaagcagcctctctctgacactcagctgggccaagttaactcagctaccttagcccaggggagaggacgggggtagggcaacaagcaggagttcaggagagtgtccatgatcaatccaaagacagccacctttgacttatatgtgtcctgtagagagggctgtgtatctcagtaacctagttcagggaagttagaatctgaaacctttgaccaggtaactctgttcctcattctaacttgacaactaagttgggaagtctttcttgactatgagattacacccggttgataaagtatccagtcaccatctagtcaggatattgaattacacatttctaaggttttaaatatctttggacatcattgtttgtgaagattcttctgaagctactaaagacctcaggccatgagagtaaaaaacagttcagtgaggccaatgctactactgacttagttgctttaagaaagtagctttggctttggacaatttgccttcttttctgggaaagctccaagttgaacagagaataagacagtaaaattttactgtaaaaatgagtgacgtttatcaaaggctactatgaacatgcactgttgtaagcccttgttaaatcttcatgacaactttttgaagtaagagccattattctacccattttacagatgaggaacctgaggcataagagataaagcaatttctccaagaatactattacgtccaagtccctagtcttagacattaaccttggcactgaggatgtcacagtgatctattgtggtcccttgttttcacctgaactccagacactgtgattttgttttctccaaggtattttactcagcttaagttgtaacatatgtccaggcttatagaaatagctagctgtttccacccaacttcaatacacctaggtggatacactgagcagtcacacactcagacagaagtacatttattgtatgaggaagaaagtagtgccttttacccacattgggtcaaggatagggatcttcataactgggagtgttcttccaagttgattgttgtcttagtccattttatgctgctacagcagaatattggagactgagtaatgtataatgaacaggcatttattgctaacagttctggagcctgggatgtctaagactgaggggctggcatttggatagggccttcttgcttcatcatcccatgacagaaggtagattagtaattttaatctattttctttatttttgttttaaaacacctaactacttaattgtccatcttccccaggggtgccctatgaacttgaagatccactttcctatagcttcttatatccataatatattttatacctgtagtagggttgctagataaagataaaataccagttaaatttactttcagagaatttcagactaggtatcatatatttttgcatgctgaatctggcagccatattttataactaattcattggaaatgagggaaggggcgagttacttcttatcgggcaagccatcttgtttatgtagattaatgtaataacactagaagataaaatattcccatggttagcatcacagatgaattcaaagtttttttctaactcatttattgaaaactgtatattctaaacctatttcattcagagtataaatctaaacatatttagtgtgattcctatggtttctttccccacagtaagattaccactagaatagcttttagaaagtttctcttatcatttgaaattaagatgcaccattaaatataaattttcttacgtaccgaaacttttaaatttaatttttttaatagaaatctttctgtctgggtgtagtggctcaacctgtagtcctagtacttctggaggctgaggcaggaggattattcaaacccaggagttcaagaccagcctgggtaacatagtgagactgtgtctctacaataaacacacaaatcaacaaaaaacctagctaagcgtggtggtctgtgcctgtagtcctacctacttgggaggctgaggcaggaggattgcatgagcccagagcctggagtttgaggctgcagtgagctatggttgcaccactgcattccagtctgggcaacagagtaagaccctgtcttaaaaaaataaaaacgaatctttctgaagtgtatttcacactagattacccacttaaaggtgatatattgaacatgacttcctctggaaaaattagtgttattattattaatataaattatttcaacttttaatatgtaatatacccccaaagtctgctgatgtgtctagaactatttttcctgtctgtaaacagtctcactatgctatgctcttgtgatttctgcatgctgccatttgctgtcctctgtgaacacctctgggagatatatttcatcaccagcagtgagcctcaactcctgagttgtagccttaatttgaaaacagttgtgtgggtgaaggactgagggaagctcatttatggattcaagtgcattgctttgtgccagctatttttcttgtagctacttcagaggcctgctggcacttccaggactgtactttgttctttatacgtgagcttttttaggtattaaagtgctgctctgtgtttgtcagtattacttcccaagatgtgtcctacaggacaaaagttctataaaatgttaataggtgcatcaaaaaaaaaaaactttccatgattgaaatgtttgggagacagtgtactaaaaaatgttatgcttgtaaaaagttaaagtcttctttacagggattttcatatgctaacatggaatgtaaatcctcgggtgtttaaaatggtatatagcacatttggatcttatctgtgcatgtaatcactttggtggaagatctcaccggacgttgtggaattttgttatgacttacagttgccatgttaacatggaagttttacacagaaataaaatggtatatagcacatttggatcttatctgtgcatgtaatcactttggtggaagatctcaccggacgttgtggaattttgttatgacttacagttgccacgttaacatgggagttttacacagagaaggaaaagaaatgtggtgaaatgatttataatagggttaaaattaatatccttcatacattcaaatccttactccttggagatagttctttgaaaataataaatagcaagtgtacaagtcttcaggacattaatcaagggacaattttctcctctagaaataagaggttaagtttctgaatgctaatgcattaaaaaggagtgacatgtcaaggtttacaacccacaaaatataataacagaactccttcctgctctctggacaaattcaatgagaagataaaacaaaagtgaaatagaattaaatgccccaaatagaaacttcaggaaacaggccaaatattaaaattgtttctttttccttttgaaactgccactttttctctccttctgctcttaaaaatatttagtttagatgaatattattgcttgtaatcaacagtcttgatattattttgacatttttggtagtctttactactaagtattgaaggaaaggacttttgcgtttgttgaaatgaatgcattaatatttagcttaaacgtgtatgccatttgcctttgcctaaagactcacacacattaaaaatacatattttttattactttcttatgaaacatctaattgtgtataacaatgctctccattatctgttgtctaatggccttgcgtcatgatatttatatatttctataacttagcatcactgataaattgtaacttggatatttaacctaatctgtgttatatttaatttaatctgtgtttagacacttgttacaaaggcaaatccataattgcctgccactattttggtgcctactggactctatatgttagattaatttgtgtggacaggctaattttaataataatagctaacacatatgtcagctatacttctcaaatgttttatgtacattatttaattttcacagcaatgtgagatgtatactttcatgattttcattttacagatgagaaaactaaggcatatttgtccaaagtcacacagtaagtcgcagactatggacatgaacccaagcagtctgattccagaggctgctcttaataaccattaagaatggaaagatgagaatgagattgtaatcctgcacttctacaaccttctggaggttttcctaaagcaacaaaatcactgaactgcgtattatcttcttcaccaaaataagtagatgaggtctggcatctcaataaatattagtgaagtgctgactttctctgtagccaatgtctttattttatggagtaacaacaaagagtatcctaaatcctacgtggggtatgggctctgtctcactgttctttaatatcccacaatgccaagtgcttagtaattattcaacaattacctgctgaatggtcttcactttattgatgaaattgaggctcagagagttgaagatcttgatcaaggtacatagtaagtggcaaaaattccacccatggttgcaggtccacttcatttttcactctactacacagacactcagcattcacttagtgagttaatgatttatggaaattttaaatcactggaattaatgaaaaccatatttattatttctcaggcccattgtgatcatactagaatatacacaaatatccttattatagtggctgaaagatctgatcttgctagccgttcctaaacaaatggctctccaggtgtattagtggtgtattagagccatattcccagtaggaactttgtctcttcctcatagaacacccctatgttaatgcaagttggacaaatcctctccatagcatcccaagcagagtcttaagttgtggtaaatgaatgcttctcctatttacctttgaaaaagctaatgaattatgagaaactgttcagtgttcgtaggcccacacactctaacctcttccctgacaatgtatttatccaagtcactttgaaaagtacttgtttccaaacaagaaccatttatatgggaatgtactgttaaaaattaaactgaggtgcattaaaaattttttaagcatttatttgagcaaactagtatttatgaattgggcagttgaaaaccgtagtttgtggttgtggctctacctaaaggcctcgaagaaaaagcttttataaagtaaaagtggaagcaatgcaaaaaaaaatgatttgttatagctatgtagttgccttaattggactatataggtaaaaagttctatttatgtaattagaggtaaattggtggtttctgatgattaagtttagattttgttttcctctaagtcaatcatttacaagaaatgcatttgagtctggttttggtttgcttgggtaggaacccagggcattaaaaccacttcagtctaatagccttctatttattttaagactttctacatgtcttgtcaacctgaatctttttttttctaactctgacagatggagaacaacctgtgtcttgataagtctttttcatttttctttcctttgcctacccactattactgatgtaatcattttcatatctatctatctatctatctatctatctatctatctatatagatagatagatatatacacacacacacacatatgagctctctctctctctctctatatatatatatatatatatatatatatacacacacacacacacatatacatatattttacttttggccagtttttataggtgcctgttctttcatgcctctgagtcttatccatgctgatattaagaaggccaaaaatgcagccatcacacttctaaacatttcatgattgataatgattttgaaaacaaaatgcttgtctttttcttttttaggcagaaatgtatgcaaaagatttcaggaaaatttctggaatgtactatatataatgaagtgttttagtgtcattgactttgcaattagactaaacttacactagaattttgggtctaaaacattaccatgtgaccctgaacaagttacttagctgttctacaccttagtttccttatctgtaaagtggtgttaatcatcaaatttgtctcataggcctgtgagaattcaataaagcaatgcatgagaagtgctcagtatagtaccagcttgtactatatatgtgttaattacttacatcttccatactgattgatacaatgaatagatcttatcagatctcccaagtgggaagtgtcatgtgggcccagaagttatggcgaaatattccaaatatagtaggaaaaaaatacttactgaaaagacatatctataggaaatttgcaagcatgaaaataaatgtcaatggtaccaggtaccccattcaacatgatacacacacacacacacacacacacacacacacacacggagcaaaattgctaagtgcagcaacaataacacaaagtaaagactaccaaattatattttgagaactaataactttataatcacgtgtactcaggtgtgatttatgcctttagttctacctgccacattaaattggaattataactctgcttgttaatactaatataatattttggttttgtggctgaaataatatatttgttaactgcccacactacaactaaattaggaaagtaagaagtaattttcatttggataaggaagatagctggtggtgggcacggttcccttgctttttattcttgctggagtaagagagacaacctaaacttgtaggtgctgcctcccccaacccccgcagcttttctatgcttgactttcctcaaaaatatattttctagttttagcaagctaatgggtatacaaacatttataggtttattttaatactagcatccaaaaatccattaggcattttcctagttaaaaaaaaagtagctgctgggggtgtaaatgttaaagatcaagtcttttagacttttattgcccatctcctaacctagttagtcttagtctcaaacgctttgtggagaaaatacttacgaaatgccctacaaaacacttgacttttaaggatcccttttcttcaagatagggtgaccgtatttaccaaataaaaattagtagttatgactatataaagattttacttctgggtgtgataagcactctcagaagtgatgtattagacgcttaaaatattttcaagttttatggcagttgtttccaaacttgtgtgggggaatggtagggatctgaggcacgacttctaaaggaactataaggagtagagaggttgaattgccaagtggggaggggcttaaggcctgcctctaagtcttcaatgagaagaaatgggcttttattcgttctgcatgttctttaaaaatttgagatataattcacaaatttaaaattcaccattttaaggtgggttttcaatattcagtggtttttagtatattaccttagttatgtaagattatgtaagttatgtaagattatgtattgaacactattatctaattccaagacattttcatcaactcacaaagcaaccctgcactcattagtagtcacttcctattttccccttcccccagcccctggcaatcactaatctacttcctgcctctatggatttgcctatgctggacatttcataaaaatggaattatataatatgtggtcatttgcatctgacttatttcacttagcataatgttttcaaggttcaccatgttgtagtatgtatcagtactttatttttgatggctgaataatccattgtatggatgtaccaccttttgtttatccagacatcagttgatggagatttaggttctttatactttttggctgttagaaatgcttttgctatgaactttttaaggtatgaacatatgtttaaattctcttgggtatacacctaggctcagaattgctgggtcatattgaaacactgttgaactttttcaggaactgccaaaactgttttctacagcggttgcacccttttacattcctgctcacaatatgtggtgaattgagaaaaaacaatttggggagggaaaatggaaccagggacagtttttttaaatcctcgaatttatgggtaaaaatgggaaattatttgaaatcaagatgatctactaataatatccaggacatatgtctataacttttcaccatcatctttagagcttttcatggtgctgatgcctaactttatgtgttgtatatgaacttcttctctcatcagattgaagacaataacagttcaaatttcatggattagctcacttggtctattctttctccctgcccaatccatttctctctacttctgtgaatattatttaattctattaattacaagactcaacttagatgttgtcaaagtctttcccgactaacccaacttctggacagatataacttttatccatctagtacctggtctacccattttggtcttaatcatactgcctaataccagtcgttttgttcatgactatatgtgctttgtagctctgaagacagcactgcgtgtaatatttcttttgcttttccaaggcatatcttctaatattttgattactatatgttcagtaaatagtgagatgattggttttaaaaaattattgggaattaccactttttgaacacttcttatgtgctaggttctaaattagggggttatcagttaatcttcttcacaatcttatgaactggctatttatactttttttgaagatattgaagcttagacggattttccccaaatcacatggccagtaaatgacagaggtggggtttgagtccagatctgactccaccatgttatagagatttgttaaattttaaaggtttcaataaactatttagaaaaactctttaaaaacatagtagatttttatgtatctggaattgtttaaatatgggagtcctagaagcagggaaaataactatatacgcctttgagactctggcaatgtttagaatctcagtttaacaggtgatgctaagttccttttattttttactctacagaagctacttaagagaaaaagatctgactttgaatattgacataaagctactaaatgctaattttctttacaaagtattaaaaattctgaatcagtgcttacaatctagcaagtgtatatgctataaagcgcctgtctactgcagtaaaaatgtagttttcacagtgatcaaagataatttttctatgttattgtaagtatgttgacactgtttttatatcatctttggtttgtaatgatgactcatgaaagtctccacatatgaatacaaatatcaacataattcacatatttataattttgaaagaataaggaaagcaccctgatattgtagaaacagcattgaacttggaggagggagatctgggctttgtcctcatgttgccatgaggtaggtatgtagatctggataacccattcaatctctctagagccaagtctcttcagtaataaaattgtagtgttggatcaggtgatctacagggtctttccaattttaaggttaacaatcatcgtgatgagggaatactagagaacaaacacgacactaaagaggttgtgcatgctctgagctgccttttagaaaattagcaatagtctttaaatcaatcataaacaagaggacagagctgcaatgtgtgaattgaaatgcttcttggtcttaatttttgggtatgtttctgacacttcaggctggtttaaatggctctgagtgccctaatgccaaacaaagctcacatcagtctaatcgttataaaaccttcacagatgtgcatgggaaagattttctgtggaagctggaaaaatgaaactgtaaatgccttccagctggcatgcttaaatgttcttcatgtcattggagacatgttcaggttaatttcagttgatgactgatagctcatccaaatgttactcaagataacgtgaagcaatttttctctcttagtgatgaactcagataagaggatgattattgaaaaacatgtagctaacatttgtcaattgaaaaaaatcattacaaaaatacaaaactaaattgtataatctcttaaaaagaagaaaaagactcaaggtcgggatgtaaaaagcataaggctaagtacacacgtgcatacggtgtacattttagttaagttctgagggagttaacaccttcgagcccagttggtttaggtcatgccatttacatcctgctgttcacaataatgataagaaatgggctgcctgctatcactaaatgccagctatagaccatatggcaacaaggcaacatcaaactgaaaaaaataactatctcaacatttaacaaacttgatagtttaagatgtgcaatctattacacattttcttaattcttttaaattcctgttttaatccttgctactggctgcgtttcagctgtgtcttgtgaatgtgaacacaaacagcatgcgtcttagtctgtattttgttgcacataatagaatacctgaaactgggcaatttacaaagaaaagaaatttatttcacacagttatggagactaggaagtccaaggttgaggggctgtatttggtgagagcctttttgatggtggggactctctaaagagtcccaaagaggctcagggtatcacatggtgaggacggtgagcatgttagctcaagtctctctttatctttgcataaagtcagcagtcttactcccatgataacccattaatccattaatccattagtggattaagccattcatgagagcagagtcctcatgacccaaagagccctaaattaatcacctcttaaacattgggattaaatttcaacataagttttggaggggacacatgtccaaaccatagccgactgttaacagaatcagataaactggaatctatgttcattattttggatgattccttcattaaatgataaccactctctttatagatgccagaattccagaaagaaaaacataaagaaattaattatgatggttggttgagaaattgtcttagtgaacaattgataagcagattcagggctttgtgattaaaagcaatacatttctaacaaaaacagtacatattttaaggaaaattaaatgcatcataaatataattttatttgtaattgaattagtttgttgccctaaccactccactcatcaaattttttatatcaatttcatagttatgccacaaacctttcggtatatacaaactaaaagtaacgtattttgcacaatctaatgagtgatttcctcttctgtaaaattagcctacacgcttcaaaggtctgtgcagctccagcagattatggttctaaagtaccctgttcacaatgaagtgaaagattcaaaatgaaagaactcatcccactttctcatttctacaaaacattgtttggagttttgttggattttcaagtgccctttgaggctgttttcatctgacttcaaaagccagtcccagacttatcttttactgatttcaaaaaggcatcactgactgtataatattggttaaaattactttttttttgttaaagaaagtttaatgacttcaaattctgcctgaatatttcagaacatcattctcaagataaatgttcagaaatttctactttatatctttagaaatattatccattttcctgcaactcacatttaaatgtataaaatagaaggcccttgaggctgtttgcatctgtgcagaattttttaaaatttttttatttgttagcagcaatgcatttttgaaagcatttaaagttaaactgaattcatttaaattgcactagggtttcataaaatctctttatattttcatatttaaaccccacgatgaaaaccaatctcaggtatcagagcatcaggagggataggtataaaaatgagggacgcagccctgggtaacaagaccttttaattatatagcagagtgaaaaattcagcttagaagcctaaacttaaagttagagctaacagctgatttgttgaaaagtgttattcaattttgatttgagtgtaaactactcaaggacttcaaaagagaaagagaaattgttgttaaggaacacagtaagaattatagtaaaaattcatcattgaatttcagaaaagtcattgcttacccatttcaatttttgtcaaaggttttagagaagggtagaacaactgttctattacaatgcacgtttgtaaatgccactggaaatatatgataacaattttggatcataaaaatgaatgaattctgttatcttatacaattctccaataaaaagaaccagggctctttggaaaaatatttgtttctatggctggtgcaaagaacatataagaaaagtctatagcatcttgtagtcttcttctcacccactgcctataaaaagtactcaaaaaacaaaaccatggagcgtttttcaaagggacacaggagacaagctcagtgagcttccagtggccaaagctaaaaaatttgaacaacaaaataaataacatagcattggatttatagcccaatgtataaagcaaatacacatactttttataagtacatattagaatatgtgagtagtacttctatacataaatgaataaataagtacataaatgaagcagaaacaaatctcctgcacaaaagaattccaagtaatttatgtagcatgtaactttatagtaaagaaagctggcaaacactgtctcagtcagttgatcaattattaacatcaccagggataagttgtgctgataacatgcaccccttgatatgacgtgataaggaagaggcacttcacttttgtgatcttgctttcccaaacccatagtttcagtctaagagagaaaatattagacaaacccaatctgagggacattctatagaacgtatcaccagtaatcctcaaaactgccaagatcatggaaaatatggaaagtctaaaaagaaactttcacaaaccagaggagacgaaggagccatgatgactaaatgtaatacgtatctgggactggatcctgtaacacaaaagagaacaggacaataggagggaaaaatgaatgaattctgaattaagtatggagtttaataataatgtatcagtattgtttattagttgcgccaaacatacaaccctaataagatacaaacaatgggggaaactagctgtgaggcacctgggaactctcttatttttataattttttctgtaaatataaaactattctaaaattaaaagtttaatattcttggactgtggttgaccaagtgtaactgaaaccacagaaaacaaaaccatggataagaggaggttactgtataattaaaaaccacattatgtgttaatttatggggataaatgagatcatgatttacgtttactttttgaagataaggattctctaacctatagaaactccctccagcaaccaatacattattgagaactcaacaataaagatgataataattgtgaagtaatactaatgatggtacacattttaagtcttttacaatttacaacttactttcataagttttatcatgttggagaatgagtgatgactctataaggcactttgagctttgtggcaggggaagtataatttggaacaatttatttctctgagactcatataaactatagccatcatgcaagtcttctattgcctagttattccaaaagtctttgtaaacaagatctaataaaatagaaaatgcaaaaataaataaatacataaaacaagcaacgtaccttttggaagctttagatctaataaaatagaaaatgcaaaaataaataaataaataaaacaagcaacgtaccttttggaagctttagagaacgcataatcaaattcctttatttttaaatggaaagcaattcatgttttaaattgcatgctgttctgagtaatgtgacgaaatctcacgccatcccactctgtcctgcctgggacgtgaatcatctctttgtacagcacatccacgccatctatattacctgctcattagtcacttagtaactaaccgtcttggttatcagatcaactattgagcatcacagtgcttgtgttcaagtaatccttattttacttaataatgttcctaagtaatgatgctggcaattcagatatgctaaagggaagcagtcaagtgcttcctttagtgaaaagatgaaagttcttgacttaataaggaaagaaacataatcatttgccaaggttgctaagagcaaataatctatccatgaagttgtaaagaagaaaaaagaaatttgtgctagttatagccccagtgcataataaatatttagttaagatggaaaatgtgtgtctatatggtttggtactatctgcagtttcagaattccactgggtgtgttggaacatatcccccatgaatatggggggactgtgtagatgtgaccttaggaaggttaaaaataattgtccagttagtttggtttctcttgcctgggtcaaccaagagctccacatgctgagtgatatgaattatatttgatgagccaacctaataaagaaagataacaatattgaaaatatatttcacatgcacatgatttggctttggagtatgcggacactggctgacttacctcaataaggcaaagctgtggacagtaaggcaaacttgctgaatgtttattttcctgagtacacactttccgaatatgagtgagtgacaaatcattttaaaataaatttggaccttagccatcttttgaaataaagcagtggttgaagtaagaagaaaactaaagccaaaatgcaaatgcacttgtgagacagattgacagtggtggaaactgctgtgagctctctctgtagattaaaaaaaaagctacagttggcatataatatgttgcacattttaaagtgtacaatttggtagtttttgacatatgtatgccaccatgaaacaatcactactatcaaaataatgaacatatacaccaccccaaactgtcctgtgccacttgtaatctctccctcttacctttctccacacctccttcattcttttttgccccagttttattgaggtatacttgaataataaaactataaaagttcaaggcataaaatgtgatgatttaatatacatattgtgacttgattaccacaatcaagttatttgacacatccatcacctcatgtagttaccagtttgttgtttgtttgtttgttcgttttgtataccaccaccattcttgtccccaggtaatcactgatatactcttcatgactctggattagtttgcattttttagagttttcttcaaaagggattatacagcatttttctttttcttttttaatctgcctatttcttacagcattatgatttttgagattcctctatgttgtagcatgtatcaatactctgttcctttttaataccattgtatagaaatagcatcatttatatatttattcacctgtttatgaccatttgggctgctttccagtttttgcgtattacaaggaaggctgctatgaacactgtaatacaaatctttgtatggacattgcctccttttcttctgggtaaatatctatgagtagaatgataggatcacatggtaggatatatgtttaattttttaaataaatgaccaaacacttttccaaagtagttgtactattttaagtttctaccagcaatgtatgagagttccagtttcttcatattttcaccaacacttgttttaaaatttatacgtccttgtaaatatgtagagatatctcattttgattttagcatgcttttccctaaaaactagtgatgctacacatcttttcttgagcttatctgccattaatatgtcttctttagtcaagtgtctgttcaaatcttttgcactattgttttcttatgatttttgagaattctttatatactctagatgcaagcccagatgtgttaggtctacactttgcaaatattttctcgaagtctgtgggttgccttctcattctcctaacagagtctctggaaacacagagtatttaactttgattaagtctagtttattaatttttctattagtgatcatacttttggtgttatgtctaaaaaactcttggactagccgaagacaacaaaaattttcttctctttttttgtctagaagtttcatacttccaggtttttcttgttagtctttgaaccatttcaagttaattctcatatatggtacaatgaatggagcaaaggtcacaattttgcagtatcaatatataattgtaatagtagcatttattgtaaggactagactttttcaactgaattatttttgtactaagttaaaaatcagttggttgacaagtgtgggcctatttctggaatttccattatgttccactgacctatttttctctcttgatttcaatatcatactgttgtaattactgtggcttcacaatgagctttgaaattaggtagtgttaaccctccaactttgtttgtctttttccaagttgtttttgactattttagatcctttacattttcatacaaatttaacaataattaaaattttattttgtaattttctttttgctataaaaaatgtgtgctggcgttttgaccaagatggcattttatctatagattaattcagaaacaattgacatcttaataatattgaattttctaacccttcaacaaaatatatctatttttttcatgtcttctttgcttttttctcagcaatgttttgtagttttcagtttataggccctgcacactttagagggataaattcttaagtatttcatacttttgttgctattataaacaacatttataaaattttaatttctatttgttgttagttactacaaataaaacaccatcattatacactgcttctgtgagtttgactgttgtagattccacatataaatgagaccatacagtatttttctttctgtactggcttatttcacttagcataatgtcctccaggttcatccatgttgttgcaagcagcagaatttcttttttttatggctgaataatatttcattacacacacacagacacacacacatatgtacatgtgtaccacatttttcttatccactcacctatcagtgggcatgtatgttgtttccatatcttggctagtgtaaataatgaggcagtgaacatgggagtgaacagatctcttcaagataatggtttcatttcctttgaatatgtacccagaagtgagattgctggaccaaatggtagttcaatttttaactttttaaagaatctccctgctgttttccataatggcggtaccaatatatatttctatcaatactgtacaagggttcccttttctccatacccttgccaacacttggtatctcttgcattttcatagtagccatcccaacaggtgtgaggtgatatctcattgtggttttgatgtgcaattccctgatgattagtgatgccaggttaaagggccactttggaggctgctagttgtccaccaaaatctattccccaggtcctccacaatattagaattatagccaggtcatggctgccctgctgagcattacaattttcagctccttttggactcaggtgtggttaggaggctaagttctcactcttagaatctgagtccaagggaagtgtaccaattccagtacaagcctcacacatgcccctttccatgctctttccctttcccattagctggaatatgggtccagcttcaactctgaagatgggaacacgccatagggtagcagttctcaaacagttggttcttacaacacctttgtattttacaaattaccgaggaccccgagttttgcttatggaggttatatctattcacatttatcatattggaaattaaaactcagaaactaaaaaaaatttatagttcatttaaaaataatgataaacctattttatttatatagttttatcaaatatatattttataaaaattattttatgaaaataactatatttgtaaaacaaaaacattgagaagagtgatattattttatatttttgcaaatctctttaatgtctgccttaaaaaagaaaacctgtattctcctgtctgtacctaaaccctattcattgtgatatgttgtttcggctgaagtataaatgtgaaaaaaatacaggttcacacaaatatgcatttggaaagaacaagcgtgttttttagtcttttagatagttgtggatactctttttaaatttttttatcaaagctcaacaagtggtagtttgttaaaaattagttaaattgtagactctcaaaccatgtcaataaacttttcatatttccttgtcttaaaatccgtcagtctttgaatggatttttccccatgatgctaaaaatgcttttttaaaagataactgttaagaaaatattgcttcaattgcaacaaaagcaagaattgacaaatgggatctaattaaactaaagagcttctgcacagcaaaaggaagtatcaacagagaaagcagacaacatacagaaggggagaaaatttttgcaaactatgcatctgacaaaggtttaatattcagcatctataagaaacctaaacaaatttacaagagtaaaacaaccccattaaaaagtgggcaaaggacatgaatagacacttttcaaaagaagacatacctgcagccgaaagccatatgaaaaaagctgaacatcactgatcatttgatgccatctcacactagtcagaatgactattattaaaaagtaaaaaaaaaaaacagatgctggcaagattgcagagaaaaaggaatacttatacactgttggtggaagtgtaaattagttcaacctttgtggaaaaacatgtggagattcctcaaagacatataacagaattaccatttgacgcagcaatcccattactgggtatatacccaaaggaatataaatcattctgttacaaagatccatgcacacatatgttcactgcagcactattcacaagagcaaagacacagaatcaacttaaatgcccatcaatggtagactgaacaaagaaaatgtggtacatatacaccagggaatactatgaaaaagaatgaaatcacatcctttgcagaaacatggatggagctggaggccagtatacttagcaaactagtgcaggaacagaaaaccaaatactgcgtgttcttacttataaatggcaattaaatgacgagaacacatggacacatagagaggaacagtgaacactggggcctaccagaggatggaaggtgagaggagggagaggatcaggaaatataaccaatgggtactagacttaatacctaggtgatgaaataatttgcacaacaaacccctatgacacaagtcatctataacaaacttgcacatgtaccccaaacttaaaaattaaaaaagaaaatattgcttcactgagttaggcaaatatcttaatgttgacattttaaaattgcccaatatcagaaaattaccacagtcattaatatcagcaccaatctcatcaaaaacatttttaagtattgtatagctattatggccaacaagtggtgaatacacgttttccaaaattctaattttttgcttgaaagcttgaatgttattattggcatcaaatgtcagttgttttccttaaaatgacacactcactgtgctgattttcaagtaattgttgactagtattcaagtactaataaccatggcttgtcaatcattctttctgttaaaatatcattctataaaaatgtggccagttcattttgcaacttaaataatctcaggagcattattccatgagatagtcatcatacttcagtaaacaacataagtgcttatatacacttctcattttaaatgtttaaaaaattttttaattttgaatttttattttttacttttgtaggtacatagtagatgtatatattaatggggtacagaagataccctgatacaggcatgtaatgtataataattccctcatggaaaatggggtatccgttccctcatgcatttatctgttgcaggaagtcagggaccccaaatggagggactggctggagccgtagcagaggaacataaattgtgaagacttcatggacatttatcagttcccaaataatacttttataaattcttatgcctatctttactttaatctcttaatcctgttatctttgtaagctgaggatatatgtcacctcaggatcactgtgataattgtgttaactatacaaattaattgtaaaacatgtgtgtttgaaaaatatgaaatcagtgcaccttgaaaaagaacagaataacagcaatttttagggaacaagggaagacaaccataaggtctgactgcctgtggggtcgggcaaaaagagccttatttttcatcttgcagagagcctataaatggacatgcaagtaggagagatatcgctaaattcttttcctagcaaggaatattaatattaataccctgggaaaggaatgcattcctggggggaggcctataaacggccgctctgggaatgtctgtcttatacggttgagataaggactgacatacgccctggtctcctgcagtaccctcaggcttactagggtggggaaaaactctgccctggtaaatttgtggtcagaccagttctctgctctcaaaccctgttttctgttgtttaaaatgtttatcaagacaatatgtgcactgctgaacatagacccttatcagtagttctgcttttgccctttgccttgtgatctttgctggacccttatcagtatttctgccttttccctttgtcctgttccctcagaagcatgtgatctttgttagacccttattagtagttccgctctttaccttttgaagcatgtgatctttgtacctactccctgttttacaccccctccccttttgaaacccttaataaagaacttgctggtttgaggctcaggtgggcatcacggtcctaccatgtgatgtcacccctggtggcccaactgtaaaattcctctctttgtactctttctctttatttctcagctggctgacacttacggaaaatagaaagaatctacgttgaaatatagagggtgggttcccctgatatttatcctttgtgttacaatcaaattatactcttttagttatttttaaatgtacaattaaattattgactgtagtcacccagttgtgctatcaaatactaggtcttattaattctttctggctgtttttattttgtatacattgaccatccccacttccctcccatgcccccactatacttcccagcctctggtagccatccttctgttctctatctccagaggtttaattgttttgacgtttagctcccacaaaaaagagaacttgtgaagtttgtcttcacatacctgacttatttccacttaacataatgacctccagttctcattcttctttatggctgcatggtaccccattgtgtatatgtaccacactttctttattcaataatctgttggtggacacttagatggcttcctaatcttggctattgtgcacagtgttgcaacaaacatgggaaggcaggtatttcttcgatgtactgatttcctttcttttgggtatatgtgtcacaatgagattgctggatcatgtggtagctctagttttagtgttttgggaactattctccataatggtagtactaatttacattcccaccaataatgtatgaaggttcctttttctccacagcatttgttattgcctatcttttggataaaagccattttaactgaggtgagatgatatttcattgtagtttcaattttcatttctccaatgatacatgatgttgaacacctttttcatatacctgtttgctatttgtatgtcttcttttgagaaatgtctattcagatcttttgcccatttaaaaattggattattaaggccaggcacggtggctcatacctgtaatcccagcactttgggaggccaaggcgggtggatcacctgagttcaggagtttgagaccagcctggccaacatggtgaaaccccatctctactaaaactacaaaattagctgggcatagtggcacacgtctgttgtcccatacactcaggaggctgaggcagaagaatcacttgaacccaggagatggaggttacagtgagccgagattgcaccattgcactccagcctgggcaacaagagcaaaattccatctcaaaaaaaaaaagagattattatattttgtcttacagagttgtttgagctccttatatattctggttattaatccctgtcagagaagtagtttgcaaatattttctttcattctgtgtggtgcctctttactttgttgatagtttcctttgctgtgcagaagatttttgacttgatgtaattccatttgtccatttttgctttggttgcctgtgcttatggaatattactcaagaaatttttgccaagaccaatgtcctggagagtttcttcaatgttttcttataataggttcatagcttggggtcctatatttaagtctttaatccagtttgatttgatttttgtatatggtaagagacaggggtctagcttcattcttctgcatatgtgtaaccaatatccccagcaccatttgttcaagagattgtcttttcctccaatgtatattattggcagctttgtcaaaaatgaattgatggtagatgtatagatttgtttttgggttctctattctgttccattggtctatgtgtctgtttttatgccattaccgtgttgttttggttattatagctgtgtagtataatttgaaataaggtaaagcaattcttccggttttgttctttttgctcaggttagctttgactattgttgatcttatgtggttccatgtaaattgtaggatttttttgtatgaagaatgtcattggtatttgatagggatttcattcaatctgtatatttctttgggtagtatggacattttaacaatattgattcttgcaatccatgaacatggaatatctttccctttcttgtgtcctcttcaatttctttcatcagtgctgtatagttttcattatagagatcttttttggttaatttctgagtctttaattttatgtgtggctattgtaagtgggataactttttcaatttcttttttagattgttcactattggcatatagaaatgctactgatttttgtatgttgattttgaatcctgcaactttactgtttttatctgttctaatagttatttggtggagtctttatgttttccaaacataagatcatatctgcaaacaaggatatgttgacttcttcctttccaatttggatgctctttatttctttctcttgtctgattgctctatctaggacatcctgtcctatgttgaattaaaagtggtaaaagtgggcatccttgtcatgttctcaatcttagagagaaggctgtcagtttttcctcattctgtgtgatactacatttgggtctgtcacatatggtttttattatactgaggtatgtttcttacatatttattttttgagggtttttattatgaagggatgttgaatattatcaaatgtttttcagcataaattaaaatgatcatttggtttttgtcctttattctgttgatacaatgtatcacagcaattgagttgtgtatgctgcaccatccttgcatctctggtataaacctcacttggtcatgatgaacgatattttaaatatattgttgaatttggtttgctagtatttttttttaggatttttgcatcactatttatctgggatattagcctatagtttcctttttttgatgtgtcttagtctggatttcagtaatactggccttgtagaatgagtttggaagtattctcttctcttccatgtttcagaatagtttgcataggattggtattagttattctttaaatgtttggtagaattcagcagtgaagccatcaggtcccaggcttttcttaagtgggggacttattactatggctttgatctcattacttgttactggtttgttcaggtttaggatttcttcatgattcaatattggtaggtcatatgtgtctagaaatttatccatttctttcagattttccaatttgttggcatatggttgctaatagaagccactaatgatcctttgaatttctgcaatatcagtcataatgtctctttttcaatctctgattttatttattgggtcttttctttttcttagtctggctaaaggtttgttaattttatttatcttttcaaaaagcaatttttttgttttattggtcttttgtatcattttcttcatttcaatttgatttatttctactctgatctttatatttcttttttccactaattttgggtttgctttgctcttgcttttctagttgtttaagatacattattaggttattcatttgaaggttttcttcttttttgatatggccacttatactatgaacttcccatttagtgctgcttttgctgtcacataggttttgctatgttatgttttaattattatttgtttcaaggaatttttcaatttctttctaaattttttcattgaccccactggccattcaggagcaaactgttgaatttccatgtgtttgctatggtttccaaaattcctgttgttactgatttttggttttattccattgtattcaaagaagatacttgatattatttcaatttttgaatattttatgagttcttttgtgacctagcatatggtctatccctgaggatgatccatgtgctgaagaaaagaatgtgtactctgtaataattggataaaatgttctctatgtatctatgagagacatttggtctatagtgtgtaacgcagattaaatatgatgattcgttgttgattttctgtctggaagatctgtccaatactgatagtagggtgttattgtctctagctattaagatctgtctctctgtttagctctgataatatctgatttatatatctgggtgattcaccattggttgcatatatatttacaactgttaaatcctcttgctgaattcacctctttattgttatgtaatgaccttctttgtctcttaccgtttttgtctcaaaatctattttttctgatataagtatagagcctcctgtgcctttttagtttccattggcatggaatatctttttctttccatttattttgagtctatatgtgtctataggtgaagtgagtctcttgtgagaaacagatcattgggtcttgctttttaatccattcagccagccagtgtcttctgattggaaagtttagtccagtcagagcgagactctgtctcaaaaaaaaaaaaaaaaaaaaaaagaaaaagaaaaaaaagaaaacaggcacaagacaaggatgccctcttccaccactactattcaacatagtattagaagttctggccagggcaatcaggcaagagaaagaaataaacggtattcaaataggcaaagaggaagtcaaattgtctctgtttgcagatgacatgattgtgtatttagaaaaccccatcatgtcagccccaaatctccttaagctgataagcaacttcagcaaagtctcaggatacaaaaatcaatgtgccaaaattgcaagcattcctatacaccaataacagacaaacagagagccaaatcatgagtgaactctcattcacaaatgctacaaagagaataaaatacctaggaatacaactgacaagggatgtgaaagacctcttcaaggagaaccgcaaaccactgctcaatgaaataagagaggacacaaataaatggaaaagattccatactcatgggtgagaagaatcaatatggtgaaaatggcatactgcccaaagtaatttatagattcagtgctatccccatcaagctaccattgactttcttcacagaattggaaaaaaactactttaaatttcatacgggaccaaaaaagagcccacatagtcaagacaatcctaagcaaaaagaacaaagctggaggcatcacgctacctgatttcaaactatactataaggatacagtaaccaaaacagcatggtactggtaccaaaacagatatatagaccaatggaacagaacagaagccttagaaataagaccacatatctacaaccgtctgatcatagacaaacctgacaaaaacaaaaatggggaaaggagtccctgtttaataaatggtgttgggaaaactggctagccatatgcagaaaacagaaactggaccccttccttacaccttatacaaaaattaattcaagatggattacagacttaaagataagacttaaaaccgtaaaaaccctggaagaaaacctaggcaataccattcaggacataggcatgagcaaagacttcatgactaaaacaccaaaagcaatggcaacaaaagccaaaattgacaaatgggatctaattaaactaaagagtttctacacagcaaaagaaactatgagagtgaacaggcaacccatagaatgggagaaaatttttgcgatctagtcatctaacaaagggctaatatccagaatctacaaagaacttaaacaaatttacaagaaaaacaaacaaacaaccccatcaaaaagtggacaaaggatatgaacagacagttctcaaaagaagacatttatgaagccaacaaacatatgaaaaaaagctcatcatcactggtcattagagaaatgcaaatcaaaaccacattgagataccatctcatgcgtgttagaatggcaattattaaaaagtcaaaaaacaacagatgctggataggatgtggagaaataggaaagcttttacactgttgttgggagtgtaaattagttcaatcattgtggaagacagtggggtgattcctcaaggatctagaaccagaaataccatttgacccagcaatcccattactgggtatttacccaaaggattataaatcattctactataaagacacatgcacacatatgtttactgaggcactattcacaatagcaaagacttggaaccaacccaaatgcccatcaataatagactggataaacaaaatgtggcacatatacaccatggaatattatgcagccataaaaaaggatgagttcatgtcctttgcagggacgtggatgatgctgaacaccatcatcctcagcaaactaacacaagaacagaaaaccggctgggcacgttggctcacgcctgtaatctcagcactttgggaggccaaggcaggtggatcaggaagtcaggagatcaagaccatcctggctaacatggtgaaaccccgtctctactaaaaatacaaaaaattagtcaggcctggtggtgggtgcctgtagtcccagctactggggaggctgaggcaggagaatggcatgaacctgggaggtggagcttgcagtgagccgggatcatgccactgcactccagcctgggtgacagagtgagactccatctcaaaaaaaaaaaaaaaaaaagaacagaaaaccaaacaccacatgttctcactcataagtgggagttgaacaatgagaacacatggacacagggaggggaacatcacacaccgggtcctgtcggggtggggggttaggggagggatagcattaggagaaatacctaaggtagatgacaggttgatgggtgcagcaaaccaccatggcatgtgtatacctatgtaacaaaactgcacattctgcacttgtaccccagaatttaaagtataattttttaaagaaagaaaactgatgaaaactctacactttaactttatcctacccctttttaactttttgttttctatttatgtcttattgtactgtgtatgtcttgaaaacttgtagttattatttttgattggttcattatttggtctttctacttaagagtagtttacacaccacacttacagtgctataatagtctgtgtttttctgtgtgctattgccaatgagttttatagcttcaaatgatttcttctcgctcattaatgtccttttctttcatattagaaacttcctttaagatttcttatagaacagatctagagttgataaaatccctcagtttttgtttgcctggtaatgtctttatttctccttcatgtttgaaagatattttcactggctatactattgtagggtaaaagatttttttccttcagcactttaaatatgtcatgctaattctctcctggcctgcaaagtttccactgtaaagtctgcagccaaatattttggagctctattatatgttatgttccttttctcttggtgcttttaggatcctctctttatctttgatcactggcagtttgaatgacttgaaatagtcttctttgggttatacctgcttgatattctataacctttttgtacttagatattgatatctttctctagatttgggaagttctctgatattataccttcgtataaactttctaccccaatctctctctctaattcctctttaaggccacgaactcttagatttgcccttttgaggctattttctagatcttacaggcatacttcattctttttaattcctttttcttttgtctcctttgattgtgtattttcaaatagcttgtctgcaagttcactgattctttcttctgcttgatcaattatcctagcaagcaactctgatgtattcttcagtatgtcaattgcatttttcaagttgataatttttgcttgcttctttttaataatttcagtccctttgttatgtttatctgatagaattctaaattccttctttgtgttaccttgaatttatttgtgtttcctcaacacagccattttgaattcttgtctgaaaggtcacatatctctgtttctccagtattggtccttggtagtttatttagtttgtttaccgaggtcatattttcctggatgattgtagatgttctttggtgtctgagcagtgaagagttaggcatttcttgtagtttttgcagtctgggcttttttgtgcctgtcattcttaggaaggttttccaggtacttggaggaacttgggcccaaaacccaataatgctgtggttcttgcagactcataacagaaatgcattggtggtcttggataagttctagaagaattctctggattcccaggcagacactcttgttcttttccattactttctccaaacaaatgaagtttctctctctgtgctaagtcacctgggactgggggtgggggccacaagcaccctggtgaccgccaccactgggactgtgctgatttatacctgaagccagcactgcactgggtctcacccaaggcttgctgtaacaactatctaactactacccatgttcactcaaggctttaggtctctaccattagcaactggcaaagccagccaggtatgtgtctttcccttcagggtggtgagttctccccatccctgactgggtccagagatgctgttgggagctagggactggagtagaaaaccttagaaatgtaccaatgttatagtctactgtgggtaagctggcactcaaacaacaacacaacattattcctattcttctctccctttactgcaggcagaaaagcctctccctgtgtccaccaccaccactggcccatggggcgtttctgccagaccacatctgattaaaagtccaagggcttgtcaatcagcctgtggtgaatgctgttagaactgggactcatccttctgggcagtaggctcccctttggcccagggaaggtccaggagtgctgaccaacagtccaggcctagacttggggactccaagggtctgcttggtgctttaccccactgtggccaagcttgtacctaagttacaagacaaatttccctttactttcccccctgcttttctcaaatagaaggaggttttcaccatagacaccacagctctgagcccaaggcctatggcatactacctgggtatcactggttgttattcagggcccaagggctctttagtcagcatgtgatgaatcctgccaggactgggtccttcccttcaaggcagtggggtctcttttggtccaggggatgtctagaaatgtctttcatgagctaggtcctggaatggatgttcaagactctgcctggtgccctatcctactaagcctgagctggtatccaagatatatgacaaagtcctgtttactcttcactctcctctcctgaagcagaaggaagcagtcccttttgttgctgtaaactgggctgcctagggctggggaaggggtgacagaagcactcccttagctaccctatctggtgtctccctaggtcatgtgccaccctagtcccctgtctctaagcccagcccagcaccaggagttgcctaggagtttcagtccttgtgtcctagactgcctttcgagtttacctaggactctggagcactttagctcaccgtagcaaggcttgccaagaaattcaagttatgactgctgggatgggtgattcccttctggttaggtctggtccaaatgctccctctgtgcacagatgccagctgaacccaatacagctttgctctcccctgtaacagagcagcactgcgtttaatatgatgtctcacaattgctgccctcttcttctctcaagtgcacagatttctccatgccttgtggctgctgctgggggatgagggaggggtggcacaagcactctattatctgctctgtctgatgtctcagtaggccatgtgcccccctctacacaggccactgtctctgagccaagctcagtcctaggacttgcctaggaactgcagtccttgtggcctaggctacccctaaagttcatttagggctccaaaccacattaacctgcagtggtgatgcttgccagaactgaagctctaaccactgggatgggcaattcccttctgcctagcgctggtccaaatgctacctccatgagcaagcatcagttggatatggcctggttctgctttctgctgtgacagggcagcactgagttcaatataaagtccctaaatcactgtgctttccttctcccaagagtacagattttccatgccacatggctgctgctgggagatgggggaggtgtggcattggtaattcaagactgtctctcctaccgtatttcagtgccttttttagtgatatgaaattaaagccagatactccaattgctcatctgatatcttattcttgtgatagtactttttctgtggagttagttgtaaaaatttggtcttcttgtgggggaaacaaacagtgtaggatattatttgcccatcttgctcctcccttgagaaaggatctgtatttccaattttgtcaactagaatattaaaaacacagatattcaaaggtaaaatttttaataaaattcgtaatattcaatgcttcatcaaagaaattctgataaaaatgtggctttttttttacaaaactgtcagtgtgtggtggcaaagattccaacgattcctactgtggtttgttgccactgccttttattacattatcagagttaatgtcatcactggggaaaaggcaaagaatgtgttatttttagtaacattactatgaggagtattactaatatgagtatttgttgctagtattaatatgagttaatattaatataaatattattatagaaatagttctgacctcacaatctccctgtaaagtcttgtaatactcaaaggctctatgaaccacactttaaaaaccattgccctagagacttctcagagaaacagaagaaagctgcattcctgaatgatcatttggagtagagccattcattgtctgggatgctcaccttagaccgttaattgaaagagggatatatttttgtcttcttactgttgaatctaaattactgaattattgttgagtctctgatgcagctgtatagctattcctaaaataatatttacctttttaaaatttcttatagccaactctcttgaagcaattggaacatgtccaaggatagtatcatggggaaatactaaacatgtctctattgatactctaagatttcatccagtagattttgattctctcctaccctaagactatttcttacctattaggtgtgtacaatatcccatcccattcctcctcgtcagagcctaagacatttatttaagaatgttaatcctgaggtacctaggtacctaacatctaacttctggtttcaagttgctttttaccatttaacccaaaatattagagattcttcatgcaaataagacttttggaggcttgttttgatattacaaaatccctggggttagtatgtcattaaattctcaccattactctagccatactgatgaaatattttgtgatagcaaaaattgaacttaataaaaaacagctgcaccaaattgatttaacgagtagtgattgtttgactgagaggcctaagtgtatggaagtccttggtaaaaccagtatagttatgttttaggcctgagtttcttcaaaatattctgaaataatatttacataatatacttactgaaaaccaatgcatatcaatgaataagttttgaaaatcctcttgtgcgtcatagtatggtatctatttatgattctaaaatattttgcatatccttaaagtaaaggaaaaggtttatagtctgtgtagaattgtatttatagtgctcagatatttgctttgctttgggtaagaatctaggaaaacatttttaaaatagttgttattctgctgtctagtcattgaaacttatgaatctactgcccagaaggttttcctatagttcactgtcctgagcatagatttgtttcatatgttttcatttagttttgtttcactcaatgatggaaaggtgtgttaataggcggggctagacaagagttggaacaaatcattaagctacaagtatatgccctcctgttaatgtttggtcaacttggcaacctcattttcacctataactattagcatggtgtctttaaaaagcttcttaaattttgtttactataattatcttaaaaatcttttctctaatttgggcattaaaattttttgtaatttacaaataaaaattgtatattatatatctatagggtacaatatgacattttgatatatgtatacattgcaaaataattaaatcaagtgaattaacatattgatcacttcacatgttcatttcctataatgaaaatatttgaaatttattctcatctcaattttgaaatatataataccttattattaactatagtcaccatgctgtgcagtagatctcaaaaacttatttctccaaactgaaacttagttaggggtttgatcaacgtctcttcaaagtattattaaattcaggagccaactagtagttccaagtatcagcatatgttttaggttattatttttcaattttagttatcttaaatatgaaaattatcctatctttctcagctttcctcatacatattttaagtaaataacaattataatgggaggaaaatcaggagtgttacaaaactttttagattgcttgaactctttgacgctaattctaagtacagttttaggtacttaataattattttataataaggaactttgtgatgctcccttatgagtgagagaagccagataaattattctcctgatatcttcacaatgaaaaagaataatatagctattaattttatagttacatgtcccaaatggagcaaataagctgcttcattctaaatgaattgtacatattgaaattttgtagaaagttagagctatacatgaccttaaagtttaattcatatcattttttctgtggttctgctctactcttccaagcaaattgtaaatcctaaaggaatattaatggacaatactgaatcctgtatttgatttagtaagccagtgatgtttcctattaataaagaccttcaaacaaatgtaaatttaccaactcactaatggcttctgtctctttttagaaatgcatccataaaatagatgaagtttgtatttccaaaattacctagcaaaaaatgtttttttcagctttactgaggtataattaacaaataaaaaatgtatatatttaaggcatacaaagtgatgatttgatatacaaaaacattgtgagatgattaccacaattaaaaaaattattaattttgagcaaatgaatgagacttggtggcacgaccacattaactactcttggttataaattattattcaaaactgttaaccaaaagcctaattataaagttaaaaatgttgataggtcatagggaaaggtattctctcatttgtgtaaacataaactccattttgtaagtggataaattcccagtcccaaacactaatggtttgatgtggcaactgttgagctagtttcctttacaaaagtctttcaggagattcacaccttttacttgatcccctcctgccttgttccttctcagttctccaattgacactgacattatattatcattctataatatttggttccactaccaacggaattcctaaaataagaagtcatgtcttatattatagttgatatcaaagaatttttttttccactggagctgaaaacaattaaaatagatctggaaaaaatgccttttatttccttgccttttattttatcttgttttttattttcaccctagaaaaacacaaagcagctgagtatgagtttcctctgtctgtccagtagtgcaggcatagacattataacatgtgattcaccgatttaagtgaatattctacactataaacttcctgacagcagaaaccagtgtcattactccaaatgagtaaatgtgaagttgatagaatgtggctcatactactaatgcatggaaaatataagtacaacattcagtaaaatattttcaactgatctcttgcaagaatagtgcgcatctttaatcatttttcctttgacaccttaccatcttttaatgctttacctataatttgaaatgtctgcgtagtatttagtaaatattcaacagcctaggccatagtggaaaataaaaataaaacaaagaaaaaataaacatagaaaaattctgttttttttctatcaaacatctctaattagtcaaaataggaaagataatcccgctaaactttacaccacacatcaagataaactttaggccaggcagggtggatcatgcctgtaaacccagaactttgggaggccaaggcaaaggattgcttgaggctaggagtcggaatccagcctgggcaacaagcaagaccctgtctctaccaaaaaaaaaaaaaaaaaaaaaaaattagctgagcatggtggcacttacctgtagtcccagttactggggagactgaagcaggagggtcactttagctcagaagtttgaacttacagtgagtagtgagctatcatggcaccactacactctagctggggtgacagagtgagactctctaagaaaacaaactttaagaagattgagttaaaagtgtgtgtgtgtgtgtgtgtgtgtgtgtgtaattggaataaatatacatatatatgtgtgtgtaattggaaacctgccaaaatataactgattaagtttcaattctaaagaatgaacttttaatacattttgacatataagggatattaggagaaaaaaattaaaaaattttattaaaaacccaaattttttttagcaaatatataagtcaatgtgttaacattcattttatataatgggaaatacaattaatcagcaacattttggagtaacaatatgttagccaaaaaaaaatagtcattttgtacttattaaactagcaaacatttttaacatttataactaaggctggaaaagttttgttgaaaatggtaacaatccatagctggtagtaataatttgttacaacttttatgacagcaatgtggaaaaatatatacaagccagaaaactgcttgtattcattggctccagttatccaacacataggaattattcttagagacataatgctaaagaaaaaaaaagctgtctacataaagaagattgcagttttacatatatcagtgacacatgggaaacagcctaagaaatagataatacagaaatggtttagaaacctagtaaaatgaatggatgttatgaacctgctaaaatgattattatagtattaatttaaaaaatacttcttatggctggctgcggtggctcatgcctgtaatcccagcactttgggaggccgaggctggtggatcacgaggtcaggagatcgagaccatcctggctaacacagtgaaatcccgtctctactaaaaatacaaaaaattagctaggtgtggtggcgggcgcctgtagccccagctactcaggaggctgaggtgggagaatggcgtgaaccctggaggcggagcttgcagtgatccgagatcctaccactgcactccagcctgggtgacagagcgagaccccgtctcaaaaaaaaataataataaagaaaagaaaatacttcttataaccaggcttttcagaaaagaatatgaggtacacacaaaaacatttacacttctatcagaatgaaatcagttaaaactgtatgtatcagaagtagaaattaaagtaggaaaaataagatccggtactacagttactactcaacatacctaccctattttcctatctgctttagtagaagtgaaccacagatttggttctgcatttttagtagctaatttggggaaaaaaaatactacaaaaaattctatgtaaatctcataaaagcagaggaaagaatggtgagttcctggggtcgaggagtgggaaaaatgggaagacattagtcaaaaggtacaaagtttcagttatgcaagaataagttctgcagatctaatgtacagcttggttattatagtcaataatcttgtatacttgaaatttgctaacagagtcgatcttaaatattctcatcaccaaaaaaatggtaattatgggaggtgatggatatgctaattagcttgattgtggtaggcatttcacagtgtataggcatatcaaaacatcatgttgtgcatcctaaatatatacaatttttcttgccaattataccttaataaagcttgatgggaggagacaacaaatcttgtcttagttcctgatactataacaaattatcttagactaggtaatttataaataatagaaatgtatttctcacaggtctggaggttgggaagtccaagatcaaagtgccagaagattcagtgcccggtgagggatgctgtctgtttctgatggtgccttgtggctgtgccctctggagagaacaaatgctgtgtcctcacatggcagaaaggacaggaaggcaaaaggggaaaatggactaagacactcccttcagcctctttttctgctctcatgacttagtcacctcctaattgtcccagttctcaatactatcacattggtgattaaattttaatacatgaattttggggaacacattcagactacaacacctaacagtctgagaaaagccataagaacaaattagctggtaaatataatagttatttttagcatgaaatctgagatttttcctattgagtctcagtaaagacatcatgtgtacatagtaaacagcatcctacattttaggaaaaagaagccctcccttgtcttgtgttcccttcctcccttcctcccttcttcccttccttcctttctttcctttcttttttgagatggagtcttgctctgttgcccaggttggagtgcagcggctctatctctgctcactgtaacctccacctcccaggttcaagtgattctcctgcctcagcctcctgaatagttgggattacaggcacccatccctacacctggctaatttttctatttttagtagagacaaggtttcaccatgttggccaggctggtctctaactcctgacctcagtgatctgcccacctcagccccccatagttctgggaatacaggtgttaaccactgcacccagcccatgttttccagagataaaggactattcattcccttcttcaggagagaaagccaaagtgctacactagaaggttatttcccactccttccgctgcttctaagtgtagaggagtgagtcacctgactgaataatttgggagaaggaatgtgtatagctcagccccttctattgttataatttctggagccaacctgcctgctgggagtctgaattctctgtgtctttagagaaaatttcagggttcagctcagcctctggggattggggaatagactgctgttgcccatctttggctgtgactcagctggtaaatgtttcaattaaagatgaagccacagagagcccattttgccacagggtcaagctcctcctctcatcagctccatcagtagaaagctgtttttttgatgccttagttcattttgtgctgctgtaacagaacaacactgactgagtaatttataatgaacagaaatttatttcttatggcttgtgagtctgggaagttcaagattaaagggccagtgtctgttgaggaccttctggctgtgtcatcccgtgacaaaaggcagaagagaaagagaaaagggggtcaaacttgtccttttataataacaagcccactgccatgacaacagctttaatccattcatgaggacatatccctcatggtttaatcacttcttattaggctccacttcacaatcctgttgcattgggaatgaagtttccagtgtatgctctttggggacacactcaaaccgtagcaattgacctccgacattttaccacttagtcacacttttacattacacacaatagtgaacttttcggggatatttcttacaatttactccaaagaagacttgatgctgtctgagaaacagaaaaaccaatgtgactggagagtaatgactgatggtagtgtgaggggaagcaggtaggttccggacagatcatgtgtgcaattttttctttcaaaagggtttctctggaggttgagtgtagcatgaattacagctggtaggtttaagtcccatagattaggatttgactatttcccatagactgagtagttttttgagaggggatcctagaaggcattgataggaaaggggagtgtatgaagtgagacagatataagggaagccaagagaatgtgccaaagggcaggttgccactgtgggtagctggggctctatcctgatgtgggactctgggaccccagagaacatacctcaaattgtcacaaatgagtttcaaggaagctagaagatttactaccaactttcatctcttactggttgaaggcggcccctggtggtgctgacaccccaatacttagagcatgttcctgtaacaagagaagggcctcaggcagagggccacaggtgcttgcaataggaggcttgtggtgtgaatgggaacagggagcactgaattgggaaaatgccctctctgcagattatgttttatcattgggtatcaaagcagtacaacttgctcccctcaacttccataaccctcaggaaacttttgtcaacctctgcttcctgtttctctctccagcaaaataccctgggccagtccaggggacagatcccttttccccagtttcctttggaaattcttccctctccttttaacatgtttttgctcataaacattaactcagatcagctccctaggctccctcaccagttcaactgataataccaagataaatatgttttcatcaatgctgaggcaccagtcatgacacgttcctactgacatactgcttgaaattaaatatgtatattaaactgaaatatccatgtgtttacttaaaaacaggatatctgagtatttttgagtataaaattatttgaaaatacagcaacgaaaattgccaatatacaactggattataatattgttcctatacatgaaaacaatgtaaaaaaattctattgatttttgcaaaaatgtttgcgattaactttgattgtttttaataaacaatttactttctcaccataaactggaaaatgaggtgtgtccatgagcagagtaaatttagaaagatagccactgttagttcatctatcagagtaagacaccacccctagagagatactgggaaatctacaacaggtccattgtttcaaaacaagttcacttcaggatttacagatttgtaatagatatagtaaagatgttatctgaaataccgtggttgagtcctagaaaatttagactgtcatagtaaatggatgtcgtagtcacctcgggctgctgtaaaaactaacatagtctgagtggcttcaaaacagcaatttattttctcacagttctgaaagcctgaagtctgagatcaggatgccaggatggtcaggttctggtgaagctcttttcctgttttacagattgctgtctcttgcctgtgtcctcacatggcagacagagagagagaaagggggagaaagagggagtggggaggaagagggaataggggagaggaagggggaataggagagagagtgctctttggtgtctcttttcataaaagtgttaatccaatcatgagatcctcacccttgtaattttggctttctgaagagcttctggaaattttattatcaaacaaataaacaaacaaacaaaggaacagaaaaccaaagtccatctattctccactcctcacagccaactacttttgtttattttagctgattattttgagactaattttcatgttttaaatttcatgcttacgttactacttcctgaactttcagttttaggctttatcgattgctttgctatcacggaagatgaaaaatgatatctctgcaccgcaaacaaatatccttctctattgctcattcttctaattgtcatattgtaattttggttagatcaatatgtagtgtttatgttgttatgactattaacagctaatctattatataaactatgatttttccttttcgtttctctgcagatcttttaaattttttctatcagggcctttctacacatacttttttcttagtttgcaacctgtctttcttttcacttgttttatatatatatatatatatatatgtatcagcatattgttaaaatgtagtaaatcttgtcattagagtctgtttctctgtagataaacatccatccattcagcaagtatttattgagtgcctactatgaggtagcatatcttagaacaacaataacaaagctgtaaaataataaagttcctgccttgcattctgggggactcagatacaataaggctccaaaccaatcaagacaattccctgtaaatgcaacacttttgttgtgtttttgctttttaatgagaaagtgatttgaaatcaccgaatatgaaaatacatgctttctgttttgagcttataaatatgtaggttaatgcttacctagttgagatttatcatctcctttaagttatcaggtttttatttaataagtcgtgatcttaaattcactgagcagaactagagggacctagattagtgcaaatcaaagtcaagccaaaaacatttggggctttatggagcaattaaatataggaataactagtttcaattccaaatcctcttagtggattcactgtcctacatattcaaatgctctatctttaaatttatttttgaaaataaaaataaagtggcatgtggctgccaaaactttattttttaccactcaacacatcctacttcaactaacccttttcctatcctgtggtcatcgattttattgttttctagaagcatccagaaattcttacctacttgtccatcaccttaatctatgtagcttgctatcatttaccaaattctctgcctgcctgtgggtgaccaataacacagctggctagttcagaaagacccagatcactgattcaaggcatgtgacaaataaaatgacagccatatttcacttccatttccaaaagagagcagttcctcattaccactattgattttgcaaacatgtcactgatggtaaatacctttctgacaatatctgcctaatgaaacttggggagaaatgataagcctgtcattagcctttggaacaactgatagtggtagaaccaatttttgtaatttataaaaattacttgtcaatgttttatggattatctaaaagatgactcctaataaagtaggtttgaacctcgaagagttaagccttctcaagataagtcgctaaaataattaagtaaacaaatcactaattataatactagaaaagaggcataaatacttgttctcacaattaaaaccttttcacagttccaaattcaggtacatataactcaaaaacaacaataaaaaatttcatcctaattgtacaaagagactctactgggaaagcagtaacattttatttatttattatttattttgtattttagtgaagaacttctcataaaacctgattttattatctttttcaagaatagtctgtggagtttactctatttcttttcttgttttagtaaaataaaaagtagagtgtgtcgtaatatctggttgtctaaaatttatgtttaacacacctctctaataactgaaatctaagtattgtagaatccatttcaagattcctaatgcttcaaaatcctctcataaggttttaaaatgcgtttaatgttcacaaccttctcaacactttgcaaatcccttcatcggtggctcttggccatttgagattttaaaagctcccctgttgattcaatgtatagccagagttgaggctaggggccagcattcctcaacatgtgctctgaaaactgcctgtctcagaatcacctgggatcttattaaaaatatagatccctggcctcaaacctaggcctattgaaatcagaatctttgaggttatgccttaaaatctgtgtttttaagaaggtgcctttagtactctcaggggtgcttccaaagctaagtagaaatgttataatgaatcctgatttttttctttcctttcttattttcagaaaacttctaaagcataaatgatagtcctagcagcctcaactttacttttgtctgtagtgttaggctggttatcaagatttattgtttagttattttttgatctcttgcttgctcaagtctttgagatctcagactagttaatttgtttctttcttttttaaaaaaaaatagagatggtgtcttgctatgttgcccaggctagcctagaactctcaggctcaacgatcctccaacctcagccactggagtagttgccattacaagcataccccaccatgcccagcaccagttagtttcttaattcatcagagaaatatgtcactgttaccttttaattttagtattagcttgataagaattctggaaaaataattctttaataagagagcaattttttaaggtttgttagaatttagtaaaataggcagacctatgaactacttagaatataaattgtgacagtcctcaggaagatggcactttttaaaattttttttttaattttcttttcttttttttttccgggcgggatgggggaacctagaaaaaatatgctgcgtttctgtggcaggggctgctgcatccctgtgattcagccttgctcccctccgcttatcctccaccatgttgcagattctgggaactgtcaatctccaggcctacttctacccaaactcctgaatcagtgcaaatccagacagtctatctttaccagtggaaatttgtcttgttaccttttgtctatggtctcatgtttctggcatgaacccctaggcatgagcatgggtaacacaatttcttctttgtagtattcttaaattacttttcatgtggtactacaaagataactgataagtatatctctgcaacttgatgtatttagcagtttacaaacaattctccctcacacaagtaaacagccatgagccatacaacatttcggtcaatgacggatcacataggggacagtgatttctattaaaaaacaactttttaatagaaaaaaacttatagtatagtgatataaagaaagaaaatatttttgtatagcttttgaatgtgtttgcattttaagataaatcagattgatgggactttgatcactgccaatgtgaacttgggcaaatttcttagttgctgtgagtttaaatttccttacctacaaattgagattatttgaggatgaaataagaatatgggtgccaagaggctagcccataggtgactatgcatctgtcctcattctacccaatcatagtggcttaccatctccattttattatttcgtagcaaatgagaagttgagagtaagactcacagcttccagtacaaaactttagattaagttgagaataaaatatttgaatttctcccattctaagaaaagaaataattgtgaaacaacctcatgccaaatccccaagatgagtctgggcttacagaaaggcagggctatgccattgtcacacttcactgaaaaacagctcatcacaaattgctgtatgtgttcctttcccccagttcctccagaaaaattctattattactttgccaaaaacactgtgacacctaacaaggctgggaaatgcaaacagatgaaaataatgctgctctgaagtggagaaacagacacctggagaatttctcacttcaaatttttcttcacatattctgtcatttagtcaactgtccaattctctggagatgtgtttggagggcaattcaaaggaatgtaagagccaaatgaaaaagggaagaagcacatggaaaatggctttgtttaataggttataattaaagcatgcaaccagtttcatgtaatatttatacaacaccaagaaaattaatgagagagttctctaaccctcaggaactttagaataaatggcttaagccttgagaactttccactgaagttacagcaggaggcacaccgagcctcaggtgcttgtcacaaatataaaaattattctttactacttcactaaaggttattttctgtttgaacactccccaaagaaaatataatcatattaattcacatccataaaaatgacaagttctgtggtttcctatcaggcagtgcattaagcttcagtttaaaacaggtttataagaaaaccttcagtattcattgagagagcaattgctaaagaagcatttgtgtgaaaactggttaagcaatggactctagagtcaggatgcctgggtttaagtcatggcccttccactcactaagtgtgtgactttggggaggatgcttaacctctctgtgcctctgtttcctcacctggaacataagaataatataataagaacaacctacttcatacatttttataaagatgtaaaacactgagaattaataccaggtacgtagctccgacctggggttatcaaaacaaaacaagcctttgttgttgttgttgttgttgttgtttttccataagcaatttgtcagcatcaaaacctagccagtaggccttgggtaattcacttttctgagtctgattttcttagtcttaaaatagggaatatattgtacatatctgcagaatgaggattagaaatggtccttgaaatatggctacatgtagccagtatagttgttcaggcattgtagcttctctttgccattgtcgctctttatctgtatctttatatctctcttaccaccttttacctcgtaatatagatgtgtgcatgtgtgtgtgtgtgtgtgtgtgtgtatatatcctgttgtagattattattttttgaggaattattaattccttgagaaataggagaaacatatgtttatactccattgcacatagggcagtgtcttaaatgtgatgggcactcaaaaattgtttatcggataatagaaaaatttaatattagtttaattttaatactttgggatatactaatttctaacatgagtcttcttggctttctgttatgaattgtaaaatactccccaatatcttgggaacacagtagcatattctatatcacatagatatatctatatatccatatagatatatagatatatacatctacatatccatctatatatctatatagatggattctagatggttctagaattaagagatagaaatctttaggtatccattattctgctatacaagcagttaaaaatacaccaaacatgctttaaaactgcacattaagcacacgctggacaattgatttttaaaactgggtttcttcaagaaatgtcaggaaatcagacctctacgatggaaagatagtcaattgttgaaagtgtactcatgtagcagtgccaagagtggattctttcctttcagaagtctggtttccatagtgaccagcacagcatcatctgttgttttgcagcctgcattgtagggcacccaccccgattccagcatgaacaaacaagtgacagaacacagagctctctgggcaaacacattttatctgaaagtccacagactgaggaattcactgcatagttcagtttcctccagttttgccagtatcccatagtatgcttggcaacatgctggactggatggaaagacatcattcacgttggacagtttgcctcaaccagtgagttgactgtaaagggagatgtatggcaaacagagagcacctcaagttcacctaagaatatcaaagtgcctggtgctatgaaagagctacagcctaaatgtggacatttactttaggtggaagccagctttctgaactccccatttctatcttttgtatagtttataattattagcatgtcttttggaatcagacagcccaggtgtaaagcttagatgtgctccttaagaagtttatcatcatgggcattttacttaatcttttaatgcctcagtttccacatctatataatgagagtagttactgttaccacatatataattgtaagacaaagtaagataatatattaaaatattagtgtggtgcttggtgtactgtaagccctcaatggagggcagctgcttttacttttctccttttaaacaagtagactttattgtcttaaattccagctaaaataataggacaatatgaaaactcacatcttttacccatggtgaaaaagctgagtttttattcaattgatatacagtttgttgaaatattttgttcaataagatgttattgaacaagtcaattaagataaagtaaaaattttatttgaaatggcttttcagaaacactgaaatgacaattctcattattttgcaaattccattatttacaaatgtggactattcctgccttgtttccttgcctctacccttttgaatttcttacacccagattgcaagttgcgttttaagtattggtctcctgtttgtttcttatcatcacacagactcagaatctgccaagttcaggaatccacttcggctgtctgggttgtcttggtgaggatgatgatggtcatgttaaaggtgaaagagacagctggaaaagatatttaatagaggtatacatggagtgtcatggaatccattcttaaggaagaggtaaatcgtcaacctagagttgatcccaattactcttccagccaaaaggactagctattccctccagacccattgcatgagctacacatgaggcatctggccatgaacatgatggagaaacagagagctttagaatcacacatatcagaagagaagccattctccagtagtaagtaactagcagcaggctaaagtgatcttgaagcaagtgtaatcatagatggttagaagaaggaagtgactgttaacagtccagggttgcttgcaagtgtaagacaatgggaagctgaggagcagaagctaataagacaaggaaaaaaaaatctgttctggccagagcagaccaaatcactttgttagtgagctagtgaggaggatctagaaattcatttcaaggtatagattaatatttataatttctttatatagaatcattctaaagttatatgcaaatatttttatatagctcttaaggtatagtgaagattcagtctatctcaatgaatttcttttgtggccttcatgaagcaaatcagttaaagactctccatgtatttctccagataagtatacaaaagaggctaaatctcatagttgttttatccaaattccattttccatagggccaggtaagcctgattgatctctctccttgctttcctccgccacctcctcctgctcctcctcctcctcctcttccttcttttacttctttatttctttctttgatattttttctctttttctttctcagatgtatactgggcagtgggtcagagctgatgcccttcttttctgttttacatatccaggaaagccttgttttgaaagctaaaaaatgacacttaaaacgaatgagttctatacagtcttagttggcaaacatttggttaagatgatgttcccaaatctccctattataaaagtcagtgttctccttttatacacaatatgtggggtagtactttaagactgtgtagtatcttgttctccaacaattgatacttaaagttttagcatccttgacttcatcagttattatactgctagttgcaccatttctaattttattcctttaaactttcttagctggcattcttctataaaggtctttgcctttcctgctatactttgagtagagtagaactccagcttctttgatatggatattatactctttattgcttaaaattgcaataaattatttttcacaatcacaattcactgattcaaataacaaactgtaattccatttgaatatgtattttaaattctgaatcttgtgtagtatattagagcaatgaagaattcatgtaattcagaagtgagcttgctatttctttaacactgtgacttgtttagtgtttatgttttcaaacttcatgtatctttctggcctgttcatgtatctttttggcttcttatacttactttttttttttttttcgagacggagtctcgctttgtcgcccaggctagagtgcagtggcgcgatctgggctcgctgcaagctccgcctcccgggttcacgccattctgctgcctcagcctcccgagtagctgggactacaggcgcccgccaaaatgcccggctaatttttttttgtatttttagtagagacggggtttcaccttattatccaggatggtctcgatctcatgacctcgtgatctgcccatctcggcctcccaaattgctgggattacaggcgtgagccaccgtacccggcctggcttcttatgctttctaccagaggctcgtctgtcttctctcactggacttacagatatatccctagcaataaaaatgattacataatatttatggaaacaattataatactattcacagttacaaagtcatctctcagtgaattttctccacatcagtactgtactttaatatgtcagggcataaatgtttttattgcatggtaaaattaaatgagaattataaacctaaacataggaatccaatgatacaatattgcaacttctctgtagaaagcccttgggatactgttaatatttaagcatattaattaagcagaaaatggactaaatagtttgaaattaggatcatctggcccgctcttcaaagaatacaacacagactgcagaaactaaaaatcatttcttttcaaggacatgctgattggctttttgttttgtttggtttggttcataaaattgcatgaattcatgaactagtgtttctctcatgagtataatcattcctcaaacaagcttacggaagaagcagatgcggcttttcttcccataaagaccgtatgatgctgcagcagttaaacatacttctcagctgtatcttcataactgcaatttggcattgctttttaatttatcaaattgaaaaaaacataaggcaaagattatgagtaatttctctcattagtacactgattacacagattcagcatgaacaagacagatgctaattcgtgcataaagcatattccttttgacaggaaaatatacataagttgtggttgaaagaagacagcaagggtaccattgaaaaccattttgggatttatgtggaaagtttccagtgaaagacatgagctcttgctttatcacattaacaataattcctagatatagagtgtcagtaaaggcacccaaacaaagctcttctcacggagccaggtggtttggtgattggaaattttttagccagtggcaatccaagtaaatcaaggaaggtgggtgtgatggagagaaaacagcttgctcaaatgtagtcccaatttcaagtgtcatttctgctacaaaaatttcaacgtgaccttcagcaattcctttaacttctttaggcttctggttttcacatttctaaattcaagatattttgtttatatgatggcttgtgtacttctcagctataacatttgatatatggattctatttttcaagctacatagaatgagtttgtgatctaagcctctatgaactgacataaatttggagtcaaataaccctcatgacaagtggattttccccatatcccattataacctgaaaaagttggtattaaaagcaagttatttcctgataaccttctaagtacctaagtgccataaatttaagacatagtcagtggaacaagaatgatgacttccaagaataatggcaaaggtgagttttaggaatataagattaaagcttaaagctggaaggtggacagatttctatttaatgtgtaataaagtcatactctttttttcaatgcttagtcaaaatgctacttaccctatacaattttcccaatatcctctcccccatcttgttttctgttctgttcccatactactgtgttctttgtccctttgatttggtcttcttttataattaactacttacaagttaatctctccctctgtttttagaagtttctcaagccccaaacacttctttcactttgtattctttcttccttcctttatcttctcttactgttcttccacccccactcccagaacacatggtttaaatatagtacacactcaatatctatttgtcaggttgaatattattttgattgacaaatgtgactgcacatgacagcatcaaaatcattgaatttgaacagttatttgatgcaaatgatcaaattggctagttagctggttggctcagtgttctgtagatgcaatgtctgagtattagcttcattactcaaagtgaatgttacataaattgtaagaaccaactcctctgagtcaactgctattgattaatatttactaatatgtgttttccactctgttttcattatgattgtgtatagctaagtacccatcagtctctagcaggctctgagcttgttaaagtcaaggaccatgccttcttcagctttgcacttccagcatctggaatgtactaagtatgtgctttatcaacacttatcaattggaacaatcctgacctatgagcaaggttagaatttgatggggaactgaggagggaaaacaatagattaattttttcttggatgaattcataaaagaagagccttctaagaaaattgataaggaattgtagctctgtataaatatcatatttataatatattcatggtaactaatctctctctaactagtctcgatttaataatagattgctttttaatcaactcacattaaaggagtgtaaggctcgttgggatacaaagggaatcatgttaacattctaaattaaattatctgcttgactatttaaggcttttatttcattttcagatttgtctaggatttcaaagataagtttttatttattttttcttctttcccagtatgttactgagttagtttctatttaatgatatgataatagtttgttggaagtttctctcagaatgtattttccagtttataacattcatctactagatgatattaacaaataaagtagtactagttctattcttgctgcagaagaaaaaattacagaaccccaagtttctcatcagtaaaatctgagcaaacattgatcactggaggtaaaaccatgggtaagaagtaataaacattgattaatttatttcactgccaatcttccgggtccagggccaagcgtcggtgggatgatcaactccagcagagtttccagcaggcttctccttttccataaaatggatatcaacagcactctgtacctaaataatgtctaaattacagaaggcctccctcagacagcacttgataagggacataggaaactcgaccctggcactgctggctatatttgtcaaaagcgtagtgtgcagccaagatacctgtggtaattttgaagatattctgtgtattaattgctcagagtttcctttagtgtgatctctatagaagaatatatagaatatcatttcttttatattctatatgataaagggctctatggtcagattaatttaggaaacgctacatgttctgtactcctcttggacattcttaatgcatattagcatactaagaacctttgaggaattgtttaagattgctatcccagcatttcttaaacttacttaaccattctgcattctttctccttttttttcatccatacccttcctgctatacttcctcttcctttttattttttcccagaatatctactattagtattttaacctctgatgcattctttggggaaaagtcttctagatagactagaatttattttgaaataaattcagatcagcaaaaaactatagacatttgtccaggttgtttacccttgagagttagctctctttgagttgctttttggtgctatgtcctcataaaattcttatgaaagacttaaatgtaaaactcaaaactaaaaaatccctagaagacaacctagaaaataccattctggacctaggccctggcaaagatttcatgacaaagacaccaaaagcaattgcaacaaaacaaaaattgacaattggcgcctaattaaactaaagagcttctggacagcaaaagaactatcaatagagtacatagacaacttaacagaatgggagaagatacatgcaaattatgcatctgacaaaaatctaatatacagaatctacaaggaacttaaacaaataagcaaagaacaaacaatcttattagaaagtgggcaaaagacatgaacacttttcaaaagaagacatacaagtaacaaacaaacatatgcaaaaatgctcaacatcactaatcgttagagaattgcaagtcaaaaccacagtgagataccatctcacaccagtgagaatcgccattattacaaagtcaaaagataaacagatagtagtaaggctgcagagaagaagggatgcttatacactgctggtggaaatgtaaattagttcagccactgtggaagtcagtttggcaatttctcaaagaactaaaaacagaactgccatttgacccagcaatcccattattgggtatatacccaaaggaatataaatcattctatcataaatacacatgcatatgtatattcattgcaatactattcacaataccaaagacatggaatcaacctaaatgtccgtcaatggtagagtggataaataaaagtggtacatatacactatggaatactatgcagtcataaaaaagaatgagatcatgtcctttgcagcaacatggatggagctggaggccattatcctatgcaaactaactcaggaacagaaaacccaatgccacatgttctcacttataagtgggagctaaatatcgagtacacatggacacacagaagagaacaatagacgttgggatctacttgagggtggagggcaggagtagagtgaggataaaaaaactacctattggatactatgcttatcaaataatctgtataccaaacccccatgatacacaatttacctgtataacaaacctgcacttgtacccctgaacttaaaagtctaacgaaaaaaaaattcttgtgaagtctatttttatatttgctacaagaatattgtttgagagatggtacatcccaattcttattgcttctcctatgaaattatacatgaaaatgactttaagaaaattttctgttaattactagagaaactggttctcccaaagaactggtatttcttcctcatagacaatgaatgctatctgcaacaccatctccaattaatagaggaacaataaatgtataatctcagttaaccagatgttaggagatagtttgacctagagtattattaattcagcagctcaatggcattcatgacatttatgactttccattttttccagctctgccaccgtcgctgccaagcttgttctcaagctagcctcagttatggttgtataatggctacagtagcatcaggagtcaaatccttagccaataacatgtagaggaataaaacacggcaagctttttcagtgtattcttgttagtttcaaagaaacatcttccagaggaccccatccttccacccccagctttactaagtatcccttaccatctcattggccaggaccaggtcagatactcacctagcaactactagcataataactactagcagaggaaatgagtttaccatgtgtcttagtcatttcaggctgctatatcaaatatcatagactggatggattaaacaacagaaacttattcctcacagttctggagcctgggaagttcaagatcaaggttctggcagacttggtgtctagtgaggacattcttcctggtttacagatagccatcttctccttgtatcctcaaatggcagacagcagagggcaaggtcaagctttcttgcctcttgtaagagcgttaatcctgttaatgaggactctgccctcataacctaagcatccccccaaggctatacctccaaaggccataatgttaggcttcaacatatacattttggggcacataaacatttagtcaatacccccatgactgacttagattaatgagaattactctgattttttttttttttttttttttttttgagacgaggtctaactctattgccagcctggagtgcagtggcgcaatctcagctcactgcaacctctgcctcctgggttcaagcgattctcctgcctcagcctcccgagtagctgggactacaggcacatgccaccacacccggctaatttttgtatttttagtagcgacagggtttcaccctgttagccgagatggtctcaatctcttgacctcgtgatccgcccgcctcagcctccaaaagtgctgggactacaggtgtgagccaccacaccctgccaagaattactcttaatctttgtagttacatgaataaaatggtgttttgttaataaaggagaaaaataccaatcctgagtagaaaccaacagtgtctattaggaaaacttagaggatctccttttcattctaagatggtaaacttagaattgtctgtaaattgtgaacatatctctatagcttttccatatttgttctattttttcttagtggtggtatcaatttaaatttatgttttctgctcataattttatgtacacctgcattttgacctgtatttttgatgttctgtaccttacatgtctttcaaaatgatgtataatatgtgaaaattattgctaatatatcaagtgctcagctaggggataaaaaatgactaggcaactgctttggatctggacattcaagattcattgatattccagaagaatagttggaacttgtctgttcaaagtgactttggcccatgctttcaaaaacatggctgtagtaatcaacttcccaggcatggtaacactgaatattctcatgtaattaacatttttaatttatagacaagcagtagtggcacttactgtcacaggtagaatttaattagccaagacaaataaattaagtttcacacttctatcaggatagtggaattgcagaggctggtctggaaatttcaagccattgaagatgccatttgacctcccaaggaaattaactttcccaactgccattctgaaaagttctaattagattaagccatataagtattgtttatttactcattacaatggatgccatgtaggctacttttttggaattatggaaaatccatcaaatatcttttttcttaatgtagaactgcatggcaaattagatggaagtcatcttaggactgagtgcatgtcaactgaactatagggcgggaagattcacaggtgttaatcatataaacctaaagtcttattttgttcttgtcatatagggaatccaatttgtatgacactttcttttttacaagagtcttataagatatagaatacatgactcaaagtattcgaaaaaaattagcttgtgtggtaatgggaaatgtttaagaggagacaccattgttgggaaggcaaatgtagatttatttcacaggaaaataaataatgaaaatacttagggaacagtatatgattaatagtagtgatctgaaggaaaatggttacattaaataatatataggacaataaatattgtaagagggtatgcaggtaaagagataattatgggattatgataatttaagaacataacgtgtgctttgttgcctgaaataaaacaggttaaattagcatgattacttacacagaaagcaagaagaccatgtaaaaattaacaagaacactgtcagcacagacataataaagaggaagagaaaaattgatattcttgcagctggaaaagagagaaagtaagtggagggaaggacagttaaatataatatgtgattaagttattcctatgtaatgtgtaatatacattttcttagtctcccatgaaatagtgagtaaaagctaaaatttctaacaaatgctttatggagtggcttgcatttggggagtatgataaaggctgagacctgctctcagattggttcaagtgaagcttgcggggacagacacaaatttgctctattagttggagtttgttctctgagtagatttattttacttttgaatttatttcactcttggaagtagattaggctgcttttttttattgctcccttgcaggggtctagaataaccttgagctctgctttgcttctcttcttgtagctctagcactccagtaaggagcacatccctctcgcatcacaaaggctaatgatccttcagaaaggagcctcctatttttggcgtcagggtaaatgacccatgtgtgggacactatagggagtgaggcagagtggtccagcacttctacagtcttctgattaattaccttgatcatttgcttttggacaacccctgctcttagatgacttccgctggactccagccttggagtttcctggggacgtgtagaatacatgcctggatctttgtggtagtcctctcagcctgttttaggtgtatgtgcatgtgtgtaagtgagtgtgttttaaatattgactcctctcttactgtttccaattttcttccagaaatttcacaaaatgttttcccttcagagtagcctctcttgtctaacttttgtttatatttcagttggattttgaaagggaagggaagcatatgcaattagtcaagtcacaggtatatatccttgatatttttaaaatgctttgtgaattcttgggacccactcaatgaactggtatccaattttctcctagtagttaacaatactacactagattcagttttcagacctcatggtttcgtgctaagggaaaatatccatttagcccaggaaagcctttcctggaaatgacctaaagtgtaccaacttgtatatagtccaacttacacaattcctattttgcctacagatgttagcttataaagggaagcgctgatttaatcaatggcaattacacaactttgtgtggttattgacttcacatttgtgccagaatgtggaaaacatcataggtaaagggaaaattgatggaatctgagctggtactgtagttcctgcctgctgctatgtttttcttctgttaaagctaaaatattaaagttagtgggtacaaaaaatctaattagaaagaataaccaagacctaatatttggtagcacaagagggtgacaataggtaataataacctaatagttcattttaaaataacttagagtgtaattggattgtttgtaactcaaaggataaatgcttgagggaatgaataccccattctccataatgtgcttatttcacactacatttctgtatccaaacatcttatgtaccccataaacatacaaatactatgtacccacaaattaaaaaaaatttaagaagtttgactacacaaatacactagatgcacattccagctaataaagaattctcacatactcttagtgaggaatacattttccaagtgttgaagtcaaagcaggccaagtattttggaacaagttgtgaatttggaattaaaagacctgggttcaaatcttgactgtcacttttcatgatttttaaaaaaatacctgttctgcttttcctcctagtttcttcctctgaacactagaaataataatatcttcccattgttgttgagagtaagtgaggattcctagtatttaataaatgctcaataaatttaatttaaatctattattgctattttattattccatcctcctttgctgcttccttttccccatatgtccctcctattctctcctgccctactccttccccgagtgttggaattactacagccttatatcctttttctgtcactcttatttttgtattcagccccattcgtcttttccttgacttactgataactattagagcaatactaaagtcagaattttattttttctttttcactcttttctgttcaagttctcaaagtatattttttattctctaacttatcctccaacatctgcctcatggccaagctggaaatgctgaataacagagattacttaaaaccttcctactatttaaatgacttttataaaactaatgtgttaaagttagcaacactaataaacttggtaagatgttaaattaaaagtcaactcaattgctcattttaagtaggagttacaaggatgttgctctaataagccaaatgttacaagtatataaaattctaaatttctgcagagtccttcctaatacctgcccagagctagacaaactatataggaagaaggaacacttcccacaaggctgccttcatttcagacaccagctgaacactgcagcatcccaggaccacccttacttcagatgggctggctacaaacatgaggattcccataattacccttaggtttgataatttgctacaaggactcacagaaattgctgaaagctgttatactaagtaataggtttgataatttgctaaaaggactcacagaaattactgaaagctgttatactctcaaagagtatacagggaaaggatacatattaaaattaatcaaaggaagtgatgcataggtcagagtctaggaggagtctaaacatggaggttctcctctcctgtcctctccccatgaagtcatgcggagcagcacctcctcctggtcgtaatgtatagcaatggccgaccacaagaagctcatccaagctgttgatgtccagagcttttactggggatcagccacatactgtttctgctgctgatattttgtgtccagtacctcctgaagtcagactaatgcctttaatctggttactctggaagtcaaaactgatgtagcatgactcaaagcccctattaaaaaatcacagttacactgtttgacaaacaaactcttattaggcagtatattctaggggcctagagattacttcccagtagccgaaggctaagggcagacctcttgttgggtgaagttaattcttcattacacaatctgaaagtataatttctttgtcttagattatcctaaacatttctaagctgattctaaattttcatgagttggaaatatactattcactatggaagatggaagataattactatcccagaaactgagattttttttttttagcttttcacctggcatggagtctggagctgtgggtattctaagcaattctcagtaagaaactatgatcgttgcctttttcttcttataacaccccagtttgggaccaaatctggagttggctggaataatatttagatgagtatgagttccacaggtaaaagtttctctataagtaaagattcctggattctgtaaatggcatataatgttgatcttacatcagcaagctctctaagagaaaagcagtaaatcttcatcttgcttcagtaactgtgcaaatgaattccttctaagcttacctagcaagcttcccagttcagacataaagaatattaataatgcttcgaagcaattttgcaacataataggaaatcatcattttggggatgctctgctttttgaaaaagcttagatatttgtttctaaaaatcatggtgacagcatgcagctgttataatgtgctcaacacaaggagaaattattccacttgtgtgatttggaagggattttggaagcaacacctaagcacacagttgggcaagtcttgccaagatggctgcatgactctgtttatggcgattcttgtcaataatatagcagcatgcctccatgagtgagaagttccgttagcaaactctgggagctgtgcctttgtgttcagggtatatattatatacttggcctgttacgctttagaagccaattgcagcttgtttcattattgtacagatttgtatataacacttttttccttagaaaaacagttccccacaattaaacaataaagctttaaagaaattatcttcttattcatttttttgtcatccttagcttcaaactcccttgttaaagaggtggttcagcaccattatgaaatgtaggtgaaacgattactgcctatcatcaacatagcataactaaatggaacgaaacccaagtatgcaaaataatggagtatttaaacaaaagaaaaactaaatagctagtaatactttatatgcacaaagtaaaatgcataaattacaaagtcagccaattatatgggaatgcagacatcaaaaccccccaatttataatatatgtgttagtccatttttgcatatctataaagaaatacctgaggctgtgcaaatttataaagaaaaggagtttaattggctcacagttctgcaggctatataggaagcatgatgtcagcatctgcttggcttctggtaaggcctcagaaagctctcaatcttggcagaaagcaaaggggaacctggcatctcacatggtgagaaaaagagagagagacaggagcaagtgagagagggaagaagtgccacactctattaaacaaccagatcttgcataaactcagatggaaaactcactcactatgtcaaggacagcaccacgacattcataagggatctgcccccatgatccaaacacatctcgctaggcccacctccaacattggaagtcatgtttcaacatgagttttggaaggaataaaacattcaaaccatgtcaacatatacagtttctattgaaacattaaataataagatctatagtaggtttagtagctactttaattcttaagtagcaatgagcattaaataatatttgcaacaattataaagtgacaaaggcataaatactgctctgactactatgctaataaataaaagaaatgttgagtttcacctagaggtttgtaaaaataaggatgtaatccaagtcaaatgactccctgaatattttgggctaaaaatgccaggtttaggagataactaaaattaagcgtatgtttctctttctttcttacacacacacacacacactctcgctctctctcacacatgcactctgtctctctctcactctgtgtgtgtgtgtgtttgcgtgtgtgtgtgtgtgtctgtctgtctgtctgtctttggggtggattatattagacaaagactggttctagtttaattggcttcagaaatgcaaattactctcttttaacagatggccatctaaatgaactttcagaaagttatactttgcaatttctcccacttcatctctctttgctattctcagtctatttcctccaaactcttaatcaggaaagaagaaaaagtctaggatccttgggagaacttagagagctgacttttgccattttacccacaactttgatgacggagggagtcaaataaatggataggatagtggcaactgtaaagaggaaaggctttcagaaataatctgcaacaagggaagaagaaaactttgaaaaattgatcctagaagatgaacagaggaaaagcctagaagacctgaccgcaacttagaattcaatcatgatccttaaacgccagcaattatcaaatatataaatttatctattataaacacttagtatatgtttgtgaatgtgcacctgtgtgattgtgtctctctgtgtgtcaaaagttgtttgatctcccataacaacttttactgtgtggaatatgctttggatctgtgtctccaccaaatctcattttcagctgtactccccagtgttggtggtggggcccgatgggaggagattggctcatgggggcgggtttctcatgaatggtttagcgccatccccttggtgctgttctcctgatggtgagtgagttctcacaaaatctggttgtttaaaagtgtgttgcgcctccctctttgctctgttttgctcctgctcctgccatgaaaaaagcctgctccccttgtgcctccccagaagcagagcagatgccagaattatgctttctgtaaagcctgcagagccatgagccaattaaacctcttttctttataaattacccagtctcaagtgtttctttatagcaatgcgagaatggaccaatacagtgtatactgcctctccaattttagagatatggaaactgaggcatagaaatattaaattcttgcctaaggtcacacatttagtaagcagcagagccagatgtaatgtgaagtttattgcttaacacttttccgatatggaaatgtcgagggcctaggttgatcaagtctgggttttacccaagtgtttacatggatcttccaaaatttcctgaaatgcatttttttttttttttttttttgagacggagtctcgctctgtcgcccaggccggactgcggactgcagtggcgcaatctcggctcactgcaagctccgcttcccgggttcacgccattctcctgcctcagcctcccgagtagctgggactacaggcgcccgccaccgcgcccggctaattttttgtatttttttttagtagagacggggtttcaccttgttagccaggatggtctcgatctcctgacctcatgatccacccgcctcggcctcccaaagtgctgggattacaggcgtgagccaccgcgcctggcctctgaaatgcatttttaagtttcctaatttttcactggcatgtggtatcttaccctataatgcacttttaaaaccaggcacttgatatatgcacttttcctgaagttaccaaatgtgtgaatttcctccttagctaatatttcacatgcttttttgaactctaagtctttccagaacagagtgggaagactgctctagctacccatgagcttttccaaattacctgctcagcctcacttcgagctacatgcctgagctagtagtgcatgaagaagttcattagagaaaggaattggatttgattaatttttctaaacactgactaagacagtccattttgcaaacatttatattgcagtaaagtttaattatggattattttgccatgagacatactagactgacatgaaacagagagtaaacatttacaaagcagtataaatatttctaattttctgctaattgcttttttattttatttacagttttagatacaagtacatagaattgtgttatcagaataagaaatacagaaaaatccataaagacaaagaaatagattataaggaatatagaaagagtatccaatatgacaactcctatatgtacacattaaattttactctctgtgatgttaatggtcaaattagtcaaaaatagataaaccaatgtgccatctgatgtggctgctttggaataattattttgctctcccacatcattggggtgtgcaaatggcaaaactttttcagcttcaggatgctagcctaatttattctgtcaccagatttttttttaaagcaaatgtctgcattgatttgcttcttaaagtgcctaaggattataaacactaggttagaattaggctagtccaagatattttctatttgttagagaataaatttttaccttgaaaaagagctcagtataaaaaaaaatgactgggtgggaaaagaaattattgagggaaatatttatattcaggggcaaaagtccaaatttcaattgtgtgtccaatacttagtgtgtttatatttggtaattgctatttatgttggcttctgacacatgcagatttggatcgatgagccaaatagaaaggaagataagagaagcctggaatgagaagcctatgcacattagtctcaggtccaaaaccaattttgtcttactgacctactttgggtactagataatgcagaatgtaaaataataagtaaatatattaaattgtaaatctgaagtcattaagtttaactcaaatcttggttttatttgatctctaagaccctcgataaaaatgatttcctggtttgcatcagtgcaataaagcatgtaaggagagtcaacaggttcagttcattactataattttcacctgggtttataacttcactctataaaaattctggtttatagagacagagaaaagaactaactacccagtattgatcaaaacagtaagtgtatgtctatgtcatatagcacctgtagagggtaatgccatagaatttttattgtgattgctagttagggtctatgaagtccaaaaatatgtatgcaactgtataagaagttgttgttttacaggacaacaaaaggaataatgggcctaaactcatactatggaaattaattacatcaggtaattcatcagttaaattaaacatagataataagtagctcaaattaggatgtctatacaggaggttctatttttaacttccagtatctttaaggattgctaaaaaatgttaccagctcactttcctggcttccattttgaactttttagtttgttgcacaatgtccctgtgctatggtttcttcattggaacagtgacttggcatttatatagatttaacaccaattgagaaatattttcagtgtttctatgtgcaattgctctcagttcaaactgtgtagaatttttgcaaaatgtttccatagtgcaaactctctttgttcttttctttgtgtgtggagaacttaatcatttccttcaatgttctccgtaaaataactgaagcaattgctcatttcctgtgataggtgctgtctaagctctacataatcgctgcttttatatgatcagagtttcaggataggaagtgagaagagttttctatgactctagttactgacaggaagacatcaatttataggctgggaatagcttattaaaaaaaaagctctttaggattcaaaatctttagatttcttggtgatacttcatagacatctctgccaaactcatattttgtctgctcttagctgtcttgattattttgcctaagccattatcattccacctacggaaaaatctagttgacgggacaaagaaagatggcatagaaagaaagttgtgttggagctcagagaatgataccgctgtcaggcctctgagtccaagctaagccatcatatcccctgtgacctgcatgtgtacatccagatggcctgaagcaactgaagatccacaaaagaagtgaaaatagccttaactgatgacattccaccattgtgatttgcttctgccccaccctaactgatcaatgtactttgcaatctcccccacccttaagaacattctttataatttcccctacccttaagaaggttctttgtaattctccccacccttgagaatgtactttgtgagatccagctcctgcccgcaaaacattgctcctaactccactgcctatcccaaaacctataagaactaatgataatccaccaccccttgctgaccctctttttggactcagcccacctgcacccaggtgaaataaacagccatgttgctcacacaaagcctgtttggtggtctcttcacacggacgtgtgagacatttggtgccaaagacccaggtcagcgggactccttcgggagaccagtcccctgtcctcaccctcactccatgaagagatccacctatgacctcgcgtcctcagaccaaccagcccaaggaacatctcaccgattttaaattgagtaagcggcctctttttactctcttctcccacctgtctcactatccctcaacccattttcctttcaatcttggtgccacccttcaatttctcccttctcttaatttcaattcctttcattttctggtagagacaaaggagacacattttatctgtggacccaaaactccagcaccggtcatggactcgggaaggcagccttcccttggtgtttaatcattgtggggatgcctgcctgattattcacccacattccatggtgtgtgatctccacaggacacctgccttggtcattcacccacattcctttggtggcaagtcaattgcagggacacctgctttggctgctcacccatattgcagcccagggctgctcactccacccattctctccgtgtctctaccccttttccactttcctgggggcaagcacctcccaccccttttccactttcctggggggcaagcacctcccaccccatttccactttcctggggggcaagcacctcccatcccatttccactttcctggggggcaagcacctcccaccccatttccactttccttgcagcaggcacctcccatcccgtttccacttttctggggggcaagcacctcccaccctttctccactttcctggggggcaagcaccccccaccccttctctccgtgtctctacccttctctttaaacttgcctccttcactatgggcaaccttcaaccctccattcctccttcttctctcttagcctgtgttctcaaaaacttaaaacctcttcaactcttgcctgacctaaaatctaagcgtcttattttcttcagcagcactgcttggccccaatacaaactcaacagtggttctaagtagccagaaaacggcacttttgatttctccattttacaatacctagataatttttgtcaaaaaatgggcaaatggtctgaggtgcctgacgtccaggcattcttttacacattggtccctccctagtctctgctcccaatgtgactcatcccagatctttcttctttctctcctgtctgttccttcagtctccaccccaagctctgagtcctttgaatccttcttttctatggactcatctgacctctccccttctctccaggctgctcctcgccaggccaagccaggtcccaattcttcgtcagcctctgctcccccaccctataatctttctatcacctcccctcctcacacccggtctggtttacagtttcgttctgcgactagctctcccctacctgcccagcaatttcctcttagagaggtggctggagcgaaggcatagtcagggtacatgtgcctttttcctctatcagacctttcccagatcagccagcatttaggctctttctcatcagaccccactaaatacatataggaattccaatatctaactctgtcctacagtttaacctggagtgacttaaatgtcatcctgacttctaccctctccccagatgaacgggaaagagttttttctctagcccaatctcatgctgataaccgctggctccaggagacaaacttccaggaaggtattagagcagttcccccgagaagatccccaatggaactatcaggcagattccccaggtatagccaggcgagattacatggtttcctgcctagttgaagggcttaaaaaggcagcttacaaagctggtaattatgacaaacttaaagaaactacccaaggtaaagacgaaaacccagcccggttcatggcccacttagcagcaacccttagatgctttactgccctagacccagaggggccagaaggccgccttattcttaatatgtgttttatcacccagtcagctcctgacattagaaaaaagcttcaaaaattggaatccagccctcaaaccccacaacaggaattaatcaacctcgccttcaaggtgtacaataatagagaggagtttgccagacagcaatgcatttctgagttacagctacttgcctctgctgagacaaccgacaaccacgtctccaacgtacaaaaaattcagaacatccaagccacagctcccaggggctccttcaaaacatcctcgtggaccttgcttcaaatcccaaaagcctggccactgggcctcagaatgcccacagcctgggattcctcctaagccgtgccctgtttgtgtgggcccccactggaggtcggactgtccaactcacattgccgccgctcctaaggaccctggagcccaaacccaatgttccttggctgactccttcccagatcccctcagcttagcagctgaagactgacactgtctgattgcttcagaagcctcctggaccatcacagatgcttcaggtaactcttacagtggagggtaagtccatcccctgtttaatcaatacgggggctacccactccacattaccttcttttcaagggcctgtttcccttgcccccaaaactgttgtaggtattgacggccaggcttctaaaccccttaaaaactcccccactctggtgccaacttggacaacgttcttttatgcactcttttttagttatccccacctgcccacctctcttattaggtcgggacattttaactacattatctgcttccctgagtattcctgggatacagccacacctcattgccaccttttgccccagttcaaagcctccttcacatcctttccttgtatctccccaccttaatccacaagtataggatacctctactccctccttagtgacaaattatgcaccccttaccatcccattaaaacctaatcacccttaccccactcaatgccaatatcccatcccacagcatgctttaaaaggattaaagcctgttatcacttgcctgttacagcatgaccttttaaagcctataaactctccttacaattcccccattttacctgtcccaaaaccggacaagcctcacaggttagttcaggatctgcgccttatcaaccaaattgtcttgcctatccaccccctggggccgaagccatatactctcctatcctcaatacctccctccacaacccctgcataacccattattctgttctggacctcaaacatgctttctttactatttcttgcacccttcatcccagcctctctttgctttcacttggactgaccctgacatccatcaggctcagcaaattacctaggctgtactgctgccaggcttcacggacagcccccgttacttcagtcaaacccaaatttcttcctcatccattacctatctcgacatgattcttctatgtgtatctctgcacgtgagatgggtctcctgaatacagcacactgatgggtcttgactctttatccaatttgccagtctgtgtgttttaattagagcatttagcccatttacatttaaggttaatattgttatgtgtgaatttgatcctgtcattatgatgttagctggttattttgctcgttagttgatgcagtttcttcctagcctccatggtctttacaatttggcatgtttttgcagtggctggtaccattgttcctttccatgtttagtgcttccttcaggaactcttgtagggcaggcctggtggtgacaaaatctctcagcatttgcttgtctgtaaaggattttgtttctccttcacttatgaagcttagtttggctggatatgtaattctgggttgaaaattctttccttgaagaatgttgaatattggcccccactctcttctggcttaacctgacctttctctctggctgctctgaacattttttccttcatttcaactgtgatgaatctgccaattatgtgtcttggagttgctcttctcgaggagtatcttcgtggtgttctctgtatttcctgaatttggatgttggcctgctttgctagattggggaagttctcctggataatatcctgtagagtgttttccaacttggttccattctccccatcactttcaggtacaccaatcagatgtagatttggtctttttcacatagtcccatatttcttggaggctttgttcatttctttttattcttttttctctaaacttctcttctcacttcatttcatttatttgatcttcagtcactgataccctttcttccagttgattgaatcggctactgaagcttgtgcattcatcacgtagttctcgtgccatggttttcagctacgtcaggtcatttaaggacttctctacactggttattctagttagccattcatctaatcttttttcaaggtttttagcttctttgctttgggttcaaacttcctcctttagctcggagaagtttgatcgtctgaagtcttcttctctcaactcgtcaaagtcattctccgtacagctttgttccattgctggtgaggagctgcgttcctttggaggggagaggtgctctgattttcagaattttcagtttttctgctctgtttttcccccattgttgtggttttatctacctttggtctttgatgatggtgatgtacagatggggttttgttgtgggtgtcctttctgtttgttagttttccttctaacagttaggaccctcagctgcaggtctgttggagtttgctggaggtccactccagaccctgtttgcctgggtatcagcatcggaggctgcagaacagcaaatattgctgaacagcaaatgttgctgcctgatcgttcctctggaagcttcgtctcagaggggtacccagccgtgtgaggtgtcagtctgcccctactggggggtgcctcccagttagactactcgggagtcagggacccacttgaggtggcagtctgtccgctcttagatctcaaactccgtgctgggagaaccactactctcttgaaagctgtcagacagggacatttaagtctgcagaggtttctgctgcattttgttcagctatgccctgcccccagaggtggagtctacagaggcaggcaggcctccttgagcagtggtgggctccacccagttcgagcttcctggccgctttgtttacctactcaagcctcagcaatggcgggcgcccctcccccagccttgctgccaccttgcagttcgatctcagactgctgtgctagcaatgagtgaggctccgtgggcgtgggaccctctgagccagatgcagcctatattctcctggtttgccatttgctaagaccattggaaaagcgcagtattagggtgggagtgacccaattttccaggtgctgtctgtcaccccttccctttgctaggaaagggaattccctgacccccttgcacttcccaggtgagtcaatgcctcgctctgcttcgactcacactcggtgggctgcacccactgtcctgcccccactgtccgatgagccccaatgaaatgaacccagtacctcaattggaaatacagaaatcacccgtcttctgcgttgctcacactgggagctgtagactggagctgttcctatttggccatcttggaactgctcccctaaaaattatttatacccctcacaattctctaagttttctgatttccctctcttctgtcaacttgattggattgaaggatgcaaagtattgttcctaggtgtgtctgtgagggtgttgccaaaggagattaacatttgcattagtggactgggagaggcagacccaccctcaatctggatgggcacaatctaatcagctgccagcacagccagaataaagcaggcagaagaacgtagaaggacttgacttgccttgacttgagtcttcctgccttcatctttcacctgtgctggatgcttcctgccctcaaacatcagactccaagttctttggcttttggactctctgacttacaccagtgatttgccaagggctcttgggcctttggccataggctgaagactgcactgttggcttccccacttttgaggttttgggactcgaactggcttcctttctcctcagcttgcagaaggcctattgtgggacttcaccttgtgatcatgtgagtcaatactccttaataaactcatcttcatatatacatctattagttctgtccctctagagaaccctgactaagagagaagggtataaaagattctgagcctcttttgtttgttgggtaatcactcttctgtcattttttctatgtacattaatgaaaatttatgccttttcttctgctaatttgtttattgtcagttcatttcagcaaaccttcagaggacagaagggaagttttcctttagtccttacattgtcactttcattctctttcactattctattttgaggatgaataattgtgctcacatatttctaacacaccttgtaaagacttctacaatgaacactgatacttttaattttgttcaactacgttttattacccaacaaataccagtgtgctctagaataaattaaataaataagatgaaaataaggaagaaaaagttgcctgcaatcctttctcctaccttcattacacataagataaccactgttaacatttgggtacatatcctcccagccttacacataactatgtatatgcttctatatacatagataaatgtttgatgcaaaatacttacaatccacattttgttatcagtggcaagtccgtatgggtctacagcaacctcaattcttgcctcctcagaagaaagaagtcaatggagtggcataaggcagaagaagggactgaggcaagttttagagcagaattgaatgtttattaaaatgctttagagcaggaatgaaaaggaggaaagtacacttggaagaaggccaagcaggcaacttgaaggacaagtgcaccttttgaccttttgatttggggttttatatgttggtgaacttctgggttcttgtgtcccttcactcctgattctttccttgtggttggccattcacatgtgtagtggctgctagcactttggaggggggcatgtgcagtgcgtttacttgaattgtatgcatgcttacttgaggccgtcttcccttaccagccaaatgtccctaggaggtcatataccagttaaactctgccatttttgtctcttagtgcgcatgcttaagcctactctctcaactcctgagatcttactggaagctactgattaccagtttcagctttttcctatctgtagaagactgcctttctctggtactggctgcaatcaattattattttagagagactcttaaccacctgaccatcacttgattgtcacctgacattcctggttggaggttgggagggcactctcctgccctattatgtctgactagctacctactatataataatttcagaaactaattaaaaattttgcatcttttagatctttagcttaaatatgttttcagatatccttttcattctctcctaatctctcaaattaagctaatagatattaaccaggtaattgctaaacatatctttttttgcaaagaaacacatgtgaatttcctcttaaccttcctgagttcaaattaatacatttaaatatatacattgaaggcttacaagttctgaaataaactagggactgggagcaataaaaaaggtaagtattgatcactctctttaaggcaattttaatattctcagggatacaaaacaaatgcgtgatggattggagagcagttaagcaacagagaaaagagaaggggaaaacactgagaattaatgaagcctctgaaaaagcttcaagagctagaagggggctgctagccctgaggaatttaaactgtggaaaacaggaaaaaattattaaaggtgggaaaagcaacatcaactaaatcatggagtcagggatgagcttggcatgacaaaccttcataaagtggaggacgtacagtgggaaacagtggttgtgtagtttgatgagaagattaaagaaaaatataatttttattagtttataacattttgacctgaatccatattttgcccatctgagtgatatgatcttgtaggagctaaaggaaaacttccctctgccctttgaaggttcactgaaatgaactgactataatgggagaaaaggcatacacatttcttaaggtgcatgggggaaaaattacagaagaatgattatcaagccaatgagggttgcaagttaaatattcttcttcatagggaaaggggaaatggggaaatgtaggcatttttgaagggtagtaaatgatttttttgagaattgaatgggcccaaaatagcagacaatagtttgtaaatgattctctttggaaactaaacgggacagaacagacagtgatctgggataagtttcctctgagctctgggtgaggtgatgaattgccaaaaagtgaggagtggaacttcagtgtgaacaaatgctgtcttattatgccagataaagtcttccaggtaattttttgttgctgccctcacactacatgaaaagtctgcctgtgtgtggcaatgacttttagtcttttctctggttatttgatgagatccctagggagagagttttaagacaattgaattttattttggaagaagtttccttgccagattagggaactttcagagagagttcctctttgcacttgggtgggtggtggtggaagtggatgtgggtttgtgatgggagtggagtggggtggggattgagtggggcttgggaggggtggtgaaaaacaagaggttagaaaggttttggttctgaggcagctctaaggccttcaagtttcctttaattcaaaagctctcagcatgtcaaagcaccatattctggggtatcatcctctgagccccaacaatagtgattttttgaaaactttattaaatgtaaatttttacatccatcttctttttagccctatatcaaaatttttacctgcttgccaatgtcttccagatctttcaagtcaaatatgtcgcacaatgcattcattatattctctctaataaactttctcaattatcaccaaggaatctgttaagcaaaatttaactagaacttgtcgcagtaaggaagaacaccagtttaagagtcttattagtgtctcagaattggaagtcagaagcagaatatctacggaatattggcaactaagatcaagtaattaaaagtcttcaagatcggagctaattgagactgtacaaaatctcctacagaaagtcttgataagtaaacttttctttggtaagtgggctgtttgctcaggtgaacaaactttttgatacagttatctgaaacaatcaggaattattttttgccgtacagtcttattttgccttggaaaagttttttctaaaacaaagaactaagccacattgacataggtggtctacagactgtaagtcatgtggacatagatggtctcagttctcacttccctaaaccaggtcccaaggtattcactggtaacacccaccaatggctcctcaattcatatgactcttcctaccctcccaggggaaagaacttgctagtctgacttcccatcctcttaattcaggcactcaccttcaactcccatattttgcaactgccacccaaatgctcttctagcatctcttctgtctccattctttctttcacaccaaaattagagtttgacttctgaaataaacaattgaatatgtaacttttctcccaaataacttataatactttcccaatgcttgagagtaaaacttgaacttactagcactgacttcaagaccccattagctggtcccagtctcttaattcactttaaactacatttttaatgtgtggatattttcctgaacacagcatgaaactttcaggcttttgctctacctaatatacccgtctcacctttcactgctcaaagaccaattttctggtctctttttttctgggatgttactctctctttgtttgcttcctacttttttttttttttctatttctttctgccttccttctaagttcttcatttaccagttgctttaattagtgaccccagggttatgtctttggctcatctcagtttgtactcttgttttctttttagatgatctcagtcatcttaatagatctatttctttatactccacagctccccaattcatatgactcttaaactttcttctgagctttacatgcagattcaccagggctatgcataatcccttgggattcatagaggtatctcaaatgtaacatgctcaaaatcaaacctattctttctcctacaatccttatgagactattgtaactcaggaaacaaatctgcatgttatctccctcacccctcacagccaatgacttagtttgctttgcccattttacttcctctgaatttctcagaacttcaccatcttcatgcctctacagttgccctagtttatgccttattatgtcttgcctgaaattttgtaacagcctcctaagttccctctcatataccaaccttgccattttcaaatacaacttccatagagccacctgtgtttttaaaatgccaaattgctgtcacttaaaacccttcaatggctcctaagagcctacagaatataggtcaaactttttaacatgtaatataaaaccttctataaaacttgggccctctgaatctgtcctgccttatctgccttgtgttttgcattccagcaattaggacttttaactttttgcctttgagattatgtttatgatgtttcctttgcctgtagttcatgtatttttcaattcttctgttattcttcaatattccatttaggcatctttctaaggaatttatcttacctcctcttcctcttctctgtatagcaccagtggcgtacttctaaacacactataatgaagttatttgttgtcagcatcctacttgattctgtaggatttggaccatgtctttattttgcctattttatttaatctttactaacatacaacaaaataggtacagttactatgattctcacttgacaagtgagaattttgaatttatggaagtttaatcatttccctgagtttatatataaatagcaggttacaaagtctgaaccgaaacccagatctgcttggctcttaactactgtgctgcagtaagatgatgttacagtgaaattagcacagcgtctgcacattttagatgctcaatgaacattatctatcatcctagtacattgactgttataggtgctcaataaacattttttgaaatgaaagatgactcatatcttccaagttgaatgaataaatttcttagaataatttctaaaattactctgtctttaatctgtacagcattcatttgaactgcagaattgtgagttgtttaaatgtttaatcctcatataaccatatctgaagttaaaaataagtatgtcattcatattatttgtccactattttccatgtgatctttgtacatagaggtgctcaaacatttcagtgggattagattattgaagtaaaatttacatacatagggatgcataaatctttttttttttcttttgagatggtgtctcgctctgttgcccaggctgtagtgcagtggcacaatctcagctcactgcaacctcttgcctcctgggttcaagcgattctcctgccccagtctccgaagtagctgggactacaggcgcatgccaccacgccaggctaattttttgtattttttgtggagatgggttttcacatgttagccaggatggtctcaacctcctgaccttatgatccgctcgcctcggcctcccaaagtgctgggattacaggtgtgagccaccgtgcccggccgggatgcataaatctgaagggtacagtgaatgaggtcaagtgcgtacacctaccccattatgatatagagcatgttcatcacccctaaaggtctctttatgcctttttccggccagtccaggccccattcatcatgcaatactattttgaattttgtcattagagacaacttttgtctcctctagaactttatataaaaagaatcatttagtatgtatccttttgtgtctggcttcttttgatcactttcatgtttttgaggtttatccacattttatatatgtcagtagtttgtacatttttattactaaataacattcaattttatgaatatacagcaatttgcttttccatccttttattgatggacattttggttatttccagcttttggctgttgtcaataaaactgctatgagcattctaatgtaagagtttttatgtgcatatgtttttatttccttagggtgaatatgttgaagaggcagctatgttattgagtagggatgtgtcttagtctattttgtgttgctatagcagaatacctgagactaggtaatttataaagaaaagaggcttatttagctcatggttctatggctaggaagttcaaggggcatggtaccggcatctgcttggcttctggcaagggcatttatgctgtgtgacaacatgacagaaggtcaatggggaagcagacacatgcagtggggcaaaacctgaggggcatccttgctttctaacaattcactttcataggaaggaatccattcctgaaggatctaatccactcttgccagagagaaaactctagagagcaccaagacattcatgagaaatctgcccccatgacccaaataccttccacttagtcctacctcccaacaccaccaaattggagatcaaatttcatcctgagttttggtgggggcaagccatatccaaaacatagcagaatgtttaattttatgagaaactgctgggtacccttccaggttcattgtatagtttatacttttaccaccaacatataagaattccagtagctctgcatccttgcctacatttcatattctcagtctttttattggatattttggatatcatttttattaaatattttgaaatatccctttgtggctttaatttgcatttgctgatagttaatgatgttggacatgttttcatgagcttattgtgcatttgtgtattttattttgtacaagctgttaaattatttggcccattatttataggattattattgaggtataattgtgcttcatatattctggatacaggtgcttgttcagtatgtgcacgacaaatattttctcccaagctgtgactctccttttctttttagttatatcttttggcaaaccaaaatttaaaatttggaagcttaatttgtatattttggtgtgtgagattattgctttctggatcctttgtgagaaatctttgcctaccacaagatcactatattttcctacttccgttttcacaattttatagctttagcttttatgtttaagtctataatctatgttaaattactttttatgtacagattgagatagggtccaagacttttttttttctcatatggatatcttgttgtttcagtagtactggatgaaaagactttatccattgaatcatgttgactcctttgtaaaaaaaacaatagatttgacaagattgtgtcaattttggactttccattctgttccattcatatatttgtctaattttatggcaatattattatattttaattactgtagctttgtcagtaaattagatgtgatattccttaatttgttatttttttatttctatgttaggtcttttgcatttccatagacagtaagaatcagtttgttggtttctacaagagattctcctaaaattttcattaagatgttattaaatctaaagatcaatttgggaagaattgacctcttaaaatattgagtcttcaaattgattaatatggtatagttctctgtttgtttaggttgtaaatttttctcagaattgttttttagttttcagtgtggagatcttgcacatatatagttaaatttattttgaagtttttatgtttttgatgttattgtaaatggtgtaattttaaatcacactttccagtttcttgttgctaattatatgtatgaatgtggtacataaaatttattttgcatattgaccttctatcatatgactgctaaatccactaactcgttctggtatatttcttataaatttcttagaattatgtacaacacaatcttgtcacctgcaaataaagatattaattgttttattttttcctttctgatgtatatgcctattctctctcttacttcctgccattctgcattaaccaaagccttcattacaatgctgaatgacagtaataggagcagtaatagtttttcatcttatgaagatagtgttaggtattttaccattaaatatgatgtttgctgtagagttttaatagataccctttattgaagaagttgctatttactcttagtttaccgacagttattataatgaatggattttaatttgtaaaatactttttccctgtaatcccagcactttgggaggccgaggtgggtggatcgcctgaggtcaggagttccagaccagcctggccaacatggtaaaaccccgtttctactaaaaatacgaaaaaaattagctgggcattgcggtgcatgcctgtaatcccagctactcaggaggctgaggaaggagaatcgtttgaacccgggaggtggagtttgccatgagccgagattgcaccactgcactccagcctgggcaataagagcgaaactccatctcagaaaaaaaaaaaaaaaaaaaaagctttttctgcattttttgagagattattatgtaagctttttgtccatattctattaatgtggattgatttttgaatattaaatcaacatcttattctcgagattcctttatcattatgtgtttgttatactttgctagaggtaaatttattattttgttaaggatttttgtatctatgttaaaaaaatattggtctgttagttgtattttttctccctaatatctatgattttagtatcatggttatgctggacttgtaaaatgagttgaaaattgttcccttcttttctcttctacaaaagagttttcataagatagatatcatttattccttaaacttttaatagaattcaccagtgaagctatttgggtgaagttgtctttgtcagaagatatcaaattatgaaatcaattttgtaaatacatatggggctattcagatttttaatttagtcttgtgtgcttttaagtaatatgtctatttcatctaagttgttgaatttatttgcatactattgtttcaatattttatatttaacattttaaattctgtaagatctctaattatgtctcctctttcatttctgatattggtaatctgtgttttatttcttttcaatcagagtagctagagatttttcaattatattaatctttttaaataatcaatatttgattccattcatttttctctttttatttctgttttgtatttgatcgatttctgcttttatttctattattttcttacttcaacttactgtgggtttactttgctctacttaacttcttatagtgtatgcttagatcattaatttaaaccttgcttcttttctaatacaagctttgaaaccataaaggtaattctgcttagttaattctgcagattctgatatactgtgtttttgatattgttcaatttgagatgttttttaattgtctttatgatttcttctttgacacatgggttgtaaaaggttttttccttaattcccactattttaatttttcagatttattgttattgatttataatttaatgccattgtgatcagagatcatattttgaatagttttaattatttaaattgattttttaatggtctagaaatatgacttattttggagaatattttatgcatcctagtaaagattgttgttgggaatagtgatccataagtatcaatttggtcaagtcagttgataagaatgctcaactcttctacatttttactaatttcctgtctatttattttatcagttactgacagaaggactttgaagtcttcagttataattgtagatttatccatttttcctttgttttgttagtgtttgcttcatttgaagctctaaaattgtttggaatcacaattagaactgctacatcatttttgatggactggctctgttatcatataaaatatccctttttattttatttttaataaaatccttattctaaagtttactttctctgatattaataaagtcattccagctttcctatgattactgtttacataatataaccctttacttttagcctacctgtgtttttatatttcaagtaagttgaatcttgttgtttttagtctagcctgataatctctgcattttaatttgtgtagttagtacatttctatgcaatgttattattaacatgtttgagtttaagtctaccatcttactattagttttattcttgtctggtataatctttgttttattttttcttttttaaagtcttactttgaatttatttttctaatatttcattttatttcctccattggattttagctacaattcttcatgtatttttaaatggttacactagaatgtacattaatcatctataggttattaaagtatattttcaagaaatattatataccttcatgtataattttaagtttttagcattatacttccatttattctctcctatgctttgttcttgtcatattttacttccatatattatgtaccccatgatacttcattattaattgtgctttaaaaagtcaattaaccttagagttttttttgttttgttttttgacagagtctcactctgtcgccaggctggagtgcagtacgatctcggctcactgcaacctctatctcctgggttcaagcaattctcctgcctcagcctcctgaatagctgggactacaggcactcaccaccatgcctggctaatttttgtatttttagtagagatgggattttagcatgttggccaggatggtctcaatctcttgaccttgtgatctgcctgcctcagcctcccaaagtgctgggattacaggtgtgagccaccgcacccggcctagagtttttaaaacagggaaaaataaattatacttacccatatacttactatttttaatattcttcattcccatgtgaaggtctatgtttacatttgttattattctctttcgctctgaagaacatcctctaacattatttgtagtggaggttactggtaataaatgatctcagctttatttgtctgaaaatgtccattttactttcttttttcatgacatttttctctggatctagaatcctaagttgacactccatcccacccatcccccaagaaccttaacaatatcattttattgttactgttgttttctggctttgtttctgatgaaaagttaaagagttattttataatttttttcctattaagtgtttgtgtcttttttcccgttggctgcttcaaggatgttttctttattattcattgtcagtaatttgattatgatgtgtcttggtgtgattttcatttgtgtttattctgcttttggtttggtttggttcttaaatctatgtgtttctatttcatatagtattttgaaattctaggctattggttcttcaaacatttttgtgccccatgctttttctcttttctgagactctgattatgtatttgttagacttatatcgtctcagagatcactgaggctctaccagttttctaaagacttcttttttcttttttctttattattttgattacctggttttaaaattcactaatcttttctcctggagtatctaatcttctattaagctggtacagcaaatttttcatttaattatatttttagctacagaatttcatctggttcctttgtatggtttccatttaacagacagtctctattcctttgttagagtcatgttttactttatttaaaccttgaacatgaacatacttataatgctgtttctcagagtctttaattaaatcacccctgcaatttctagttctatttttatttactgagttttctcgtgattaggggttatgctgttctgcttctttgcatgtctaggaagttttgattagattctagatatttgaaatgctatgtttgtgaggatctggattttgttatcttccttgaagtgtgttgagttctgttatgtcaggtgcttaacatatttgaatatcagcctgatcttactgaggccttttcaagctttattgtggcaagtttgaagtagattttgtggaatgaaccttattcctcagccttggtctttctggaatctcttctgaatgccctgggtgttcaacaaggagtctccactctggctaatcacaaatcaaattcctctctgtcttacgccagttctggtagttattgtggttatggcttaaggtggttgttctctctccagcagttgtgctttgcctagtttcatgtagtatcatcctatattcaaccaaagattcaagaggaccctttagttgatttctggagctttttctctgtgcggctctttctttgcccttcaaatttcaggtacctccatctttcttacctcttatctctcccctaatttctgccttatattctttatatgtctgccctctaatttctgccttatattctttagatccaaaagtgggctcaggaagcaatctgggtcaattgtggagtcctatcatttgcttcccttctctaacaggactttaccacagtcctgtgatatttgttgtttagcctctgaaaaattttattttatatactttggtcagttttctaggtgttatgacaggaggcataacccattatttagttaactccctcacagatcaaattgggagtctgataaaattagatgaagatactctatttaccccgatgcaattagtatacattgtatgcctgtatcaaaatatctcacatatctccaaaatatacatacttatatacccataaaaataaaaaatagattaaataataaaaattaataatgttataaatttacaggctaaattgaaataatttgtattagtttaggatccatcttattatttattaaagtatgttttagtaatatattgatcacttcctcattcttattaaagggatttttgcaatagttatttgtcttgtactctcattacataaacatttcaacttccacaatgtctgctttggtctcataagtggattattctttgacaacaaagcagctgaagaatattgctcattgatgagtaggcaactttctgaagtttttatttgttctcaaacttcttcttgttaattatgaaaaaatagctggtctactgaaaactaccagagagaatagatttggggaatattgatcgacaggatgtatcttgctaaactcatccagcccactgagctgtgataagcactttccttcatctggatgagtgagcacatggtgtgtctcatttaaaaaccaaaacagttttcagaaatttatagcagcatgaagctgtactatagtaatgtcctcttaacaataagcgtatctataaaaaagactggggttgactaagtgaggacctttgaggaagatgttaaaaatgctgacgttgcaaaggcattgaccccagttggcaggtcttttttgacctttctgcctctcatgaactgagcagaaagtagccatgaaaccaaatatgtggcagagaaaatgaccaacctgtaatatttactctagactctgaccattatccagtattttatgatagagacaaaagccctttttgactctggagaaaaatatagagtagtaaaagttttgaaaacataatgtataatgtatgagggtaagttttgtggtttgaggttacttggagattagaagtcttaggaaggaataaaggtttggtcttatcctattggctttggaggttgaataatcacagatgtgaaaaggcaggtctgttctttcaaaaccctctgcaaaccagaaaacagaggtgagatattggaattggtgccacaggcaaactttctttacttttcaaatgtgtctacctccccttttaacaaactcttgaggagacaaattattctgactcatttgaaccaaagtgaaaatgaaataattctcggaatcttttgctatatccagtagtgtgctggtaaataagttctcctgggtggtagggctggggggtaaaaaaaacccttatttgtagtgctttctgatttccatggtgaaaatatttcatggccaagttcaaattaccagattttaaccatcgatttgcaaaattgctggacatttaacagttggcatggtctctcatgagtggctccagcttaccaatggctaaatcatattttgcagtacaggaaatgttacactgatcctattttagacaaaccagattggtcctactttataaaaaagagttcagtttgtcctacttcagaattctgcacccacattttgtgcagtatgactttgggagaataaactctctggctgtatccaataatctgtgatttattaatattacctaaggttactgtaaaaattaaatgagataaagattaagtgcctaccacaactcctgaaacataataaacatttgataattggtagctattattgattttatgtagatttgagatattctagtgcagttacataaaagtaactgctttttatatctgatgatagagaaaataaatttaaaaactatgatgaataatataattttttgaaaagtaattttattttaatcacagcaggttcaatctgtacttgaaaaattatttgtatgaaaaattattctgactacagataatgcctggctgcatataaatttttagatattttaaataaatcaatggcctcacacttgtcaaagacccatagtttggaaccaccctgctggacattttgcagtagagagataagtgtgagagaacagtcaacacctacagaaatgggtaaatggataaactgataaaacctcctggagtcactcacactttcataaatgcagttctccactccaaatgtctaagcacttttgtggacttgataatggaatttcaagcaagagcaaattgtatgtagattaggtggaactgacttcattgtttaaaggttttattagttttcataaagaataagtgtttttctattttttagaaccctgctcttttgaagagaatatcaatatattttgactcgtgagaaaaataacaatgaaagtggctcatgtagtcatttacttaggattgaaatgtctttttgctagaatgcttttggagcttttgaagtctgaagttcactaaaaaattacaattagatattttgtttctataaggtccacctgaaagaattctctttgaatctttaaacgcggtttctttaataacagaaatatcataaaaattttataaaacatttcaagaggtagcatgagaatatttgtaatgccgtgtgtgtgtgtgtgtgtgtgtgtttgtgtgtgtgtgtgttggcagaaatagtaagatctctttttataatgctattgtgccaaacttatcaaaatacatatacttaagttttgttattcatatttaacaaatgactctgattatatctgaattcaggcctgtcagtggtggtaataagactgcagccaccataattcaaaacaatatagacagcattcacagatttctctagccttctacttttgtgtaatcttaaagctttccaattacaccattggaaaaattactgaaaatgcaaatggataagaggttgtcaagcagccatgtgaaccggcaagaataataatgttggcagttctgtaatcaccgagcatacaaaagctgacagaacaaatactttctttccaccaattgactaaatgtatactattgctgcctgctttaaaaaagcacaggtgaaaacacaccattctctgagttggccatttaagcattttcagactcatcatggcttgctgactggcagaaagaatgactgctgtttaatatggaaaaagttattctataatcagttgtgttgaatgcattataaggacacacttctttttcagccaaggagcaaacagtagccagtgtctcctcttgcaaatggcctttgttagtcaatctaaccttacccattaattggacatcatccaaggagacaccaggctgttgccctgtctggaaagcccaggttgcttggtgaaccaggtgcaggacctggaggggctcccacctggctcatgtttcagagttcctgggctgctagtgaagtgagtcctgaatatgaggggacaagaagatcactgagtgccagagatgattctgcagtctgtccacttgcccaggttctcagtttatctgcttctgaattacttcttttctgaaaagacttgcatgagtttctcagggctgctgtaccaaagtactacaaatgctggcttaaagtaacagaaatttattcttttgcagttctagaagttagaagtcaaggtgttgtcagggctctgctccctccaaagcccctaggagaggatccttccttgtctctttcagcttctggtaatcctagtgctccttggcttgtggcaacataactcctccaatctctgcctctgtcttcacatggccatctccctgtcttcagatggcattctcctctcagtgtttatgtccacattttcctcatataaagacacaaatcatattggatcggagcccaccctaatgatcttatattacttgattacattggcaaagatgctattccaaataaaggtcacatttataggcagcaggggttgaggatttcagtatatcttttgagagaacacaattcaattcattaaaggacccaaggaggcaaattacgtcttctggcactacccaagacggagtaggtcaattatggcaataggatatgagtgctccaagatgtttgagacaaaaaaaaaatgaatgaagagcagattgtgattcaaggacccaaggagacaaattacatcttctggcactacccaagggggttaggtcagttatggcaataggacatgagtgctcccagatatttgagacaaaataatagcaaagagtaaattgtgattcattcacttgtttttaactttagcgttatgtcttatggacctaatatgcaccaggcatacactagacttgcctgtaaaagacaacatacacaatgaagtacctgcccttatggagtttggagttttgtaggggattatacgaatagttaattaaacatagttgagttaaatctagtgaatgaagattttggaatgttgtaagagcatatacttggaggatttggtgtggtgtgaggaacaaaagaaggccttcctgaaaaggaagataataatgacagtgatagtaacaataatacaaataatatgctaacatctattaagcatttactatatcctagacaccattttaactatttttcttgtattaactttcttcttcatacctatcccactttacagatgaagaaactgaggcaataaaaggctagataaattgccaaaggctgtatgaaatttaagatttctgctgatacctgattaggatttagagaagtaaggaagtggggaaacagagctccactggaggcagcagcatgtgtgaaggctctgaggcaggatgatttttctgtgactagaaagaggtgagcaagggggaagatggtgcaagaaaagtgagagaggcagtcaggagccagatcccaaagggccttggaggccaaggtaaggcatttatcttaaaagtaatgagaaactattgttgagtttatatgggacaatgacttaagggaatttgtattttaaaagaaattagttgtaatgtggatgaaggattagaggaaggtaggagtttccaggaaggctaacaagaaacttcaggaagaagataatggtgtcttggactaaacttgtgataatggagatggacagagatggacatatttgcaataagtaggaaatggaattaaaaagacagggccaacgctatgttcaatgggtagacggcagtgtcatttactgtgataagagagtaatggggatgaagagcaggttttgaaaggaagatcatagctttgctttggacacattgagtttcagggcctctgtggcactcaagtcagcaagggaatacagtttgcagttcagagacagtgtcagaaaagaacggtactttcatcataatgacagcatatgaaactgtgggaacggatgagtttgcccagagggagaaagaggaatgtgaagaggataaaggtgttaatgtgagttccaaggacctccagtatttaaagacacaggaaaggaagagtagacagtttgaaaggtggctgagaagtaggagtatgatgcaatgaaagccaagggagagaggatttgaaggtggtaaacatgtcaaatacttctgagtaagatgacaaatgaaaagtgttaattagacttatattagtagcataaaattcattggtgcccttatcaaaataattttcgtgatgtggagagggcaaagagcatactgaaatgagtggactggtgaaataaggacaatgggaagcaagaagtttgtaccttcttaaagagaagtttggctttcaatgggagatgataaggcaggggctgaagatgatgtgagattgtgtgtgtgtgtgtgtgtgtgtatgtgtgtgtgtgtgtctgtgtgtgtgtgttttaaatagggggttttagtttagatcaaacataaatgctaaaagcaaggactcagtgaagagggagagagagttatttaggacacagaatgaaggggaaattgatagcataaggtcctaggaagtttgaaagtgatgggatttataataggcagagaggagagaaatggcacagaaacagatttggtagcagaaagtggagagagtttgtacttccaagttttttgagaaataggagttgagatgatttgccctgagtaagggttagaggcgcttggcagtttgaggaaattgaaataatattgcagaaagtgggaaggatactgtagaaatccaggggagaaagcaggtggctcagagatctttggcatttagttttacagatatgttttaaacatctaggttgaggtctggtgcataagtcagcacttaacatatttgttgaaagaatgttatatgaatttgaggttgcaagctgaccattgccttaaggccaaagcatggggaagacttccctcttgttttatattttatattgagtctttttacacaaattgaagatagttcctagcaggctcaaaaaggaccactggcattaaaggtttaagatgatgtgaagaaatgtagacttttctgtcttacaatctatatgcccccaaaaaaattacacacattttcaccctagttctcctagaaaggcagtccattctctataagtccttacctttttttcgcacaatgtcttctttcctttaagggatcattgccaaggacacttctacatgtaggacgcttttgtcaaaggcttatcgcttctttctaagaaaggtatccacattagaaagagatttgccatgaaatgggtggcagttattccatgtttggaattagtatagcctttggaagagttaatggtgtgtatctcatgtgtttcagggtgtagtccggtcttcactaatgatgtaccaatgacttcagtctgttttcacaagttttgccactactgatggaaacttaacacctacgttggcaatcttcatttttatcaacattgttgattaagtttagcaactcaactttcaattctttagtaaatatccttgcgtcaccacatattctggtggtggtatttaggcttctcttttaaatgcttatacatttatctcgaaactgaggcaagcttaatcttttagtgatttttattcttttttttaaattttattattattatactttaagttctaggatacatgtgcacaatgtgcaggttagttacatatgtatacatgtgccatgctggtgtgctgcacccattaactcatcatttagcattaggtatatctcctaatgctatccctcccccctcccccgacccgacaacagtccccagagggtgatgttccccttcctgtgtccaggtgttcgcattgttcaattcccacctatgagtgagaacatgcagtgtttggttttttgtccttgtgatagtttactgagaatgatgatttccaatttcatccatgtccctacaaaggacatgaactcatcattttttatggctgcatagtattccatggtgtatatgtgccacattttcttaatccagtctatcattgttggacatttgggttggttccaagtctttgctattgtgaatagtgccgcaataaacatacgtgtgcatgtgtctttatagcagcatgatttatactcctttgggtatatacccagtaatgggatggctgggtcaaatggtatttctagttctagatccctgaggaattgccacactgacttccacaatggttgaactagtttacagtcccaccaacacaacagtgtaaaagtgttcctatttctccacatcctctccagcacctgttgtttcctgactttttaatgattgccattctaactggtgtgagatggtatctcattgtggttttgatttgcatttctctgatggccagtgatggtgagcattttttcatgtgttttttggctgcataaatgtcttcttttgagaagtgtgtgttcatctccttcgcccactttttgatggggttgtttgtttttttcttgtaactttgtttgagttcgttgtagattctggatattagccctttgttagatgagtaggttgcgaaaattttctcccattttgtaggttgcctgttcactctgatggtagtttcttttgctgtgcagaagcgctttagtttaattagatcccatttgtcaattttggcttttgttgccattgcttttggtgttttagacatgaagtccttgcccatgcctatgtcctgaatggtaacgcctaggttttcttctagggtttttatggttttaggtctaacgtttaagtctttaatccatcttgaattaatttttgtataaggtgtaaggaagggatccagtttcagctttctacatatggctagccagttttcccagcaccatttattaaatagggaatcctttccccattgcttgtttttgtcaggtttgtcaaagatcagatagttgtagatatgcggcgttatttctgagggctctgttctgttccattggtctatatctctgttttggtaccagtaccatgctgttttggttactgtagccttgtagtatagtttgaagtcaggtagcgtgatgcctctggctttgttcttttggcttaggattgacttggcaatgcgggctcttttttggttccatatgaactttaaagtagttttttccaatttggtgaagaaagtcatttgtagcttgatggggatggcaatgaatttacaaattacattgggtagtatggccattttcacgatattgattcttcctacccatgagcatggaatgttcttccatgtgtttgtaccctcttgtatttcattgagcagttgtttgtagttctccttgaagaggtccttcacgtcccttgtaagttggattcctaggtattttattctctttgaagcaattgtgaatgggagttcactcgtgatttggctctctgtttgtctgttattggtgtataagaatgcttgtgatttttgtacactgattttgtatcctgagattttgctgaagttgcttaacagctgaaggagattttgggctgagacaatggggttttctagatatacaatcacgtcatctgcaaacagggacaatttgacttcctcttttcctaattgaataccctttatttccttctcctgcctgattgccctggccagaacttccaacactatgttgaataggagtggtgagagagggcatccctgtcttgtgccagttttcaaagggaatgcttccagtttttgcccattcagtatgatattggctgtgggttagtcatagatagctcttattattttgggatacgtcccatcaatacctaatttattgagagtttttagcatgaagggttgttgaattttgtcaaaggccttttctgcatctattgagataatcatgtggtttttgtctttggttctgtttatatgctggattacatttattgatttgcatacattgaaccagccttgtatcccagggatgaagcccacttgatcatggtggataagctttttgatgtgctgctgaattcggtttgccagtattttattgaggatttttgcatcaatgttcatcaaggatattggtctaacattctcttttttagttgtgtctctgcccggctttggtatcatgatgatgctggcctcataaaatgagttagggaggactccctctttttctattgattggaatagtttcagaaggaatggtaccagttcctccttgtacctctggtaggatttgactgtgaatccatctggtactggactctttttggttggtaagctattgattattgccacaatttcagagcctgttattggtctattcagagattcaacttcttcctggtttagtcttgggagggtgtatgtgtcgaggaatttatccatttcttctagattttctagtttatttgcatagagttgtttgtagtattctctgatggtagtttgtatttctgtgggattggtggtgatatcccctttatcattttttattgcgtctatttgattcttctctctttttttctttattagtcttgctagcggtctatcaattttgttgatcctttcaaaaaaccggctcctagattcattaattttttgaagggttttttgtgtctctatttccttcagttctgctctgattttagttatttcttggcttctgctagcttttgaatgtgtttgctcttgcttttctagttcttttaattgtggtgttagggtgtcaattttggatctttcctgctttctcttgtgggcatttagtgctataaatttccctctacacactgctttgaatgtgtcccagagattctggtatgttgtgtctttgttctcggtggtttcaaagaacatctttatttctgccttcatttcattatgtacccagtagtcattcaggagcaggttgttcagtttccatgtagttgagtggttttgagtgagtttcttaatcctgagttctagtttgattgcactgtggtctgagagatagtttgttataatttctgttcttttacatttgctgaggaaagctttacttccaagtatttggtcaattttggaataggtgtggtgtggtgctgaaaaaaatgtatactctgttgatttggggtggagagttctgtagatgtctattaggtccgcttggtgcagagctgagttcaatccctgggtatccttgttaactttctgtctcgttgatctgtctaatgttgacagtgtggtgttaaagtctcccaattttattgtgtggaagtctaagtctctttgtaggtcactcaggacttgctttatgaatctgggtgctcctgtattgggtgcatatatatttaggatagttatctcttcttgttgagttgatccctttaccattatgtaatgaccttctttgtatcttttgatctttgttggtttaaagtctgttttatcagagactaggattgcaacccctgcctttttttgttttccaaatgcttggtagatcttcctccatccttttattttgagcctatgtgtgtctctgcacgtgagatgggtttcctgaatacagcacactgatgggtcttgactctttatccaatttgccagtctgtgtcttttaattggagcatttagtccatttacatttaaagttaatattgttatgtgtgaatttgatcctgtcattatgatgttagctggttattttgctcattagttgatgcagtttcttcctagtctcgatggtctttacattttgacatgattttgcagcagctggtactttgttgtgcctttccatgtttagtgcttccttcaagagctcttttagggcagccctggtggtgacaaaatctctcagcatttgcttgtctgtaaagtattttatttctccttcattaatgaagcttagtttggctggatatgaaattctgggttgaaaattcttttctttaagaatgttgaatattggcccccactctcttctggcttgtagagtttctgccgaaagatcagctgttaatctgatgggcttccctttatgggtaacccgacctttctctctggctgcccttaacattttttccttcatttcaactttggtgaatctgacaattatgtgtcttggagttgctcttctcgaggagtatttttgtggcatcctctgtatttcctgaatctgaatgttggcctgccttgctagattggggaagttctcctggataatatcctgtagagtgttttccaacttggttccattctccccatcactttcaggtacaccaatcagatgtagatttggtcttttcacatagtcccatatttcttggaggctttgttcatttctttttattcttttttctctaaacttcccttctcacttcacttcattcatttcatcttccatcactgataccctttcttccagttgattgcatcaactcctgaggcttctgcattcttcacgtagttcttgagccttggctttcagctccatcagctcctttaagcacttctctgtattggttattctagttatacattcgtctaaatttttttcaaagtttttaacttctttgcctttggtttgaatttcctcctgtagctcggagtaatttgatcgtctgaagccttcttctctcaactcatcaaggtcattctcagtccagctttgttccgttgctggtgaggagctgcgttcctttggaggaggagaggcgctctgctttttagagtttccagtttttctgctctgttttttccccatctttattgttttatctacttttggtctttgatgatgtacagatgggtgtttggtgtggatgtcctttctgtttgttagttttccttctaacagacaggaccctcagctgcaggtctgttggagtttgctagaggtccactccagaccgtgtttgcctgggtatcagcagcagtggctgcagaacagcggattttcgtgaactgcgaatgctgctgtctgatcgttcctctggaagttttgtctcagaggagtacctggccgtgtgaggtggcagtctacccctactggggggtgcctcccagttaggctgctcgggggtcaggggtcagggacccacttgaggaggcagtctgccctttctcagaactccagctgcgtgctgggagaaccactgctctcttcaaagctgtcagacagggacatttaagtctgcagaggttactgctgtctttttgtttgtctgtgccctgcccccagaggtggagcctacagaggcaggcaggcctccttgagctgtggtgggccccgcccagttcgagcttcccggctgctttgtttacctaagcaagcctgggcgatggcgggcgcccctcccccagccttgctgccgccttgcagtttgatcttagactgctgtgctagcaatcagcgagactccgtgggtgtaggaccatccaagccatgtgcaggatataatctcctggtgcgccgttttttaagcccgtcagaaaagcacagtattagggtgggagtgacccaattttctaggtgccgtctgtcaccccgttctttgactaggaaagggaactccctgaccccttgcgcttcccaagtgaggcaatgcctcgccctgctttggctcacgcatggtgcgctgcacgcactgtcctgcacccactgtctggcactccctagtgagatgaacccggtacctcagatggaaatgcagaaatcacccgtcttctgcgtcgctcatgctgggagctgtagaccagagctgttcctattcggccatcttggctcatgatttttattcttgatgatgatttagtaactttgaattcacagagagaaaatctacttaaataactgtaaaagcatatatgtggatacacttgatatattgattaattactgcatttttcctcttgctttttccagattagttgtgtctcttctttatgtctcagtatgtttacaaataatgaaaaataactttatttttcagattgcattattagagaagaatttaaaatattttatattttaaaaggtgatgttggtttatttcacagaaccaggaaatcctcaataagatgtaacataccaccaatgataaaatactgaatatgattgtcaaatatattcaattatgagggtgatgtttctagcatcatattagattttatttcgtagtttagaaaaatgctattcatcatccagaattatcagcttttagaaatttcagtgccatttgtttttgccaaggaatgacttgtacatgaaatgcattacagaatagagcctaatactccatgaatggcttgaatataagtgactcattatgggctaagtgacaattaattcattttcatcattcttagattcatttcaattttggtgaggccaattaaacacctgagttgcacctgtttgaatgcatgtgttaggtctgcatataaagtaactacaggaaaataaatctatttctacatcctacagagataagcagagtgcactgcatgtggtaaatcctcgataaacaattactaaataaatgaaaagttgctcaaattctcacactactcatttataactgtagtacatatctacttttctcaaatttacttgcatattatgaaatatctgctgtcattgaaacaattcttgctaaaatattctttccgttagtatctattatgtatttagggtaaacatgatcttcaagtattttacttaactgcgagaaacaagggtcctttagctacagagaaaactttaaaattctaatgacttttgcatgtaggaccctctattatctgactttaggttgctgccaatggtcttgggtgtctcaataatcagaacagagcagaggccctgaattgtgttgagggaatatcaccttttaacaaagaggattaaaatagttattgcagccactttgtagatacagaataggacctcattcttaatttgcttcagatgtcaagactgatggagccacacacacaatgtatgaaaagatttattactaacctctcaagcaggtccaaaatgatttgagagtgcagggagcgaggactttcctggggttttaaaggtgattaagagaaggatcaaggtgagggatccttcatggttgcagctccttgttggtgccacaggaaagagcaactaggctttcttatcagcttgcccagaagaggggcagaggggaagaaggaggaagaaaactgaaaacatgtctgcagttacacattaaaaatgtagtcagactaatactaaagccatcatgggaaatatcagaattttgtgggggaaaactgaaagcttttgtctttatattgttttcagtgatctatttcatggttgatgggaaatcatttcagtttgagttttttttattattattattattattatactttaagttctagggtgaatgtgcacaaggtgcaggtttgttacatatgtatacatgtgccattctggtgtgctgcacccattaactcatcatttacattaggtatatctcctaatgctatccctcccccctcctcccaccccacaacaggccccagtgtgtgatgttccccttcctgtgtccaagtgttctcattgttcagtttccacctatgagtgagaacatgcagtgtttggttttttgtccctgcgatagtttgctgagaatgatggtttccagcttcatccatgtccctacaaaggacatgaactcatccttttttatggctgcatagtattccatggtgtatatgtgccacattttctttatccagtctatcattgatggacatttgggttgattccaagtctttgctattgtgaatagtgccacaataaacatatgtgtgcatgtgtctttatagcagcatgatttataatcttttgggtatatacccagtaatgggatggctgggtcaaatggtatttctagttctagacttgaggaattgccacactgtcttccacaatggttgaactagtttacagtcccaccaacagtgtaaaagtgttcctaattctccacatcctctccagcacctgttgtttcctgactttgtaatgatcaccattctaactggtgtgagatggtatctcattgtggttttgatttgcatttctctgatagccagtgatgatgagcattttttcatatgtctgttggctgcataaatgtcttcttttgagaagtgtctgttcatatcctttgcccactttttgatggggttgtttgtttttttcttgtaactttgtttgagtttgttgtagattctggatattagccctttgtcagatgagtagattgcaaaaattttctcccgttctgtaggttgcctgttcactctgatggtagtttcttttgctgtccagaagctctttagtttaattagatcagtttgagtttttaaagcctggaaggttttaattggtcctgggccataacttacttttttactgtctttcccacaattcctcttcttggaacaaactctctagccacatagaatcatcagtttaactccctgcttgcgtatctttgctcatgctcttctcttgtcctctgagcctcttctaatctcatttgcaggtgtcagtttcatccattctttaagtcctgctcaagggcttgaaccttgtattagttcattctcacactgctataaagaactgtctgagtctgggtaatttataaagagaagaggtttaattgactcacagctctgcaggctgtacaggaagcatggctggggagtcctcaggaaacttacaatccttacagaaggtgaaaaggaaggaggcacatcttacatggcaggagcaggaggaagagataaagaagggggaggtgatacacactttcaaacaacgagatttcatgagaatttactatcacgagaatagcaagggggaaatccgatctcttaattcaatcaccttccaccaggcccctcctccaacactgaggattacaatttgacatgaaatttgggcggggacacaaatctaaaccatatcaaactttttttctggttttgcatcttggaagcaattacagattcttccaaaggcctgcagtatatatacatatttttttctcttgcggcatttgtcattgtctagctagtctctgaaagtacctaaagactagaatccaaatgactgattgatttttatatcttccacattgtctttcacataggatgtcagctccaagaaggcaagaagtttgttttgcacactattgttcctttatcacctagaacagagcctggcacagagtagatgcttaccaaatacttaacaaaaataaataatagaaaaatatttgttgaataaatgaaagctaaattaataaaacctatctgattcatttcttaaatttgctctttatacattgcataaacaaaaaagaaatacatattttgagaatttaccatttcaactgatttagttggcagttgaactaatttaaagggaagatcaatattggatcaggaattcacagctgaacatctctgatatggttctgtaacagagactctagcatttttaggaattgggacagactgatgaaaacagactgtattaaataacctgaagatcattgtgaaggtacttgacaagcattgacattttgcttttgccctgttcctggttttaagagctttatgctaaatctgttcttttatcgtagccgtaggaaaaattgtagctgattggtgagtggagtaagaggttcacttcatcaggctgtgcacaaactttccttggctgtacttgtggtacagtatttattggagattaacctatgacaggctataaaacaagaaatgaggtcaattacagatccatgtgaacatatgggatatcaagagggtaagtctgagtgagggagacttcataagaagagagaaatctggagtcagtacttccaaagacagtgttagccccagggctcaaggccattctcttttccaggtgagtataaaccaaacacaatttgtaagggtctgtagtatctgagctcagatacacattcttcaaatgaagagtgtcaacatccaacatcagaaattcctagctaaaccagctttcaattgatggttgtttttttgttttgtttttaaaatgcctccttattttctacttcttctgtatctcttcatatcaagaacttgcctgcccatcatttttagattacagatgccacagtagaaaggacaaaggaaagaagaagggcagtggaatataggagggataatcaatgagaacaggaggactgttaagctgattactgagaaacccggggtagattctatttcccactctttgagtcttggctagtcttgtgatttgctttgcctaaagtgacattgtgagtacttcaaagccaaggcctcaaaaggccttgccacttccacctttgctctcttggatgctgtcttaaaacttcatggaagagacccatctagcttactggaaaatgagaggccacatgcagaacagctgagacacccagccaacagtcaacaccaaccaccaggcatttgagagaggccatcatggccctttttttgttttagctgaatgcagctgtgtgagtgagctcaggtgaaaccatagaggggccaaccagctaactcacagattcatgagaaataagaaattgtgttgtttttagccactaaactttggaagtgatttgttacatggctaaagataacagacacagcttgcttgtgagttttgtatttatatagtctatctggcaaatcttaatcatttcttccactttccaacttgttaggtttttcagaaaacacaattacagcatctttatgaaatctctgaagtatcattaatttgttcatttgttaattcagtgtggtattgcttgagtatcctatatgtgttggaagtaataatagcaaggtgagactttagaggtaaactgatgctagaccagcacttttcaaatcaatatggattgccaatttttaaaaaaagagaatagactagaaatcaacatcatatatagtaaaggtatatgttgttttatttaaatgtatgtgtatgctgaaacataacaaagatatttctcttattgtgggtctttattttaaaaactataaaagcagttgaactagataactgagagctttatataccatcctaaaaaaaaccaaacaaaccatgattcacccctatagtctgaagtgtcattgaagagttttaggcatggtcaggtatgtgttttagacttatcgtgctggtggctgtgtgctgatggacctttctgaagggagaatgacagaaatagggagaggagttagaagcctaggctgaaacaggggtaagcagagagagtttaagaagcctttactaggtttggcgagaaagaagtatatttgagaagtgtttaaaaattcaagtcagatatacagcacggaatactatgcagccataaaaaggagtgtgatcatgtcctttggggggacatgggtggagctggaagccattatcctcagcaaactaacacaggaacagaaaaccaaacacctcgtgttctcacttgtaagtgggtactgaacaatgagaatgtacacagggaggggaaaaacacacactggggcctgccagggggtggggggaagaaagagcatcagtaaaaacagctaatgcatgctgggcttaatacctaggtggcgggttgacaggtgagcaaaccaccatggcacatgtttacctatgtaacaaacctgcacatcctgccccggtaccccggatcttaaaattaaaaaaaaaattttaagtcagaaaaactcggaaaactactgaaaatgagagtgaaggggagggtgaaatacatcaagctattgatactagcaggtcttgatagattttaagtggaaagtaactttaagtaagacatcaaggatgacttgtagatttctatcttgcgtggatggcatagtcaccactagggataaataatgtggaataagggcagccattgtattgtgactctattgatctagtttggagcatggcaagactgtgctgtttacaggtcattcaaatatcaggcagctgaatgtatgaggctgaagctagagaaacagatgtgggtatcattaggtggtgattggattacgatggtagatatgtaaagagaccgtgtaaaaagagaacactgggcccaaggaaaggacccttaaatgttggggaacacttaaatagtcaaagtaaaaggagtctacatgatggcagaggagaaaggccagacctgcagggtaccagaaatcaaaggaagggatattttcaaaaagactgggtttaagaatgtcaaatgcaacaggtggatgtaggaggatgaaggctaaaaattattgtttagatttggcaattagaaggccactaggaggccacttgtaaacatgtcagtagagtggcaggggcaggagccagatggcagtgggtggaacattaatagaaaaagaaaagactactcttgtaggatgattggatgtgagtaaaaggtgatctagtgtatggctgtggagttcaaagaggtttctggatttttgattggtttgttttacctgagatattcaagaacatttaaaacctagggagaaggaatcaggaaagggaagagagaacatgaacacagagaggcagggggaaatgacagaacacaacccatcaccctccagaggcaggggccaaattttgttgctggctacttccccaatctcccttgcaggtgtctcttcttttcattgctttggccctgacatatttaaggcctccattgcctcttgcctgactactgtctcctcagtctttggtttaaagaccatgggattaaaacacacacacatgcacacacacacgcacacacacgaattgtggcaagtagaaaagaacaatatatgagttgtccttctagctctgtgtgacaagtactccacccactgtcacacagggcttttggcagtgttagggtaggagcatgtaacctttccagggaggttcagaaaactcaaattgacatttgaactggctcttggaagatgaggtgtttgtttttgccagaggtgcaggacatttgaagtagagggaattgcgtgtggaaaaggaaccacagatcacaatggccaggaggtaagtggttatggaggggtctgtgagaactgaggttggatgggcaagcttctgtggaattttgtttgctatatcttagctaataaggggacatttaaaaatctttgatcagaaatgatacaggatcagatctgtgatttagttcttttaattagtattaatggtggagaatttttttcagaaatttattctaaagacccagcagtctagttaagacataactctatttagagccaggcacggtagcttatgcctgtaatcccacactttgggaggccgaggcaggcggatcactaaggtcaggagtttgagaccagactgggcaacatggtaaaaccgcatccctattaactgggcatggtggtgggcacctgtaatcccagctactcaaaaggctgaggcaggagaattgcttgaacctgggaggcggaagttgaaatgagccaagatgcgccactgcactccagcctgggcaacagagagagactccatctcaaaaaaaaaataaaaataaaagaactatattcagaggcaattagctctagagttgcatcccaactctagccttactattttgtttgaatttggcaagttacttagcctgtttctaggtctcaatttttccatctgcaatatggaaattacagaggattattgtgtgggttaaatgctatcatgcctacagtgcctgaaaagagtatgttttccgtcaatgttagctttcctactctatctttggaaatagtctgcctacatttttttagcatattttcaggcttattaatataaagaccacagtgtgaaataatcataattctgcatttgaaattttactgtttataaagaggaagctgactgacagaagtgattgattttatgttttagtataaaaaatttcaaacatacacatagagaataatataatcaactcccataaacacatcacccataattattaattattaagattttgtatttttgctttattgatttcattttgtgaggcattttaaattagtcagacatcacgcataccccaatgtgcatgtgatgcaatatacccttaaaaatgtgggtatactgctacttaattaaaatgcattatcatacctaacaacatccggcaaatattcatatgactccaacagtaaggacggttctgtgcacatgtagagctattcatattttagaaattttgttaataaattcatagaaatcagtgaataaagaaatagttaatttattactcccaaatgtatgtgtagttttaatagtacaaaaaagtattgtgcagttaggttggcttctgattcaatatatagtcttcagtgtgagttaataatattcacataaagactagtgccattaatgatgacagtttaaacttgaaaaatcaatactgatgcaaaaatagatattgtttccacatgaaaagtcttccaaacattatcaacaggctagacttgcttgtattctctgtaaagatgtatattttaattgaattaaaagccactgacaggctgggcgcggtggcttacacctgtaatcccagcacttttggaggccgaggcgggtggatcacctaaggtcgggagtttgagaccagcctgagcaacatggtgaaaccctgtctctattaaaaatacaaaaaatagctgggtgtggtggcacatgcctgtaatccagctattcaggaggctgaggcaggagaatctcttgaacccaggaggcggagcttgtagtgagccgagattgcgctactgcactccagcctgggcgacagagcgagactctgtctcaaaaaaaaaaaaaaaaaaaaaaagccactgacattcaattttgtgatcagtgtatatgtgtgtgtgtgtgtgtgtgtgtgtgtgtgtgagagagagagagagagagagagagagatagaaggatagaaggggagagagaggatgcgtatactttccctttttgtaagtgaagttactgagggtaatggctttcttcataaattagacatacaataacaaaggcttattgttcaaattgtttttacgtaagtgtgacaaactgctcaattcaaaaatgtctttatccttgaaactgaccttatcctagtcatgggttgctggcatttaatattcaggcttcctaattcttttttgaaaggctgtcgcaggagaattgcttgtggaatatataatgatttatttagtctcacagtccttcatatctgggaaacttaaaaaaaaagaaagacaagatgattcttccatattaatggaaacaattgcctatgaattgtttttaaaaagttgacagtagaaaattaaaaataacataagtttgtgattttaaaaaatgtttttgctattcacaccatccattcatatcgcagcatccatattttaagtgcttcagggtaagatgttttatagccttgcattgtttccatgaaactagattcacctgaccagattaccaaaaccttagaagtcattcattcttcacagtgaatttgagtacatttatttcaggaagctaatattcacaaacctggaagattgctgagaaacaaaaggataatgatgacatagggcatgtagatcgttttctttctgacataagtctaataaaacaggcagaaaagtaactgcatctacatatttaaatgtttgaaaagctttagccaaacaactgattatctttaaagagaaaaaaatatttaactcaagtggcttattagctaaattccttctcattttgcctgaatgtttgtgtttgtggttaaaaaggcagtaggtagaataaaaaagatgattgcgaaatgaaggtcagctaatcctttatttccaaatacacatttggtaccttagaaatactttctgaacttctgggggttacctgtaagccagttaattctgcaatatcgtccaccacacattattagtgctacaaggagtcaagcctatctttaatatgggttgaatatgattttggctgcaaaaagaccacttgacatctcaattagaatgtcagataggtgtctcagacttgaaccagtctaaaattatctcttctaaatctatgatttccatgacttcctgtacctcagctgctcaggctaaaaagctctgcttaaagtcaccttgactcctctctttctcatacagcccacttccagtatgttagataatcctgttggctctacctttaaaatatcttcagaatccagctacttcttcatctccaacagcaccccagtccaagccaccccatctctcatgttgattattgtcgtagctgactcactggtgcctcactctggtctctctatggtgtagtctcaacatagcagccaggacgacatgctttaataaataaattcaccacttgaaaccctccaaaggcttccatctctctctgagtaaaacccaaaggatgcattacagcctgcaaggcactgctaggcctgacccccagtttattctgctcctccttggttacatctccccacacgaatctctttgttattcctcttgcacaccaggcccattcctgtcccgaggcttttgtacttactagtttctctgcctagaacatatttttccagatattcacatggctggctctctcatctcctttgaatctttaattaaatatcatcttcttagtgaggacatccctggcctcctcctttaaaattgcagtacccccaatgttcattattccttttcccagctttctttgccttgatagcacttatcgccacctaagccatgatattttttacttattcacttttttattgtctgtctcctcagctagaatattagctccctggaggcagagagaattttttgtttgttttactgctgtattccttgtgcttacaagagaacctagcataaaatagatggtaaacatatattgaatacatgaacaaatgtgcttatagagctgtttcatacaatttcatgttgtatgttttaaaaacatgctcacatacaatacatataacttctgccatgttaatacatatctcaacctcattagctggaattgcaatatgtcttatgtggatatagctcaggtattaaaaaacctttaaaatatttctaatttttcataaacagaatgtagcctgcatattctgtgcttactccttgggcatatgagtctctatctaagtagtatgacagatttctatttcaactttactaaattggaattatgcgtctcagaattccctttcttacgtaattcctatacagggtgggctctgagagacattgtgtgcgagattgggaaggtggaagttggcaggagccataatcccttttatgcttggcaaggcagagctaggcaccaggcctcatcgttggagctcacacacatacaataggcttatctactggcttgtatgaccagcatggggcaggagctgggccacaactaggccaactccagctgaacatctggcatcagtttctcttactcctgggaaaggtgcatggttagcttcatgatgacacatgccaacctctcctgcagaacagcctaatcatctaagtgagaggtttggtggtgttgagagactaatgcaggtttccattcttccttgttgttttagcctcagcctccaggttctagaatgtcggtcattttgtcttcccctacatcactttctgtcttcccttcctcctgacttcccttcctgactgccctgtgagctgtaccttccagcatcaggcacaaacacgacagtctcatatagactgtgcagtgagctcccacaattgcataaggtcaaattcctaatacaagtaattatgggtttttaaaagtaatggcaaaaaccacaattacttttgcgccaacctaatacttcctaataaaactgcttctgtggtgaaatgctgactgaaatagtagctatcaagaaagaaatttgctaggtcataggatttgtgcatttttcattttagtagattaaaagtttaattcttattctatgaaatgttgaaagcatttttccccagggacctataaattgtgaatccatttcatttgtttgcacgttaatgacattgagaagatggcagaatgtgtttgcaggtgtgctgggagggtgcctatggaggaaactcaggaaagaagagtaaatgagaacatatgatgtccagtcctcatctgcacagctggcctcagttaacaggaccactgtgaatcaatttacattttaaatactccttttgtaatgccagaaatcaaaaacataatttcaacaaaataaaagcttattgttttttgtaaactgactgtcatgaaaggtttgttgttcatgaacaaaagcaagtttcctcaatgtgttcgttcttaactcttggcagatgttggacagctgtttgtactacaggcacatggggactcttaggaacaacaccctcttaattactcaaagcagctaaaattgttgcataacttagtgatggaattttaaaaaatgtctcacagcttaaaacagtcatattaagatgctgcagcactttgctattcctttgataccacccacatcctaggagtaagttccttagacctgtgtgtttacagaggctcggcaagatgttttaatctcttattcttttgttattattggtagaaataggttctggaagacaaaagcagtaagccactaaagctatcagtaacaagaggccatcccaaaaagttaaggaagattcctctttgggtggagggatgtggttaacaagaagtagagcctccctgcctcctctaatactgcgtaacatgggcttcacagcccactcctaccagcccaggctttacaatggaaaagtaactgtggctggcccatagaattcccaaagtagggcccacatatatctctaagggaatcaatgttcctagacgacatcagattcaggaactaggaaaagcaaattcttgtatgaaatataattcattttgcatgtagatgtgtacagtcaccaagcaaagggttaatagttatctcttccttgaaagctaaactccctgcagcaaagcacactgactctgtgggtctctggggagctctgtcttttctctctgctggcagccaagtgtctgagcacagctgggaaggagcaggaatttaagctgctctgcaatgagatactttacgaactggtcttgcttatattccaaagggtatatattatgtgctcttaagtcactctccaggaaatctgagaacatgttctagtctccttaggtggggattaggatgcactcaagctttgaaacagttttactgataatgtataatatctgaacccatttgcagcaagtcttcccttctccagtccctaataatcagattcttgataatgttttcatttcttttaaatttgtttaatttttcttttttaaacataattaaagctcgggagagttaagaaatatcttttcttcagagcacttttgatctagggttctgtgatttgtccttctcttcctctaacttttccatgagtggggtgcattagcacggccatggttggctctaaaacaccctctcccttggcagaccctttcctactcttgagcagaaaataagtgtacttcttactcctgactgatgtcattttctctccccttcatcccacagagggttcccattctgggaggctgtgtttaggcttatgggaggagtatatatacatacagcatataccattaatatgttaactgtgggtccagggtaggctgtgggcacagtagtaacctcaaatgcatatttgctaacaatcagctcattttacttacctcctccctctacctgacagcatcaccaacacagagaaacctcctctgacacagagttccagtttatccttccctgcctaactttcccctaccagagtctaatagcagaaaaagacatagacctgagcttggttctatatggatcccatttcatggattaatgataaaaagcaaggatcacagagctgtgttatatgggtttgagaccaggctcttcatttactaattgcataatcttggccaaattacttaatctgctcctcagtttcctcatctgtaaagtgggaaataaaaaacagtatatttatcccatagtgttgtcatcagtattgatggaaataatgtatgcctcttcttgagtagtatgcttgaccaatagtaagttctatgtaggtattaactattatcctctgacatatttgaaatactgtggggtgccaaggtatttcttctcttgtaagaggacaattctagtttattgatcttattaagttgaaataacattcagactcttcaactttctcactcccctttccttttccctttctgttaattatatctctgtgtctgcatagggacatgtagtacaaaaaagtccacgttgctgcctatgagtgccaagggctccttaggcagcactttgaaatatttgaccattctaatggtgtgtctcctgatgcattccaatgctcataacacaacttagttttcttcatttaacaacgacaataacaacaacatgcaactagtagcagctacttaccatgaaatagagcctatgataggtagatatactacagtctgtttctttaaaaaattaatctttacttttagaaatatggtggtaaataccaaatgaaatagctaaaagagtgaaagtagtttcctctgggaagaagacactggagatgggaatggatcaggcagggaattgcaatggtatcgttatgccctttgcaaaattattttacttttagttatttcttctggtatttatcatcattacagaaaatgctcgtacttccatttcttgattttctttttcagttttatgcattacctatggctttctgttatgaagaggtgaaggtttatctctcttacacccctccttccatcatcccaatatattatgattagctcattactgtagacagcattctgactgtaaatattagtcaccacagagccatgtggcataattttattttatgtccttttgtcatacagtgttgactatccttggaattgatagctattatttttgtttacttttctgtggatcaatcagttattcataccctcttgacatcttcaaacacaatacataatctatcagatttggggttttttttagctatgttcttcttgccctccatcttcctgctctaacatagtagttaacctgagtctcctatcaacatcacctggaggcaggatgtgaattccctctaattcactcctttgttgaatttcttgcttcttgaatacgctattttccttttgttggtcaggtggagcacattatccgccagactcctgaggaagggaacagagaagacatattttttgagactttccatgtgttcatatctattattacttacaacaatttgcaagataattttattatacttattttcttgattaaaaaattgccctctaaagaggtttaagacattttcccaaactcatatagctattatgaagtagaactgagaagggaattggcagagttgtatatctaatacacaacatatgtacaactctgtatatataatatatatgcaactctgccaaatgcaattttgccaatttgtacacacacacacacacacacacacacacactacagaattgactagtaccatttatcactaattcatttcatctttacagaaacaaattttagagaattattcttgagattaagcatatatttttattttatttatttaatctttttattccgtttctagttttgcctggaaaattaattcttcactcttttcaaatgattatcctagattttaaaatgtcattttctgtaattaggatatcagcttgaatgttaaaaaggtaataatcaatggagaaatgtttacaaatataaaaattgagtctgattataatatatcatatgaattttcgcttagagatttaagattttttcacatggatataatataaatagcgataggactacaaagattttaacttctagctgagtaattaaaaaacttatctagaattgctgaccacagttctaatagtagagaaataattcttcattcctaagtcttaattattgagttatttgacaattgaacttgaagtccaagcaatgacctagatgacttttacctgtcctttttagacctaacatgttaaaatggcttcatattaaaatgatagactaatataaaaatggtagaccaatacctaatttctccataaaattattatggactgaacattttttgtgtccacctttcaattcatatgttgaaaccctaacgctcaatatgatggtattcggaggtgaagcctttgggaagtaattaggtttaaatgaagttataaagttgggtcccccctcattcttctttacaggaattaaagagatctctaaagaatacagagataactgatataagaaacagccactacacccacggtgagatacagcacgcagagaaaggccctcctgatccaggctgaggtccaggcctctctggagcggggacagaggtagcttactggctctgcttactggcagagaagtcccagcagtgttgggctaggagaacgtgcctgaagtcttcctcggggatgttggagaaggctgactgcaggaaattttggagcctcagaactttctaggtgctgagggaagctgtgggctgctgagcacttgtggaactgggtgctggaggggctttcttctgcagcgtttagttcacttttgtgcttggattggaccagagtatctctaggacatttgcagggataaaagtcaggtggccagcttgctagatgcccagccttatgcagtcctgggcatgtacgttcctgaggtttggaacagtgacctgggctggggcaccagcctgcatgctcttgggctcccaggtataccaccactgcttgagtagagagctggaaggattgcactgcagccaaatactggagaaaggagcattccttaggaactgagcacgggagaaactgtgggccaagcaatagagaaaacactctctgctggagtctggcaagagagccacgcctgaaccaaaaaaagaaaactcctttctccccaagtctcccttcagcatcctctattgacaaggatgaacatcttgctgggtggcaaagaagaaagtttcagggcccaattcttttatcacaaagcatggaagaagatgaatttgtggtttatctgtaaatacaaaataaccagtatcatgtcacaatcagaaacatacatacaaagaaataatcaattcataagcattttccagtatgcttggcactatctgctttgaagaaatcaaaaattataatctctagcagagcaataaatgtaacatgcaccatatttcgtatctggcatccagagacatttaaaatctagtcttcaaagaacttaagctatggctgaggaggaaagaatataatgcaagaaacaattaaaaacaagcaacaatatgaagttgagtgttcaatagggtcatacaaactttttgccaagcaactatggaagtgatacaatttttaccattgtttttatgtttttacagatctctaattctccacagacacactccaactgctttctacttaagcattttttcagttccacattaaattatagtgtatttccctacaagccttaaaaaccacaaataaacattaccttaaaaattctataaaatattctacattcacgaattctgaatttctcaaagcctgaagaccattactttgtagattagctagaacttttcttggttaaattaccattgtttctccatcatagtgacttcttgtttgctgccaatttgtcacttggttttcttactattgtttgttttaagaaatgaatctcgatagtgaagagaacatatttgaattcagtatacccggtttcaatcccagctctgctacttgttagtattgtgggcatgaccagcttacttatctcaaggatttcagtttctttatcttggaaaggaaaataaaaataaatgtcttatcatattctcataaggattaaacacttatataacttacaaagagatgtacatgtgtatttatatagtatttagcatactgttggtatactgtaaatattagttctcctttcaaggtttaactagcataagaaaggagagaacagaaactaatcagtttatttcctacttgataatatctgtgataacagaagtaaggggaagaaactttgaaactcattgctaaatacagtcattcatcagtggacatcagtatgatgcagactttcctatatattgatggacacagaattggccctacaaccagaatgtcttaacaaatcaagttgtgagtttgggtgcacgtccatttattcatttccctccttctcctaggactgtggctgctttggtgctctcagaaagtgagacaacattaaatttagatattctgggtaaaattgggtcctgggagtacacagaatgtctacattccgagttcatccgctttcttcaggatgagccaagatcaactggaacagtccacgcagcttacatggtatcgcgagaagcttgcagttgccaggtgttctactttctgctctctcccacatggcaattagtgaaactgtctttcaactactctaataaatcaaactttattctctgtctcatctggaatgctaactttataaatcatctactccacacattatttgccccacatttcccccactgcattacaaacctcaaactccacaaaatgccggggaacaaatactaacaaatttctgagataaagcagacctccttaaagaaagcagaggctatttggtctgctttcattttattgatcagaataatgtaaaaactataaatcaaaaactatatagttgagaaggaattgaggcccaagatatataaagatctagaaatcaagcaaacatctgtgttgaacaactttaggtctcaggtttagatctctgttttcatggtaagctgtggagatggaaatcacaaaatcattctgaaaagtcatgggaaacagtagcaaaaaatcaaaattttgaaaccatgaagaagttggattccacacactaacaaacaaaaacttcaccacaattttttggaagatgctgcaatggattaatcaaatgacagcttgtgagctcttagaaaggaaacagagttctctgcaaaccagcatgtgttctctatgatcaaaccatgtcagacagaccatgacttgacccaattctcacaccttatacaaacattaacttaaaataaatcacacacttaattgtgaaatgtaaaactatgaaactttaaggaaagaaatacaggggaaagcgttccagattgaaagctcagacaagtgttctagatttgaaaccaatggaataatccatgaaagaaaaaaaactgataaattgaatttcataaataatatatatattttttgctctgcaaaagaccttgataagagaaaagaagtcactaactgggagaaaatattcacaagtcacatatccaacaaaggactggtacctacactatataaataattctcaaaactcaacagtaaaaatagaatccaactaaaaaatgggcaaagccataaaaatatttcactgatgaggatatacagatggcaaatcagtacagaaaatgatgttctacatgattagccaatgaaataccactctaaatttgtcagaatcactaaaataaaaaataacaggaacaccaagtgcttgtgaggatgtggggaaactggatcactcatacattactgatggaaatgtaaagtgatacagcccttctggaaacattttgtcagcttcttagaatcttaagcttgcaactattatagaatctagcaattgcactcatggacatatatcacagagaaattaaggcttacatttacaccaaagcctatacaaaaacatttacagccccaaactggaaacaccccagataatccttcaacaggttaatggttaaataaactctcataatccataccatggtacactgctcaataataaaaaggaatgagctactgatacatgaaataacctggatgcaactccataaaattatgctgagtgataaaagtcaatcccaaaagtttgcatcatgtataattccatttatataacatttaaaaaataaaattaaagaaatggagaataaattagtggttgccagtgatgaaggaacgtttgttggttgggaagaaagacgatgtggctataaaagtgcagcatgagagatctttattgccatgacaatgttctgtatcttgattatattaatgtattattttggttgtgatattgtattatagtttaacaggatgttactattgtggaaaactgggtaaaaggtacagagatctctctatattctaattgcatatgaatctataatttttttttcaaaatacaaactttaatttaaatatattgtggctggtaacagtggtgcacacctggaatcccagctactcaggagggtgaggtaggaggatcacttgaggccaggagttcacgaccagcctgaccaacatagtgagactccatctctaacataaattttattttattttattttatttgtttatttatttatttatttttgacacggagtctcgctctgtcacccaggctggagtgcagtggcgtgatctcggctcactgcaagctccgcctcccgggttcacaccattctcctgcctcagcctcccgaatagctgggactacaggcgcctgccaccatgcccggctaatttttttgtatttttagtagagatggggtttcaccgtgttagccaggatggtctcgatctcctgacctcgtgatccgcccgtctcggcctcccaaagtgctgggccttctaacacaaattttgagccaccgcgccagggcttctaacacaaatttttaaaactgtgtgtggtggagtatgcttgtagtcccagctacttgggagactgaggcagtaggatcacttgagccgaggagttcaaggctgcagtaagccatgattgcaccactgcattctagcctgggtaacaaagtgactacctcgtctcttaaaaaacaaacaaaacccatgattaaagtatgaaaaaacaggccgggcatggtggcttatgcctgtaatcctagcactttgggaggccgaggcaggtggatcacctgaggtcaggagttcaagaccagcctggccaacaggtgaaaccccgtctctacaaaaatacaaagattagctgggcatgatggcgggtgcctgcaaacccagctactccagaggctgaggcaggagaatcgcttgaacccgggagatgcaggtggcagtaagccgagatcgagccattgcaatccagcctgggcaacagaacgagactccgtctcaaaataagtaaataaataaataaataaaaaataacccatatatatacacacatatatatagtttatatatacacacatatgtgtgtgtgtatatatgtgtatatatatgaagaacagcaaatttcaaagtgcttggaaatctgttaaataaatcagataaataaatgtatatatacttgtatatgaagatatagcatatgtaaattgatagatacatattgatatgtacatttatttatgtttatataaacaagtgaatatatttattatttgaacatttatttagaaaatgtttgttacccgatggtatagtacactcagccacacacagatttttgatatttgaagattcaacatttactgtatgctctaggacctaagaaatgcagggcaaataggaatttagttctgccaattcatggattttctttgaactttaaaattctgatgtgtgttagaaaactgtttggctagccactgagcaactaaaacacaatttcatgctttacttgtaattgcgtatcttctacgttacatatattctgtatctttatattccatcccttttatattacttcattttaaaagtttacaatatagacttttcttcttcccgaagaacagccattaaataagataaaggagctaataaaagtgtagttaattttctgtgttaggttatacagagaaaagactaagtgttgataaaggagtaagtcaggagtttataaagaagaaataggctaagagtttacgaagtaccttttgtgtttttcaatttgaggcattcatcaatatatggaatatattccttaacatattaaaagtacagaaataaatatagaataaaatatgaattgtactttattgaagaaatttaaataaaatgtgacagaattttaatagcagaccatgtattatatgaggattcccataatgtaaacacaaataaatttctaaggattcttttaacataattaagtcaattatattaaaattatatgaacttagtgttaatgtttttaaaacaccacatcacttgggaaggtattgtctgagacattcctgtagaggttcatctcctcccttttcttactcctctgtatagtctttttttttttttttcacgtggggctataattctgaatacagatcaaagaacttctcattcagttgcatacaaccgttacaattttaacatgtcgtttgctgtcagaacccctctgactcccctcccaattcacaacgaacagcatttaatactgtggttacattggaggaggcagtatcattgcatcagtaaataacactagcaaaaccactcaatttacttttctgtactttaagttgggacataatacagatgctttaaacaatcacacaaatgattaaaaaatattatatattttacttttttagtgtatttagtactatatcccacttcacacctttatggattacaatttcattgagtttggctattataaatatatcatttggaaaataacttctttcagaatgctttttcttgcattgaagttttgcatattttttattttaaatttattctactgattatttcatatggaaatttatggttcaacaactttttatatgtgtttctaacagcttattgttgtgcttggaggaatattaacatactatgaaatgtttgtaggcatatcaacatacaatcttacgcttacatataaatggtgtaaaattttgtatccttaaattttactgaagttgtttctcaaagtcaggaggagtctttaggattttctaggtataagattatttcatcagcaaacagataattatccaatttggatgcctttttttccctttctcttacctgattgctctgggtaggacttttcagtactatgttgaatattagtgctgagagtggacatctatgtcttgttccagttctaatgagaatgctttcaactttttcccattcagtatgaattgggctgtagatttgtcatagatggctcttactattttgatgtatgttcctttaatgcctagtttgtttagggtttttagtgaagagatgttgtattttatcaaatgctttttttgcatctattgagatgatcatgtgtttttcgttttaaattctgtttatgtgagaaatcacatttattgatttgcaaatgttgaaacatccttgcatccctggaataaaacccacttgattgtgatgaattatctttttgatgtgctgttggatttggtctgctagtatattgttgaggatttttgcatctgtgttcatgagagatattagcctgtagttttcatcttttgttgtatgcttgcctgaaggaataatttcagtaggattggtaccagctctttgtatgtctggtaaaatttggctgtgaatccatctggtcctgggcttttttttttttttttttttttactggaattttgtttgttactgattcaatttcataactcactattgatctgttcaggatttttattttttcctggttcaatctcgggaggttgtatgtttccaggaatttattcattgcctctaggttttctagtgtgtttgcatagagattttcacagtaatttctgatgatcttttgtatttctgtggtgtgagttgtggtgtctcctttattatttctgattgtgcttatttgaatcttctctctttttttttctttcttaaactattaatacatatcagtctatcaattttgtttgttctttcaaaggacgagtttcttgttttatcgatcctttgtatctttttttttcttttggtgtgattctcatttagttctactgtgatctttgttatttcttttcttctgctagttttggtttggtttgttctttaatttatttttaaattattttttgagacagggtctcactctgctgcccaggctgtagtgcactggtgtgaacaggggtcactgtagcctctgccttccaggttcaagcgattctcatgtctcagcctcccaagtagctgggactacaggcgtgtgccaccatgcctggctaatttttttgtatttttagtagagatggtgttttgccatgttggccaggctggtctcaaacttctgacctcagataatccacccaccttggcttaccaaagtgctgggattacaggcgtgagccaccgcacctggcctggtttgttctttcttgtgtagttcctttaggtgtgatgttaggttgttaatttgagatctttctatatttttaatgtaggctcttagcactatatactttcattttagtcctgtttttgctgtatcccagagattttaatatgttccgtctgttttcaattatttcaaaaaaattttcatttctgccttaatattattgtttacccaaaagtcattcaggagtaagttgttcagtttttatgtacttgtgtggttttgagaattcctcttggtattgatttctaattttgtttcactgtgttctgagaagatacttgatatgctttcaattattttttttgaatttgttgagacttgttttacggccaagcacataatcaactttcgagattgttccatgtgcagatgagaaaaatgtatatgaaatgcagaatgttctgtgaatgtctatttggtctagagtccattttaagtccagagtttctttgttgactttctgcctcaatgacctgtctagtattgtcagtggggttttgaagtttgttgatctcttttcttaagtttactaacatttgtatcatgaatttgaatactctggtcttgggtgaatatatagttaggatagttacatcttgttatattgactgctttattattatataatgctctcttttatctttttttttttactgttgttgattaaagtctgttttatctaatacaagaatagctactgctgctcactttttgttttccatttgtgttatatgtcttttcccttccctttaatttgtgtctgtattcagccattgtgtctttagccattaggggggtctcttgtaggcagcagttggttggatcttgtttctttaatccaacttgctggtctatcttttaagtgtagaatttaggccatttatgtttaaagttaatattgatatgtgaggttttgtgccagtcatagtttcattacctagtttcttagaatttcaaatgtgtaattgctttgtaggatctgtgagctttctacttacatgtacttttatgatggtgagtatcgtgcttttgtttccatgtttagaacgtctttgagtatttcttgtatttctggtctagtggtgattaattcccttagcatttacttgttggggaaagattttatttctccctcatttattaagctttagtttggcaagatataaagttcttggatggcttttcttttaaagaagactaaaaataagctcctaatctcttttggcttgtaagatttctgccgagaattctgctgttagtctgataggattccctttataggtgatctgatgcttctctctagggcttttaagatttgttctttcacatttatcttggatagtctgatgactttatgccttcaggataatcatcttgtgtagtatcttccaggtgttctctgaatttcttgtatatatatgtctacatctctggcaaaattagggaaattttcctgcattattccctcaaaatatgtcttgaaaacttcttactttttcttcttctccctcaaagatgcttgtaaattgtagatctggtcacttcacataatcccatatttctgtaaggctttgttcaatttttttaaattacttttttgtctcacttttttaatttaaaagattcgtcttcaggttctgcagttctttcttctactttgtctagtctattgttaaagctttcaactgtgctttgaaattccttcagtgcatttttcatttctagaagttctgttttattataaatacatacctaggccaggcacggtggctcacacctgtaatcacaccactttgggaggccaaggggggtggatcacgaggtcaggagtttgagaccagcctggccaatgtggtgaaaccccgtctctactaaaaatacaaaaatttctgagtgtggtggtgtgcacctctaatcccagctacttgggaggccaaggtaggagaatcgcttgaacccaagaggcggaggttgcagtgagccgagatggtgccactgcactccagtcttggcaacagagcaagactccgtcttggagcgggggaatctatatctatcttgactttcatctcctgaattatttttctggtttctttgtgttgatttccatctcttcttggatttcattgagcttccctacaatccatattttgaattatttatctgtcatttcaaagttttcattttggttaggttccattgctagagagctagtgtggtcctctgggggatgtcacaatattctgtttctttatggtgctagagtttgtgtgctgctttcttctcatctgtagaagctgtcacttcttatttttgaatttcctttcttttttgcaggatttttttccttcccccttgagggtgtgactgttgaatatgttgagtagggtcctttggctttgcttctatttgcttttaggggaccaaggctctgtaagaattccttggttattgatagcaataatgtagtggtttttttcaaatgctagttgtctgtaggttgtagttgtggtgtgctgtgcatgtagtcaggctcactgtctcctacagggttggggaggtggacgtcttgggaggcttatctcattccccagcactgtgcaaatcggccaggagaaattacattgatttatgcagttcaccctacaggccagtaggtggtgcttatggcttaagctggctgaacactgttccatgacaatagaagttgtgatgcactgcacagtttgatctctgggccagtaggtaagtgtttgcaggtgagaggtggttgcagtaatgacagttgactttttacttggcttttgttaatcagaaaaagtaccagagtgttcctggcaatgagcaggatattgggttcccagaggtacagttgtatgctctatcaccaaggcagccggaggggggcaaagctaggtggagctgagtcaggagagcctgcaaccaggctctttgaggcaggtgcaagctctgaccttggcaggggtccatgggcatctctcaggccactggagcagccacctgaagcggggcagaggtgcatctcctataccacagagtttgcttaggggaagaggggaggccccagcaggtagccatggggcccacccggctcccacatccccatcctagtgagcctccacctggtgtccagccatggcaacagatctgactagttaggctagtccctacccaccggtacccagatcaccttgccattccaggcattttgaccacccgactccctgcagcagaaaccacagctatcaagccacacctttttcaaccaggtcccatgacattagcagtgctcagttccagtgccaccacattaacctgcaccacactctgtgttctgacagtggggttacttccccatttgagatcaagccacagttttcatcagcatacccctggatggtatgcttgagttccagggaactgggatcaggccagcagatttgtcctccagcccctcaggatcaagcaccgcctgtgaactgctcctaggccaccaacaaaccacgcaggcagagcaatgaaggctatactgtgggccctctcctgagggtatagccaggtgggcagtctcaggaagaactggcaggcatgagggtgcatggttcagatgcaccccagtcccaaggcattggcatggggcctgtcttgggtgtgtgagcatgccacagccctgctctctcctggccaggagacagcaggagctgcagccacttagggcaagacacagagccttggagggtgggctcccagaattgtgttttgctgcagctgcccggcatatgaacattttgggttccacataggcttaggtagtgtcttgcacattcttcaggtagctccccctgccagtccaagacctgtgagtcacgagaactctagtagctaggatctcagaggtccatggcaggaatgtggtgccccagggttctttcactcaccccttccttgggtctgatccgggtcttggggctggtcatcatacccagcgttgctgtgcaggcagaaacacttcctccttcttcaaccgtggtgccttccattgcctttctattaaatgtcagtgttttctcccaaaagatgtgttcaaagtatgaaggtttacttgataatttgtttcttctccatgaaaaaggcacatcctagccgcatctagtcagccatcttctctctttgacaggtgtttttaatctgagtattcatgctctcttcaactctaaaacatttttcaacattatcgctttaagggcctcccctcattttctggaagttctacaatagtactggaaataagttggaacatctaattctttgtatgttaactttcacattttctttcccttttatttggctatgctgtattctgagtaatttctttatatttatcaatcattttatcaattttctctttggccagttcaacataactgcccaaagttttgagtttttaatgaaaatgaactatattatttaattctagaatttgcattttcttcttcagatctgactcttctcttttccctattatgtttgttcttaaattttggttatgttactttcacctctgaatattttacatctgtttcttaatatctcttttagatttgtctaaaatgattgatgggacatgaatttttccatttttgtagctgcaaactccagcctaagcaatgtttttttgtgtgtacatgctggaatttgtactatgagctcatccgtgggagttattttttaataggaagactgagtgatctgagttgtgagactgtccttccagcttttaggtaaatgtcttggctctgtgcttcccatactgggtaaatgtgcaaattcagacatggcctccacaagtttgtgttttctatttcctgcaggttacagttattcttccagagatccatagagatcagacacctttttacccaaagccagtggcagtctctccagccttttaaaatggacaggatagctcttttttttaattactattatactttaagttttagggtacatgtgcacaacatgcaggtttgttatatatgtatacatgcaccatgttggtgtgctgcacccattaactcaccatttaacattaggtatatctcctaatgttatccctcccccctcccccaaccccatgacaggtcctggtgtgggatgttcccctccctgtgtccaagtgttcttattgttcaattcccacctacgagtgagaacatgcggtgtttggttttttgtccttgcgatagtttgctgagaatgatgctctccagcttcatccatgtccctacaaaggacatgaactcatccttttttatggctgcatagtattccatggtgtatatgtgcacattttcttaattggacaggataactctggcagattcttctctttatgtataaatctcttctctttatgtataaaactttcatctcctatgcaccaggcctatagacaccctaagcatctcactgaagttgtcaaaaatccaggcatttagagatatatcaaattaggatgttctataagacatttgttttcattctcactcaatagtgctttaagttttctcttattttctagtaccagggatatctcatttttagttttaagcttggctttgaatttaaattttaactgttgtattttattagtaaaatgttcatggatcatttctacatttgaagtgggaggaaagatcttctacattggctaatttgccatattgactagaacttatttgagtttcaaacatgtcagtttttctggttattgcttttgcttctatatctttaattttttaaaaaagagtcattatttcacctagctttacctacctctgaatatttttttctccttataagctttctgtttcatagagatttgctcttttttttatcctactgagaataccaagcttattttaaaatgctcttctagttcctatagtaaatatttttcagaagtctgtacttcttttttgctttagcgtgaagttttcttccctttcatctgcagtaaatttttcatgggttctgtactagagtctttttctgtttgaccctctaggccactctttattcttttccatcctttgtgccctcacagtgtgccctgtgaggctaatatccatggactgcaccaacaagctggagaatcctctggcttccagttgagttcagcaaatgggagcaccagcaggagactggagggcaggaagagaatgaaattagaatgtttatttcccttcatctattatttccagctccttgagacttgggaggactcttgtgaggggtcctttgcatatagatatcctttctagaactgttccttgaccttgccctttcagacttggggcagaaacaactccctgtggttgctaaccctggagatctgcaccatctatacctttataaattatttttttgtatccagcttatttatttattattttttgccgagtccttgattaataaaggtttcattttggattttattttttgttatgattttcttcattctttatacagaggtgatctatgtatatagagcagccaaagagtatatagaatgtccttggccatagtctgttaaaatgtgtcaattttgttttacagactcatagcttgaatttattgcattcatattgtatggctttgttagattcaaatagaaatttctcctgtcccattgtttggctctccagtactcttcactgcaatatgcaatgtcaattgagctacacatatttagctagccaagttgatttttatggaaagggaatagaatggcacatatgaattcagaatatattctatttgtctatatgcattgtgaaatgattacttaaagaggtacttcatctgtctgagaggttaagacaaagaggacttaagactgaaaaagttagactataaaaagtcttgcagaagcattctgcttccagtagggccaaatagctcttatcagaccactcttcctagggttgataaaaactatcaaccattgaaaaaccacatataaaacaaccatcttatgacattggagagtgaaaaaaaaagcaggcagaaattagaagggagatgacactctaacttaggattagaggggagatggacgaagggaacgaagtctggtgagattcctgtttttgaaatgtctaccctggggggaggccccagtttgtacttgtagagaaaaaaaaaaactgatgaaaatcctacaagtttgcttgattaaccagcaaagagagttcatcagtcaaccacaaccactgaaaatcaaggggggacatactagaaaaggagaaaactagagagagggtgtattagtctattctcacactactataaagaaatacccaagactgggtaacttataaagaagagaggattaattgacttacagttccacatagctggggaggcctcaggaaacttccaatcatggtgcaaggtgaaggggaaacaaggaccttcttcaaaaggcagaggagagagtgtgtgaaggaagcaaagggggaagagctccttaaaaatccatctgatctcatgagaactcacgcagtatcctgagaacagcatgggggaaactggccccgtgatccagtcacctctcatcaggtgtctcccacaacacctggggaatacaacgcaagatgagatttgggtactcggctgatgaaataatctgtacaacaaactcctgcaacacaaatttacctgtgcaacaaaccttcacatgtatcacccaacctaaaataaaagtgtttttaaaacagagaatactttcggcttaacaagtctagtagtgcactcaccatgaaaataatttagctactgttattaagtgctgtaccattataattaccaatcaccaattattgatttcagaggtcatgatatacttgacattgtaatgtgttcccttatagacttgatttgggtggggacacaaagcctaaccatatccgagggagcctcagattctgaatataaactctgctcaaatttctggctgcccagcaaagctaaaaaaattaaactgagatataaggtgctgcccacagtgaaaagactacattttgcagtttgttttcaaactacctgctttaaaaataataagttgagcgaaactccatctcaaataataataataataagttaaataaaatatttttaaaaatttgcagtattttcttagtgaactttgcaatataggacaaagcttacctgtgtgaggagtgtttccttctctttaattctttttcttttttgtcttcctctccaattttttgatgcttttttgtgaaactccatccatctttccacaattcacataaaacctcttacctcttttcctaccttgtaccccatttagtcattacttgcaaggtacaaaaatacactgaaaatagctcaacagaaagggaagataagtgttgctcaaagcagagaaatccaagacagaaagtagaggtgagctttgtgcagattgaacctgagtataagaaagtcttcggatctagaaaaatggatatctttctctttctgaagctacatggtcttttgcctttgtttctctttgaaagtggtccaatattgcaaccctcggaagagaaatctctacccttgagtatacttggcctgcacagtaatatgattcattttctgaggccagtttccaagaaaaattgaaaatcaaaaacaagtaaagttactttatatatgggccagatttgagttctgatactaacagctggtcccatcagcagtggctggtgagatattcatggggtggggagtgcagttgaaggagaatgaatgaatgaatgagtaacatggttcctccaactgcaggcctctgggctgccaaggttttccaagaagacaggcaaattgtatgtgaagtatatcaccatactgctttccacaatgtttgaactaatttacactcccaccaacagtgtataagtgttcccttttctctgccacctcaccagcatctgctatttttttatgttttaataatagccattctgactggtgtgagaggtatcttattgtggttttgatttgcatttctctaacgatcagcgatgttgggctttttttcatgtgcttgttggctgcatgtatgtcttctgccaaaagcattttctttctccatcgtcaaaagcagagttgcatagatcaaggtaatcgtcactttgattgctaagaaacctaggtcatgattttctttacattcaaaatttgtataatgtgatttgattcattgtctcattttctagtggtggtaatataaataatggtagattttattattaaataggttcttcctttgtattattttccatctaaaaccttttaatagtcttttgttaattatactagataggtaggtaggtagagagatagatagtatcctttatctactgggaagcagtgctcatacccagaagaagtctataagggaacacattacaatgttagcaatgattatctttaagagtaagatttgtaaagtattttttcacttaaaaaaagtgttaaaaattttgtaattaatttgtattgctttactaatagaaaaattaactttgtaaaactaattaattctaagtgcacaagggaaaacattgttttgtaaacaagaactgtcggaagaaagaagtgattaggttatgtaaacatctaagtataaatgagaaaagcacagaagtaaaaaatcaggccaacttagagaaaagagactgctacaaaatagcaaataaatttggagttacaataaaaagaaaaagtaagaaataaaggtcaacataagagacaataaaagaaaactagaagtagtttttgaaatatatccttaaatacatgaaacagagtggcattaaaactgcttcttcaacaagaagatacagaaagcttcaaaaattctgaaaaggtaaaaatttttttggattgataacctatatattaaaaagaactctcaatgacctggtcagggtgatcaaaataagataatgtgaggaagtaaaaataattttgatttgattatttaatgattatttaaatcttttctctgctgaaagtccaggagcaagaaggaagggaatcagaatatagcagaacagtgatttctacctgctggcctggaagcaactgggactgttgtttgatcaagattttattagttattgttagtaaagagagaaaaataagaaaaacatagtgagcttcatattaaggtaaatttatccaatttatgtgagattatatccttattagattttcattattaaaatcttctcttataacatgacatagatagtagatggttgtaggatttttgacgtactttcagcaaaaagaaaagctggaaatgctttatcaccttgaatcttacaaatctgttagatccaaaagtcagaactacggctttaaaccattgtcattgtactcatcatttaagagaccttagttcacttgaacaaggagacatatgtccctaagcaggaacaatgcaagaccttatgtgggtgtgtggcatagtgagtgtcacagacctaagctgggatgactaagaaaggtctcaagatggaggtgagatcagcctgtaaattataccatgggtaagagtttttttgtttttttttttgtttgtttttgttttcttttttgagactgagtctcactctgtcatccagactgggtgcagtggcgcgatcttggcttacgacaagctctgcctcccaggttcacactattctcctgcctcagcctcccaagtagctgggactacaggcgcctgccaccacgcccagctaattttttgtatttttagtagagacagggtttcaccatgttagccaggatggtctcgtaccatggataagattttaagtgatgatgacagagaggagggtactctggaaaaagaaaaatgagaaaactgagtttagaaggcacatgacatgcaaaggttatgaactgaagatgtacttattggaaatggtagaaaaataagtagtagagttggtccagtttgagaaaagtcatgcacccctgaatgagtgtttggtttttatctgttaagggttggaagcaattttaaagaaaggtgaagggttattttaaattattattgtaagattttgtctattttttggagttttgctgttttaagtatgtatctaggtttgaatttattattaatattctgtttaggacctgttgatcttgaatatatggttttatattttaatcaatttgggggaattcttagccttggaaacattaatcttttcccattttctttacacttttcttccacaactcctaagagacatatgtgagaatatttcatactatgctttgtgtctttgaacttaatgtctggcctgtagaagtgctcaatcgatgttcaaattggtcttgctgtttgaagatgccctgcagagcagtcctgcgtttgcagttgttaggccaaacctgaggcccagatctactgtgaagtgagcctggtgttaccaatttctgtgttttctttggttcccaagtgttgctgtcccatggttcagtaacttgtcatacatccaagggcccagtgtggagaagcacagcataaaacgagagagaagcatacgtttgagggtctgaggatgacccaataggagtcactgcaggttctaggctcactcaggggattaagttattgtttctctctacctttaacattcttttccagacaccaacattatttcatccttcacctctttcaagtctttattcaaatgctatatagtgagaactttggtagataccctatttgaaattgtgactacttcttatgtcaatttcttgttttgtcaggtagtttaaatgtgaatctcaaaactgcatgaggtacagcactgtggttacaggtactaggggagactttttcttccacccttgtggagacaggcaaagttctttgttatctcccattaatggtggttgcaatttctctcatccttccttttactaagaatgtagttttttagggaggtaatttgctagggctgccataatgaactattgcagatcaaatgcctcaatcaacagatatttattttctcacagttctggaggctggaagtcctaactcaagatgttcgcaggtttgatttcttctgaggcctctcttcttggctggcagatggccaccttctcattatgttttcaggtggtcttttctttgtgtgtgtaagtccctctctctgtgtccaaacttcctaataaggacaccagttaggttgcattaagatgcaacctaacagcctcattttaagttaatcacctttttacagactctattgccaaatatagtcacattatgaggtactaggaattaggacttcaacatatgaatttagggggatacaattcatcccataatggagcaggagaggagtctcagctttatttgcaatctgttctccacctccctgtcttgagtggatgctttgccttgttttgtgctttggcatgggcttaaaaaaaccttaaattcattgttctaaccaatcaaactcctaaagattcctgaaactttagcgtattgcttatctggtttgcagtgacctcttcattttagccttctgaggatttttcattacattctcatggtttcacctatatgtctacagggacatttactatatattttttcctctcatatttctaggtgtcttataaaaggggttggtttaaatatttcttatttaatccaccccattgctgaaaattaaaattagaattagtttataaaattattagttgacaatagtacaaagcaagaatagaaagataactcagtaatcttccagctacaaggctagtttaatgaaccttttttgacttagtttttcatgcttagtcagaaattaagacatttaacaggcccggtgcggtggctcacgcctgtaatcccagcactttgggaggccgaggcgggcagatcacgaggtcaggagatcgagatcatcctggctaacacagtgaaaccccgtctctactaaaaaaatacaaaaaattagccgggcgtggtggtgggcgcctgtagtcccagctactcaggaggctgaggcaggagaatggcgtgaacccccgggaagcggagcttgcagtgagccgagatggcgccactgaacttcagcctgggcgacagagcgagactccgcctcaaaaaaaaaaaaaaaaaagaaaagaaaagaaaaaagatatttaacaaagttagaaatgttatgaacataccccgtgggtatgagggaaagtgatggaggaaacattttcttttgaggaaaaattaagctgaaataggaacaaatttttcagggggtaagggggaggtaagcgcttggtattagtctattaccagacaaagcaaattcacagctttgattttcgctaaagagggcaaaggggagacgttttaaccgagcttataagaccgagatatgatgtatatctcctattaatatctacttaaataggaactgtctacttttataaacattaaattaaacttctaggaaaatctaacaagttatcatattaagaaattttgaatatatcccagtgcagtaccactgtcagcaagagctagtctgaggaaaagtgagacactcctggtagtttagcagaatacagattcctgaggagtgataaaacttataaagaatgtcatgtttttacaaatacaattttatgccagtgttaaaggtctgttaatcagtgcattgaccaggttattttattccttaagtcaccaaagagtaacagattatttagggaaatttgtttttaaagcattgaatgcaaaattgcaaaataaaggtggaagcaatcttgtctttttttttttcaaatatctcttctatgcacatttatttgaaaatcaaaactgcttccatgaaaacaataaataaataccactatggcatgttacttagagctgagagacaacgtcctcctgcataaacgaaatgaaaaaaattaagagggcaggtagatttccccttgactttacctactacgtggtttgatcaacaaggaatttaattgtcagcttatgacatatgaataaaccattgaagtcattaaagaactatcagttagttaacacattataaagctgggagggagttgaagagattttcatattcaggtcatatatttaggtagatgaaatcaggaatatccaactagctgggatcacatcatcaatcatgtagctgatactatggcacaatgtggcagtgtcaaagattataggtcccaccagggggtaggagatgtatctggaaactctggaaactgctaccacatacttctctttcttttatatactttttgggaagccatccattttttctctctctctctctctttctttttcctatttgtattataaggaactcccactagcaatttaaagcctcctggcttttgtctaagatggaagaatttatagcagacaaaatgctcccactgagaacaatcagaaaatggatacaatgtatacacacattcactcaaattcaacctgtctgagggtgttgtggagcttctcagaagccaagccaggacttggcccagtatttttgagatgaacagctcactgaggagagtccacaatgagtaatgtggactgagtaatgtagcattactcttggggcatgagccaattcttaagcttggtgcagtgagagtctgagggcaaatgctaaggggcaagaaacccagcagaattttgagcaattccatggggcttgggaaacaaaaatagaagtagagaccagtgatggcaggacttgaggtccaagattctggagataaatgaagtacagggagatgtcttgggagtgataaaatataagtggctatttgccctccaggtatttttttgtgtgtaggctacatagatcaagaaatccaaatctaagcaaaaagtggaaatccagcaaagatgtcagcagtgtcacttttttgctagtaagacaaaaattggagtaaagaatatcccaaaaggagccttggtaaacatcccatactctcattaaggaatccctggggagaagggtggtggtcctacattcgaggagatagaatgaagcctttcaatatctgacacagtctcagtcagttacattgagaaaacctcctagcattccagttgtctgtcagaaaatgagatgagtggcttctggagggatatatcatcatctagagcctctcaatttttttttcttttttttttttttgagacggagtctcactctgttgcccaggctggagtgcaatggtgcaatctgagctcactgcaagctctgcccccaggttcaagtgattcccctgtcttagccttccaagtagctgggattacaggcatgtgccaccatgcctagctaattttttgtatttttagtagagacggggtttcaccatgttggccaggctggtcttgaactcctgacctcaggtgatccacctgccttggcctcccaaagtgctgagattacaggcatgagccaccacatccggccgtgcctctcaaattttttatgcacaatgactagaattcattaaaaaaaataccatacataccaagaaacatgtccaaaaggaaaagacaatagaattagcctcgtggctgatgcagactaccgcagaagacaaagcaagattttaagtttctgctgattactgtgtttaagataatagaggatgagatgagcaatttaaccagagacacgaaacttattaagagaaattgtagaactgaaagaataacttaaagattcaatagatgtgtttgacagcagagtgtcacggctaaagaaagggtatacagttgcatgtcaagaaagactcaagcacagaaagtaaaagaatgggaaatacgaaaagttcataaaagacactaaacacaatgaggatgttctatatttttagttgaaataacagagaaagaaagtgaatggtgcaggagcaatatttgaagacaaaatggttgagaatgtttcaaaattgatgagaataaacaaactaaagtttcatgaacagctgtgaaccaaagtagagacaaattagaaattttaaaaaagtcctaacttcatcatagtacaactgtttcaaaccaaaggcaggggaataaaatataaaaaacagaacagcctgagactaaaagatgtattattattcactatatcagcaataaaactaatgactgacttctcaaaagaatcaataaaagtcagacaatggaataatatctttaaaatacaaaaagaaagtgactgccaacctagaattcttagtgaaaagcttcttcaaaagtagaggcgaaataaaaaatatctgcaggcaaagattctgagaatttagaggcgaaataaaaaatatctgcaggcaaagattctgagaattcttcaccaggaagccagcactacaagaaatacgaaaggggattcctcgagaataagggagaatatttcagatagaaacatggaaatccaggagggaatgaaaagtaacaaaatggtaactatgtgagtaaatctaagcaattattcactgtacaaagcaaaaataatacagatcgtctccaacttatgatggtttgtcttctgatttttcaactttataacggtacaaaagtaatacatccagataaaccaatcctacactgaaaatattggcactttcaacttacaatatttcaacatataatgggtttatcaggacccaaccccatcataagttaaggagcatctgtacaagtttcctgagaaggttaacagttttttaaacttaatctagtattaatataataatataatgaaattatatatattataataatttaatataatagtctgttctcatgctgctatgaaaaaatacccaaaactggtataaagaaaagatgtttaattgactcaagtttctgcatggctggggaggcctcaggaaacttacaatcatggccaaaggcacctcttcacagggcagcaggagagagaatgtgtgcaagcaggggaaatgccagacatgtataaaatcatcagatcttgtgagactcactcacgagaacagcatgggggaaaccgccctcatgattcaattacttcacctggccttgcccttgacatgtgggaattattacaattcaagctgagatttgggtggggacacagatccaaaccatatcaatcctcttcagaagtaaattctctttctttttcatgttctagctaatgttcattttcctgtgggctggagaaaatctgcttttagtagttgaacaatgagacatcacctagcattgtcttagtttagctaacatgtatgataactgcagtatcctaacccttttccttccccttgagtactggtagaatccctttgtcaggtttaggtctgggaggggtcattgttgtgtgtatggccgagctttgtgttaattctggtgttcagattatatgtatcttgtttcatcttgctgtccttgtttgttggtttatgttgttgttgttgttttgatacggagtctctgtatgttacccaggctggagtgcagtggcgtgatctcagctcactgcagtctctgcctcccgagttcaagcaattctcctgttttagcctctgagtagctgggattactgttgtgcactaccacacccagctaattctttgtatttttagtagacagggtttttccatgttggtcaggctggtcttgaactcctgacctcaaatgatctgcccacgttggcctcccaaaatgctgggattataggcgtgagccaccacacctggcctggttttttgtttttataattgctacactcgtaaacccccattgccaagaacagctcctggaactttttctttctgcttttgcatatccacttatttttaggtgacttcacctcccggcataaaatttgctaacatctttatcatttgtgtgcttccaggtttgtgaatttgaatgacaagtttaaaaaatatttcccatgcaggaaagagggtgttttattggatttgtgactagagcaaccacagaatccctgaactagagacagacactgaatgccagacagggacttagtgttttgttgattttaaatatctgtatctatatctatatctatatcttatttccagccatagcttctatgctagtccagagatttggatatacttagtcaaggattatatatttaatagaatctgcctagaacacaatactacattgcacagcctactgatttattgtcatttcaagtagacattctttaaatatttatttagatttatttactgtgggcaggaacaggcctattttaaattaatgaactacctactgatttctgtatgtttaaattaagtaacttacattttatgtactgaacatgacagagtattttattatattgagaattaccttttacaatctttctgttactcatagcttatagaattttagtcactttcagtcactaaggatagaggtgaattggatagaattacaatcttattcaaaatacatttacagtttttttttttgcttgttttcacggtggaaaaaaaatgttccctactggtccgtattcattgttctgtctgttttcttttgaaagtccctgaaccagttgcctttctagaaggcagattaaatgtttaaaacttgaatgataaaacctgccactcaccgctggtcattgctctgcgtgtgtatgattttggttcaaaatttctgctgacaatgtctcctcaatgttggctagctctcagctggctgctttctgagttaagggtaggcttgccagcagttgcaatgtgtgcacagcaaacttgctgtctgaattgcagaaccactcaagcaagacaggatggtgcaagtgaggagtgttttgaaacaagtgtctacatgggggcaccgtctacttcagtggtagtataatcaaattgcatttcagcagttacataaggaaagcccagtaaattggcactgatgtctgattgattgcagtggtactttagctttttttattggtatggtctcaggtagcttccaatggcttgtgactgagtcagttgtgtttctcagtctaaccctactgaaccgcaactagtagaaccgctcacccctttctctcaacatccacatgcttggttttctgtaatcctgaacgtttttacaatttaatatatcttcgtgagtattttaaattagacgatgagagtgtttcagatcatatcaccatgaaaaatgggcctaactggaattgtttatccaacactattgatgcttctgctgttgtttgcaacatagcaccattccttctgaataagcaaaacacaatatatctttggggtaaatttcaaaatctgtaatcccaagagtttatatgtgtacagcattttatagcttataaagagcttttccattgtggaaccaacctggcctcatgaatggcaacaggggaagaaggattaaagggtgttgactatgggcattggatggctgtcttctcaagtatctaaaatttaatatattttgacatatatatgtgtatatatatacgtatatatgtgtgtatatatacgtgtatatatatgtgtatatatatgtgtatagatatgtgtatatatatgtacgtatatatatatatatacttttttttttttttttttttttttacgggaaggagttttactctttttgcccagtctggagtgcaggggagcgatttgggcccactgaaacctccacctcccaggttcaagtgattctcctggctcagcctcttgggtaactgggattacaggtgcgcgccaccatgcctggctaattttgtatttttagtagagatagggttacaccatgttggccaggctggtctcgaactcctgacctcaggcgatctgtccgcctcggcctccctaagtgctggaattacaggcatgaaccaccgcgcccggctgacaattaaaaattaatttttatattcccctgtctaatttacgtgggaaatctgtattctttctagggatggatgtatactgattctgtgtgtgtgtgtgtgtgtgtgtgtgtgtgtgtgaatatgtgtgtgtgtgtgcaaaatagctacattagctttattaagaatctactttgtcctccttctgttttgttatacattttagtatttcctgtcaataactgaacataaatggtaccgtgcctacaattgcttctttctgattcccaagttgttgctttgaccacttggatagcagcaggacaagataaagagaattaagtttcagttcactccaacgcatttaacgtatttaaaaatatttatactacatgtttatcaaatgtatagcattttatgaagatgagagtgccattgtttatcacttcccccattgtatctgtttttaaacacttgactttaatttgaaatattccatttttgaagagttaaagacgtttcaggtttacagcatgtcaaatgagagttacaagtttttcaaggtatttattctataaagaaacactgggttaaaaatacaattcatagaacaacttataattaaattgcatcaaaattgcaaatcccataattgattatattaatgacaatattattggcagaaattgattgttaaccttttttattgaaaagaggtttttctgactaattcgctattaacatattaaaaatgaataaaacattaaataaaacctataaagaaacaaaatatttccaacttacccaaagtgttaccaattaaatatttattagatacatacaattaagataaaagtatcctgagaactaaataattaaaatgctaaatttctcccaaaatataaaaagtaaagaagagatcattcaatatatacaaacacactgaaaggaggtttcagtatttggaaaactccttttagacaaaggggttttaggtagagtaccttaggaaaaatggtgtatttctgtgactgtaacattgatgtttcaaaatataccataaaattgcttacatatatttaaatgctactcataactattccaaaaaaacattttttaccctccaacacatttttaagtatttataaaatcatgtatgtgtatgtttatgtatatgtatattttgtgtctatacacatagatatcagttatctatcaccacaataatattgcataggaaagaactacaacaccttaaaagcttaaaacaatatattatttatttgtctcacagtaattactcatgtgttcttagctgggcttctcctgcatctgaaggcagctagagtgactagatagctctgctgatcttctctggcctactcaaatgtttgtgacgagcaagtcttatctgatggaggatgcccttggctggaatgactttgttgatgcggtcctactccatatgtcttccaaccactagcaagctaacctggctatgttcatctgcaagagctgtggcagatgcttaagtgctttcttctcaagtccaacatatgttatctctgttaacatcccattgatgaaagcaggtcataagcttaattcaaaagccaggggtatggaaatggggatgctnnnnnnnnnnnnnnnnnnnnnnnnnnnnnnnnnnnnnnnnnnnnnnnnnnnnnnnnnnnnnnnnnnnnnnnnnnnnnnnnnnnnnnnnnnnnnnnnnnnntaaggtaaaagaaagggacccagttagagctctccacacagggctacccagttttcccagccccatatattaaatagggacccctttccccagtgcatatttgtgacaggtgtgtcaaagatcagataggtgtagatatgtggcattatttctgagggctgtgttgtgttccattggtatatatctctgttgtggtcccagccccatgctgttttggttactgtagccttgtagtatagtttgaactcaggttgcgtgatgcctacagctgtgttcttttggcttaggattgacttggcagcgcgggctcttttttggttccatatgaactttaaagtagttttttccaattctgtgaaaaaagtcattggtagcttgatggggatggcattgaatctataaattacattgggcagtatggccattttgatattgattcttcctacccatgagcatggaatgttcttccatttgtgtgtatcctcttttattttgttgagcagtggtgtgtagttctccttgaagaggtccttcacatcccttgtaagttggattcctaggtattttattctctttgaagcagctgtgaatgggagttcactcatgatttggctctctgtttgtctgctattggtgtataagaatgcttgtgattatttgcacatatgattgttgtatcctgagactgttgctgaagtagcctatcagcttaaagagattttgggctgagacgatggggttttctatatatataatcatgtaatctgcgaacacggacactttaactccctcttttcctaaaagaataccctttatttccttctcctgcctgattgccctgtccacaactcccaacactatgttgaatatgagaggggagagaggacatccctgtcttgtgccatttttcaacgggaatgctctcactttttgcccattcacaatgatattggctgtgggtttgtcatatatagctcttattattttgagatacatcccatcactacctattttattgagagagtttagcatgaagtgtggttgaannnnnnnnnnnnnnnnnnnnnnnnnnnnnnnnnnnnnnnnnnnnnnnnnnnnnnnnnnnnnnnnnnnnnnnnnnnnnnnnnnnnnnnnnnnnnnnnnnnntgtgccaatatcatagtgtctgaagttgcacagttaataggtttaactatgtggtaacacaaattcttcacctctttcttttataggaatattttgaatatatatcactctctttcttccatatgagtttttaaattagcgtgtcagattctcatgacacaatgtcagaattttttctgaaagtagtctatatagatttattaatgaaaaagtggtttctcaataatatgaactccacctatttctctgatgctcaacacagttaataagcatcggggcatacacatcaacctgtccattgatatcagcacaataagggttaattttgcatatgaggaaccagcatggccatcaaaaggcatagtggatgaatatcatccctgttcctatacaatagataaggtaaacttttggagcccttgaaaatagcttttgtgcttgaataagattactcacacctgtgtattgattttcaatttatttaaaaactcagttaatccctaattttgtagctatatcttacacatatggctctttttatgtatctagtaatgttaatctaaagcttttgattaatgtgtgactcctcctataaacttaatcaaattcatagcagcattctaagtacatatataaattttatatagtgtatttatttttaagtaatcttaatgtaaaacttaacaataaaaaatgctgagtatttaaaccaaattaaaatatctaaactgattactcaataatataattgcattagacttataatgttgacctgctactctgataaaacaaattttttaaatatcacaaatatataaaacacaaatatatgagaagttcttaatctataatattaatatgatagttttgagtcactgaaaaatttatttgttgtgtgtaattcagaggttatacaataacccacaatatagattactgtactcttttctcatattgcccatgtgtcattcttgtatcgagaatatgctcaccttgtaaaagaatgtaggaggtgagtgtctttctactccttagaaggcgctatataatattattattatttgctctctgaatatttgatagaaattactgggaaaactgtctagttcagagatatttctttctaggaagattttaaattactgataaatgactcagtaatttaatgatctttgtaaaaagcactcagattggatcttctacatctataaatatatatctctttgtattcctctgtattccacagaggtatcagcaactgtgtnnnnnnnnnnnnnnnnnnnnnnnnnnnnnnnnnnnnnnnnnnnnnnnnnnnnnnnnnnnnnnnnnnnnnnnnnnnnnnnnnnnnnnnnnnnnnnnnnnnntaaaacaagttgtttcagtttttacttatagctccacaccctattcacatacctcccagggctcagtcatgagtccagtcacgggtaacaggggagggagctgcacatgaaggtgaaaattagtagtaaacatcatgctatgttcatacttttcttctcctcacctctaaagctacattaccctattaagtgtgctgtgctgcaacctccgcctcccaagtagctgggactacagacgcgcaccaccatgcctggctaatttttgtatttttagtagagatggggtttcatcatattggccattcgagactggtctcgaactcctgacctcgtgatctgcctgcctcggcctgccaaagtgataggattacaggtgtgagccaccatgcctggcaatcctttctttacttagacactcctcatatatgtaaacttctggtgtgttgacagcatattctcaggtatctctagactcctcctggttgaggataaaccaggatctcagctacagtatgattgtgtctgaacaagggatgccagactaagaaaaagtagtgtagcccagataggaatagggccgcagaaggcaagagggaaactcattgcgttctggatggattactaagtcatatgctaattgctttttccagacatcattttacccacctttgacatgtgcttgtatggatggaaccattttgaaagtgaaagggtaagcacgggactgaaattgttaaaatatatatttttttttttaagcagtaatctgacacaggcgtccaatgtgtttatactataggaagcaggaagatcagcaaggaaattattaaaataatgcacgcgtggagtgatgggcatgtttcctgatcttcttgcctgtcagaaaactcacagttaagttttgtactgactcgtagtagctgtcatttatccagatttagaatattattacctttcattttcatttctccaaccatatactcgcttcctttgtcttatagggctttgggggttatattactctgtgtcccttatagccacatcttactttttagaagtagattataagtataaaagtgcatgaataaaatatgcctcttgggggggaggggaaaacagaagataaatggggtgtatttgatgggacctgatataaatagctgaggattctacacagcactgggttaagaggtatctcctaatacaatgaaagggaatgggtgtgtgactgtgagatatataacacagttatgatgacatattaactcttaacttcaaannnnnnnnnnnnnnnnnnnnnnnnnnnnnnnnnnnnnnnnnnnnnnnnnnnnnnnnnnnnnnnnnnnnnnnnnnnnnnnnnnnnnnnnnnnnnnnnnnnntggctgtacagtttttccagcaccatgtgttaaaaagactaacctttttttccagtgcatcacctgtgctcttgtgtcaaagatcaattgattatatatatgtgactctatttcgtggttctataatatgctgtgtttatccgcatatactagtgccaatcccaccttatcttgattaatatagttttgtggtagctttatttatagcagctttcttcacaattgccaaaatttgaaagcacccaagatgtccttccataggcaaatggataaataatctgtagcacacccacacaatggaagagtcgatctatcaaatatcaatggatagtctatctccccatactaagatgataaaactcaacccaaaacaaagagagctctcattttcattttggttatgcaccgtgaaataataaaatcaccctactgacccaatactttctctctccagaccccagatttaaactaacttcatatagattgtgggtgaagtatctgatggaccgtctcatacttggaaaaaaatttatttacccaacatttataggttacttacagctttgtaaaattagagtgaacactttctgacattttggttacaaggcacataagatgaaaaagaaagctgcataggaaaagccagaaagaaaaagatgagctctttagatttatactatatccattttcttagttatattgaagaagaaaacagaaattcatctcctgtgtctttttgaaagacaaattactgatgctttcacagcaccagaggggcaggtagactcagactatttcctataagttttgctaatagtagaagatgaaactggcactgcggatgaaagtgcttctcacggataggtcacacgttggaaataacagtgagaggctaccctacaacttcccatctcatatctcactcagcgatgagagcagggggggtgctctcatcgttctttttaactctttcagctaaaaagaaaaaagaaataatgattttaaatgcctaagagatgaaaagcttaaaaccgcggttatattaagtaggcttcatcccagccaggcgcggtagctcacgcctgtgatcccagcactttgggaggccgaggcgggcacatcacctgaggtggggagttcgagaccagcctgagcaacatggagaaaccccgtctctactataaaaaatacacaattagccgggtgtggtggggcatgcctgtaatcccacctgcttgggaaggctgtggcacgagaatctcttgaacctgtgaggcggaagttgcagtgagccaagatcgcgccattgtgctccagcctgtgcaacacgagcgaaactccgtctttnnnnnnnnnnnnnnnnnnnnnnnnnnnnnnnnnnnnnnnnnnnnnnnnnnnnnnnnnnnnnnnnnnnnnnnnnnnnnnnnnnnnnnnnnnnnnnnnnnnntctcttttcagtaaggcactttctaacacatatttaaatatatgagccccccttagtattaaaatattatagaaaaaagagcatttcttttagcaattaagtacttggaggccaaacaaaaataataataatattataatatataatctaaagacctcctcctacaccttgatatgaaaggagagtagacaaaaaagtatggcctttttcaagcccatttacaatagctataaaaagaaatagggaatacttagcaatatgttaaactaaggaggtgaaagatctctaaatggaaaacaacaaaacactcataagagaaagcatagacaacagaaacaaatagaaaaacatttcatgctcacaaattggaaaaattaatgtaattaagatgaccatactgtccaaagaaaacctaatacaattaaaatgaccatactagcccaagaaaactacagattcagtgcaatccctatcaaaataccaatgccatttttttcacagaattagaaaaaacaggtgctggagaggatgtggagaaataggaacacttttacactgttggtgggactgtaaactagttcaacccttgtggaagtcagtgtggcgattcctcagggatctagaactacaaataccatgtgacccagcaatcccattactgggtatatacccaaaggattataaatcatgctgctataaagacacatgcacacgtatgtttattgtggcactattcacaatagcaaagactcggaaccaacccaaatgtccaacaatgatagactggattaataaaatgtggcacatatacaccatggaatactacgcagccataaaaaatgatgagttcatgtcctttgtagggacatggatgaagctggaaaccatcattctcagcaaactatcgcaaggacaaaaaaccaaacaccgcatgttctcactcataggtgggaattgaacaatgagaacacatggacacaggaaggggaatatcacacaccagggcctgttgtggggtgggggcaggggggagggatagcatttggagatatacctaatgttaaatgatgagttactgggtgcagcacaccaacatggcacatgtatacatatgtaactaacctgcacattgtgcacatgtaccctaaaacttaaagtataataaaaataaaaaaacacaaatatcataaaaaaaatcatgcagctataaaaaaaagaaaaaacaatcctaaaatttatataaaactgaaaccaagcccaaatagctaaacaaatgctaagcaaaaagaacaaagctggaagcataacattatttaacttcaaattataatacagggctatagtaacccaaagagtacagtactggtataaaaatggacacatgaatcaatgaaatagagaactcaaaaataaagctacatatttatagccaactgatctttgacaatgtcaacaagaacatatactnnnnnnnnnnnnnnnnnnnnnnnnnnnnnnnnnnnnnnnnnnnnnnnnnnnnnnnnnnnnnnnnnnnnnnnnnnnnnnnnnnnnnnnnnnnnnnnnnnnngttccacagtgtgagatgttcccctccgtgtgtacatgtgttctcagtgttcaactcccacatatgagtgagaacatatggtgtgtggttttgtgctcgtgtgatagtgtgctgagaaatatggtttcgagtttcatccatgtccgtgcaaaggacatgaactcatccttttatatgggtgcatagtattatatggtgtatatgtgccacattttctttacacagtatatcattgatgggcatttgggttggttccgagtctgtgatagtgtgaacagtgctgcaataagcatacatgtgcatgtgtctatatagaatgatatataatcctttgggtatatgcacagtaatgggattgataggtcaaatggtatttgtggttccaaatccttgaggaatcgccacattgtcttccacaatggtggaactaatttactctcccaccaaccatgtaagagcattcctatttctccacatcctctccagcacgtgttgtctcctgactttttaatgacagccattctatgtggcatgagatgatatctcagtgtggttttgatttgcatttctctaatgcccagtgatgataagcttttttttttcatatatttgttggccacataaatgtcttcttttgagaagtatctgttcatatccctcacccactttttgatggagttgtttgttttattcttgtaaatttgtttaacttccttataaattctggatattcaacctttgtcagatgggtatattgcaaaaattttctacctattctgtaggacgcgtgttccctctgataatagtttcttgtgctgtgcagaagctctttaatttaattggatcccatttgtcaattttggcttgtgtcgcaattccctttggtgtttaggaacacgcatatgtcctaaatggtactgcatacgtttgcttataagatatttatggctttgggtttcacatttcagtctttaatctatcttgagttaatttttgtataagatataaggagggggttcagttttaattttctgcatatggatagccagttttcccagccccatttaattaacagggacccctttccgtgttgcttgtttttgtcaggtttgtcaaagatcagatggttgtagatgtgtggtgttatttataaggtctgtgttgtgttccattggtactatatatctgttttggtaccagtaccatgctgttttggttactgtagccttgtagtatagtttgaagtcaggtggtgtgatgcctccaactttgttctttttgcttaggattgtcttggctatataggctcttttttagtttcatatgaaatttaaagcagctttttataattccatgaagaaagtcaatggtagcttgatgggaatagcattgaatctataaattactttgggcagtatggccattttcacaatatttattcttcctatcaatgagcatggaattattttccatttgtttgtgtcctcttattttcatgagcagtggtttgtagttcctccttgaagaggtccttcatgtcccttgtaagttgtattcctaggtattttattctttttgtaccaattgtgaatgggagttcactcatgatttggctctctgctgatctattattggggtatataagttctcgtgatttttgcacattgattttgtatcttaaaactctgctgaggttgcttatcaccttaaagagttttgggggcacggggcgctcagatgatgggattttctaaatatgcactcatgtcatctgcgaacaagagacaattcaggtgaatatctctgatgcacatcaacgcgaaaatcctcaataaaacactggcgaactgaatccaccagcacatcaaaaagcttatctcccacacacaagtcggcttcatctctgggatgcaagactgggtcaacatatgcgcatcaataaacataatccatctcatatatagaacccctgacacaaaccatatgattatctcaatatatgcacaaaagaccttcgataaaattcaacatcgcttcatgtgaaaagctctcaataaactatgtgttaatgggacatatctcacaataataagagctctttatgacacacccctatgcgctattatactgaatgggcacaagctggaagcattcgctctgannnnnnnnnnnnnnnnnnnnnnnnnnnnnnnnnnnnnnnnnnnnnnnnnnnnnnnnnnnnnnnnnnnnnnnnnnnnnnnnnnnnnnnnnnnnnnnnnnnncaaaaagtttttatgccacaccgccaaagggaaggcttttttcgcccccttttaaagtcctttttttggccacagtttggagtttttcccctggaaaaaataaagtttttggaaaagaaaattttatggtcttttggcccattttttttaaaccccgcctttttttgaaaggccaaagggttttttttttaaaaaaaaaaacccccgtttaaaaaacnagggtttttttttttttttttttttttttttttttttttttttgggacagagtcttgctctgtcaccaggctggagtgcagtggcgtgatttcagctccttgcaacctgcgcctcctgggttcaagcaattctcctgcctcagcctcctgagtagctggcgctacaggcacacgccaccacacccagctaatttttgtatttttagtggagacagggtttcaccacattggccaggatggtctcgatcttttgacctcatgatccaccagccttggcctcccaaagtgctaagattacaggtgtgagccaccgtgcccagactgtttttttgttttgttttgttttgtttccataggattttgggaaacaggtgttatttggttacatgagtgagttatgtagtggtgatttgtgagattttggtgcacccatcacctaagcagtatatgctgaacccaatttgttgtcttttatccctcactgccctcccaccctttccactgagtccccaaagtccattgtatcactcttctgcctttgcagcgccatagcttagctccctcttatgaatgagaacatacaatgtttggttttccattcctgagttacttcacttagaataacagtctccagttctatcaaggttgctgtgaataccattaattcgttcctttttatggctgagtagcattccgtcttatgtatacatacaccacaatttctgtatttactcgttgactgatgagcaattggactggttccatatttttgcaattgtgaattgtgctgctataaacatgcatgtgcaagtatctttttcatataatggcttcttttcctctgggtagataaccaataagtgggattgctggatcaaacggtagttttacttttagttctttaaggaatctccacactgtttttcacagtggtttgtactagtttgcattctcaccaacagtgtagaagtgttgacttttcaccccatccacaccaaactctattattttttgattttttgattatggccattcttgcaggagtaaggtggcattgcattgtggttttgatttgcattttcctgatcattagtaatgttgagcattttttatatgcttgttggtcatttgtatagctgcttttgggaattgtctattcatgtccttagcccactttttgatgggattttttgttttttttttcttgctaatttctttgagttcattgtagattctggatattagtcctttgttggatgtatagattgtgaagattttctccccactctgtgggttgtttttttactctgnnnnnnnnnnnnnnnnnnnnnnnnnnnnnnnnnnnnnnnnnnnnnnnnnnnnnnnnnnnnnnnnnnnnnnnnnnnnnnnnnnnnnnnnnnnnnnnnnnnnacacatgatgtcatcactctcatttgggcatttctcatgtgtcacataaatttatcagtagcacagccacttaataattcccatttattttctatcagaaggcacataagaaatttaatgttcacatcatgtggcacatacatatttgattaaatgtgtctaaactactaaacgtgtgattaatttatttgacaaattatttaagagtgttaattcttaattcgcgcgcatttctattatagagagctcaattgcgcatatttcactttttgagcatcatttattattaattctatgtatgaataaaaaggcttcataaataataactcagatatcagcttttaataactaatatcttaccccaagcacctgtcacagttatcagattcacacagtagcagatgtgagaaagtgaaaatagattggagctcattctgaaaactccaaatcttgacccagtttccccatttagccaatgaaatagaaggacacagagcatgacagtttaattaatgacgtgttacaatatcaagggcagagtaaccaaatttatttttgagaccgtcacaattactgaaaaaaaaacctgaaacttatctaaaatcaagttataaatctcagttatttatcataacaattttaatgatttttttttaatttcaggggtatatgcctaaatgttgttgcagattattcttatagtatcttattcctgccaatggcagatgattttggattttggacaggacatcagtgaagtttgatgggaagcgtccctcttccccactttacaacagtgcagacataattacatagatacgagatgaaacagtaagatgcatttcttgtctactggaaaagtaagagatgacggttagggggtttaaagactacatttttccaaataattctatagagtgaaggaaactaaaaataaatacatctatgatctatgcagaaaaacaaagaactgtgcatctgtccaggatattttctttaagaatttagcagtatattctcatcaagaaaggtgattctttgtgtatttattataaaacagaatacgttcttaatttgaaatatagttttattaagcaaatcttttaaagtatagctgcagattcaaaggccactttcctcaggatgcaaggaaatgacctacactaattttaattttgttaatctagccacgaggtgtaagaaggttgctatttgtatcaacaatatttaatatttaggcagccaaactgctttttccaagtgacagtttctctattcctttcatttggcaaaaacgcctttcaaactttatagtagtggcatcactttaataaagggtaataattttctatttttccataaataaataattataattgaaggaaaactgctttagaacaagagtcaccattgtaagtttacagcagtgttttctaaatctggcagaaaagggtgtcaatatcacactctaaactttttaggaaatctctgaaaacgaaatagtaatgggaatttttgaactttcagggattgttttttaggtaatcattaggaactcatgatataggtggtatttttctgtgccctttccatgcatttctcaccccagactttcctgctgccaagttgaggtgggagactcacgttttcaaggttggatcatacattaaaatgtcagaattgacctatgggttttgcaaatgtgtattatgaggattcttataaaacagcaggaggacacctgagagaaaacttgagacagtcagactttttaaatgataatggaagggtactattacatcatgactcaagggaaaatgtaaagactttggatccccagaaagatagtagcactgtcaaggcctaaacttactatcatggatgtgatttactgcaataggtttccatatgatatatatttcataaatgactcgttattataaaaggctatcataaatgacacacagctcaaccttttatgaaatatagtctatatctagagattcttcctgaggcgcaaacaagagaaataggatgaccacacaccctaatataaaaagacgtttttgatgtagtgtcaccttgatgcttctttcatagaagaatattcttatggttttctctttcactatgaatgtcttatatgcatttatttggacccaatggaaactaaagggggtagtcataatgactatttaataagcttcattttgcttggtaatgagatatataatgtgtcctaactcagacacatctctttctttccgtgtactccagtgtgcattccctcactcaccttttcccagaaatacttaatcacaccgagtcattttacaaagaatcacctcttgctaattaatttaaaaataatgagcacctctccaaaatagagcttcctcctcccttttattttcttaaattccctgcaacacagttgcttgagtagcatttatatgtgtgccaggaggtaacctacacatattggaattctcagtatatagacatctctcttttaggctaattagtagtaggaattagaaatttatcccaagattgcacacactcattttatgtgctagctgcatttttatttttcccccaaagcaatttttattttaagcttagaagtataaagaagaaaaaaagtatcacacatctcagtcagtgctgtgctccaatatcacatacatctataaatatatattgactattctctgttgataannnnnnnnnnnnnnnnnnnnnnnnnnnnnnnnnnnnnnnnnnnnnnnnnnnnnnnnnnnnnnnnnnnnnnnnnnnnnnnnnnnnnnnnnnnnnnnnnnnnttcccacacatttaaagatctaatccctattttactcactcttccatataatagaagaggaaggaattcttacttccaatctaattctacaaggtgaagtattcccaaacccagacaaagacatctcaacacataaaaagaaagaaaaatgaaaagaaaaccacaggacaatatccctaataaacatttatgcaataatcgtgtacaaaacactagcaaattaaattcaacaacacatcataaagatcattcatcatgaccaagtggcatttatcccagggatgcaaatatggttcaatgtatgcaagtcaatcaatgtgatatattatatcaacagaatgaagaacaaaaaccatatgatcatttcaactgatgatgtagaggcatttgataaaaattcaacatttcttcatgataaaaacccttaaaaaagtgggtatagaaaaaaacatacctcaacataataaaagccatacatgacagactcatagctaataacatattgaatggcaaaaaactgaaagctttttttttaaaatgtggaacgtaacaagaatgcctactttccccactgtgttattcaacatagtactggaagtcctacctagaacaatcagacaagagaaagaaataaagggcatccaaattggaaaggaagaagtcaaattacctttgtttgtagatgaggtgatcttacatttggaaaaaactagactccaccaaagaaccattagagccaataaacaaatttagtaaagttgtaggatacaaaattggcatacaaaaattatcaggatttttatatgccaataggaaacactctgaaaaagaaatcaagaaaataattctatacatagtagctatgaataaaattaaatatctaggaattaaccaaaaaagtgaaagagctttacactgaaaactataaaatattgttgacagaaattgaagagggcacacaaaaaaaaaaaaaaaaacccaaaagatatggccaggcatggtggctcacgcctgaaatcccagcactttgggaggccaagacaggcagatcatgaggtcaagagaccgaaaccaacctggccaacgtggggaaaccccgtctctactaaaaatacaaaaattagctgggcatgattgcgcatacctgtagtcccagctgtttgggaggctgaggcacaaaaaactcttgaaccctgtaaacacaggttgcacagagcccagatcatgccactgtactctagcctggggacacagcgagattccctctaaggaaaaaaaaaaaaaaaaaggaaagataatccatgcttgtggattggaagaatgaatattgttaaaatgtccatactacacagagtgatctacagtttcaatgcaatccttatcaaaataccaaagatattcttcacagaaaaagaaaaaaaaatcctaaaatttatatggagctacaaaagaaccagattagccaaagctatcctgagaaaaaaaaaacaacaaaactggaggaatcacattacctgacttcaaactatactacagagctatagtaaccaacacagcatggtactggcataaaaacagacacatagagcaagaaacagaagagtgaacccaaagaaaaatccacacacctacagtgaaaccattttcaacaaagctcccaaaaacatacactggggaaaggaaagtctcttcaatatactgtgctgggtacactggatatccatatgcaggagaatgaaactagagtatccttcgctacatacaaaaagcaaatcaaaatgtattaaatacttaaatttaagagttcctattattaaactactagtagaaaacattgggaaaactccccaggacattggagggggcaaaaatttcttgatcaatacccaacaggcacaggcaaccaaagcaaaactggacaaacaggatcacatcaagttaaaaatcatctgcacaacaaaggaaacaaagtgaagagacaacccacagaatgggaaaaagtatttacaaactactcatctcacaaggaattaataataagactatataaggagctcaaacaactctatacaaaaatatctaataatgtgatttaaaaatgggcaaaagatctgaatagacatttctcagaagacatataaatggcgaacaggtgtataaaaatgctcagtatcactgttcatcagagaaatgcgcatcaactacaactaaatatcatctcactccgctaaaatgggtttcatctatannnnnnnnnnnnnnnnnnnnnnnnnnnnnnnnnnnnnnnnnnnnnnnnnnnnnnnnnnnnnnnnnnnnnnnnnnnnnnnnnnnnnnnnnnnnnnnnnnnnatgctactaaatgtcacataaaactacgtgtttgactttaaaaattgtctagcctgtcttatactttgacttgtactgactgacatcaaggacatctcaacacggttgcagttacctttttctcttttttataactcttatgtttctcaagcatcattctacaggcactttattgataagataattcaaacaaagagtttgtaaatcagttgtttttagcttataacctattttttcaaaagaactgttttacaaatgatagttagattcccagacactccatgaaagtctgctcaactgtagcactaaaaccatgagcttgagtcccaagacactaggttagaggagagaagagatggaagagaccctttttctccttcttccaggtgtaacaatggtcttgaacacaattttggtaaaacaataatgcttaaggcattattacgtttccaatcgtttattcatttagcccatatttgttgagtaattcttttgattaaacactacaaattcctgggggcataaaattgagaagtcatattcttcatgctccaaaatcctgaactgttaacacagaggtaaatttctggctggctaatacccttaagtaggttgggtggatgaacccagtgcacttgcatagcattggctttgcacagaagcactgatgcctcccctaaaataacaggcaggaaaaaaatgtataagatagttatgggtacagatcccctaatgtggatagatgtagcagatggtagaagttctttgtaattgcttcaattaccagtacagttgaagatacactgtgcttttagtttttttcaaaataacatcatacaatatataccagacagatttttaaacttaacatatcagggatattttttcatcatgataattacatagctccaacataattataaatggttgtataatgttctgtgattggaaaatgttaccttttgcctagccagtaaggttctatatgggtcatttccacttttttatttcgttaacattgagacaataaatatctttttataactttttgtatatctatataattactcccttatgataaactaattgatattgagaggttacctattttacatatagaggtcgtttactttaatggataagctcctgcacttactagctatgtgaacttggacaagattttaatctcctgtaccttatttcccttatttccaaaataattcttacctcatggaaaagtttctgtgattacattagaccaaggataaggtgttgagaatgagagtgattatatcttagagagctattctgatgattaaattagcttatataagtttctaaggacagtgctttttggattatattttagaatttagtattttatacatgcaaaattgcatatgctaatgtgtattagtatacatgtatgtatacacacacatataaaatatatcactcagcttaaaatatagaacattgtcaatattgcatcctcctttatatgctctcttgactgtatcttcctctttatcccccagaataaaccattatcctgaattttgaattcaatattttaattttattggttttgtttgtttgtttgttttcagacagagtttcgctcttgttgcccaggctggagtgcaattgtgcgatctcagtcactgcaacatctgtctcccaggttcaagcaattctcctgcctcagcctcatgagtaggtggtatttcaggagcccaccaccacgccagactaatgttttgtatttttagtagaggtggagttccaccatgttggccaggctggtctcctcctgacttcaggtgatccactcgcctcagcctcccaaagtggtgggcctgaattcaaaattttattgctttcaaccatacatgtattatacaaatacatgaatccccaaaccaatattttcatatttttaattttatataaatggaatgaagctctttgtattctactgcttttattacttactattatatttgtgaaattcatccatgttgatacatgtaactctgctttatttatttttcctgctccatagtattcccttacaggaatataccacagtttacccacatttctgtagataaatattttcatccaattttgttttgtttttgctattaaaacaatgcttgaatacacattatcgtaaagcctcctaaggaatttgcacaagagtatctttaggactcatacctaggagtgtaattgctgggaagagtgaatgcctatctccagcttttttacataatagccaatagtttttcagagtgataatagcaatttatgcttctattggcactgtgttaatttgtattactcccccaaattgctaacagttaatatggttgaaattttaatttctgcagacttgaggatagaaatgattcttcattttggacttaatgtttatttccatgaataatgataaaattgagattctttttgttttttctgttttctgtgaaagatcattcatgtctttttaaaaaattgtgagtacatagtaggtgtatatatttatgcggtatatgggatattttatataggcccaactgtaacaagcatatcagagtaaatggggtatccataacctcaaggatttatcctttgtattataaacaatattatgttcttttagttattttcacatgcacgattaaattgttattggctatagttatcctattgtgctatcaaatactaggtcttatttattcattgtaactatttttttaacccattaccatttcttacatcccctgtaacctgttcattaccctccccagcaactggtaacgatcattctactctctatgagttcaattgttttaatttttagctctcacaaatgagtgagaacatgtgaagtttgcctttctgtgcctggcttatttcacttaacaaaattacttcgagttctattcctgttgttgcagatgataggatctcatttttttaatggcaacacactactccattgtgtatatgtaccacatttttattatctgctcatctgttgatggacacttatgttgcgtccaaatcttggctattgtaaatagttctgcaataaacatggcagtgcagatgtctctttgatatactgatttcctttctttaaggtatatacgtggcagtgggattgttagatactatggtagctctatttatagatttttgaggaatcctcaaactgttctccatagtggttgtattaatttacatttccaccaagagtgtatgaggattcccttttctccatatcttcaccagcatttgttattgcccgtcttctagatgaaaaccnnnnnnnnnnnnnnnnnnnnnnnnnnnnnnnnnnnnnnnnnnnnnnnnnnnnnnnnnnnnnnnnnnnnnnnnnnnnnnnnnnnnnnnnnnnnnnnnnnnnactttctaacatactgctactgtatgaatctgataactgtgacaggttcttggtataagatattagttattaaaagctgatatctgagttattatttatgaagcctttttattcatacatagaattaataataaatgatgctcaaaaagtaaaatatgcaaaattgaactatctagaatagaaatgcaggcaaattaagaattaacacttctaaataatttgtcaaataaattaatcacaagtttagtagtttagacaaatttaatcaaataagtatgtaccagatgatgttaacattaaatttcttatgtgccttctgatagaaaataaatggaaattattaagtggctgttctactgataaatttatgtaacacatgaaaaatgccgaaatgaaggtgatgacatcatgtttgaccactactgggagtcagaggacctggattttagttattttttaggcacttactgcccctgtaacctttattaagtgtgtaaacagttaccacccaaaaaagtctgttgatatttgtgaatccttgtcatttccagtggcctaaactctcatgccaagcaccattgctccacatagctgtccagcattcttgcttctgagctacacagtctgttccagtcaaccacgtgatgttggcatgagttagagtgtaaacgcaggccacttcaaggcttcagtcacctagtgtggttcaaaggttcaaagactaaaatcagacctaggacagtacaataggtcctcaaataaacattgttttgttcaacataatttcattataatgttaatgaaaaaaaaataaaagattcctggccggagccactgtctgcgtgaagttcgcacattctccccgtgtctgcataggtttcctctgggcactccagtttcctcccacatccaaagatgtgcaagttacgtaaattggtgtgtctgcacccactctgattgagtgtgggtgtgtatgtgaatgttccctgtgatgggatggcatcctgttcaaagtttattcttgcctgagctgccgggatagcctctgggcacctgcgaacctgaactggaataactgggtaaataattatcttacttgtttttattaatctttcttaaatgtatgtatagctcacatgtattttaatgtttaatattaggggtgtttttgtctttatttcgaaatttggtgatttttttttttaaccagaaatatgctttaggaattaactcatttgtatcaattagcctatggtaaaatcggtttcattatacattgttttgcttgacgtcatagtttccaagaacctactgacaacattaagtgaggacttcctgtggaacaaaatgtctaagatcttgggctttggaaataaacaggtcatgattgaaattccagggtgacttatttcaacctaagtgaatttgaggtgtcggagcttcagtttcttcctctttaagaagaagtgtaagggtggtaaagaaataaaaataaaaataaaaataaaaaaaacagacatgattaacagataattgtggctactatgtgccaagtactctgctaaattatttcttcataaagcagttacctcagaggtatcttgctgggaagataaaatgagaaaatgaacaaagatcacagacgaagcacttgataaatagttcttactttttctactattactattttagctggtgctgctactgctgcttctactactgcactgcacaatggctctaacctgaaatagcctccttaataggactgcaagataaaacacagggtatctagtaaatatatagctcagataaacaacaattttttgtacaagtattatatgggatatacttatatttcatggtttcatgggacgtatttatacgaaaatatatctgaagttcaaatttaactgagtatcttatattttcatttgctaattctagtaactttacttctcaaatatacatgtaatttatctaacatgtagaagagtacagatcgttcattaaattagtcattagcgctgtcaacagcatttcaaagcaatcccgaagttcgggaggggcagtggcatcttctgcaactccagtagagggttcaagcagcacatctcatcttcatgctattcatgcaccatgtattctctaggctagtagaaatcttttcaagaatttggactctattgctcttttaatgaagtagttttatatagatgattatgcataaataagtaacagtaaaaaaaaacccaacacattaaaattacacataataagaatttcaacagctgtgttttgaattcatcaagcatttcaaaggaatttccaactgtttatatggcaactcccaaaatattttgctaaatacaatattcttttgattacaaaatgttatctctagtataagaaaacttaagccctctgtctgtttctatccaatttatctttaaaacagaagaataatatttattaaaaagttgctttatgctcttaaaaaccctttgtgtctttttgcctatacccaatgtcttattttaaaaatcgtattatatatcacataaaaaggattttattctcacagtatggcagagcactacgtaccaggaaaggattctgactttcacacttgagagacatttctgcccctcctttcatatcacacattaatctaaagataagacatgcctcacacaacatttggaagctgtgctccaaaatgtcagagttgagcattaacattctgtacttttatgtacaaaatcaccccctgtgagcataaatatcagtctagttgtgtacttttcatcattatttattacggaaacgatgctttaatatttacattaattttccaaaaaattagtcataaatcaaattaaaacactttctcttccaagtaactagtattacttagaagacatacttaaaagttttttgtttctattgtgttttgttgttgttgttgttgttttttctttttttacaatgtgacatttactattatcacccccacgtttctcttttggaaaataagtaacaattatagaatttgcaaatcaattctatctttattcatttgcacgagtgagggcaaaatcacaaaatgagtaaagctggtatctagtgccaccctcccacacactcacaaccttgttcctccttgacatcttctcaaacacttgcaggaaaaataaagaaacgaatatttaagcaatcagatggtcatgatagagtttcacagtgactgacaatacacaatatttattcctttagtaagacaactgtctaggacggaacaaagggaaaggcccaaatagtcatcatggcgacatcttttgtcgccttctaaaaactggtaggataaaacaaacaccataggctctatttagattattttaaaaactttattgctatgtgaagaaacctcatggcagtgatgatgattatcctaccatttgtttggtattttatggttcatatgaccttttataaattatttgggagtattattagttaaaatcaagaaaaactgccctctccctgtgagaccttgaattaattaactttttatttgctttgattttatatctattttaaatgagataggaaataaatgactcagaattccaaggggcacataacagcttgaagagtattttgtttgtttttttaacaaagatacttattattttctcccaagataatattgattaacaataaggctttaccctcagcccgctgctggggtgttactgtttttgttaaaaaaaaaaatgtgaactataaaaattgctcctctctctctcctgtattgggaaaggagtgaaaaggatgagacaagaggattccagccataaatacaggcttttttgatgacacctagttaccatttccaagagataaggtgtcaaaacttcacctattgtgtcctagacaactgataaggattatattcaactacagttttcttnnnnnnnnnnnnnnnnnnnnnnnnnnnnnnnnnnnnnnnnnnnnnnnnnnnnnnnnnnnnnnnnnnnnnnnnnnnnnnnnnnnnnnnnnnnnnnnnnnnnggccggggtgtgtgatactccccttcgtgtgcccatgtgttctcagtgctcaattcccacactatgagtgagcacatgcggtgttgggttttgtgcccttgagatagtttgctgaaaatgatggtttccagcttcatccgtgtccctacaaagcacatgaactcatcattttatatgggtgcgtagtattccatggtgtatatgtgccacattttattaatacagtctatcagtgttgcacatgtgggttggttcagagtctttgatagtgtgaatagtgccactatacacatacgtgtgcatgtgtctttatagcagcatgatttataatcctttgggtatatacacagtaatgggattgctgggtcacatggtatgtgtagttatagatccctgaggtatcgccactctgacttccacaagggttgatatagttcacagtcccccccacagtgtaagagtgttcctatttctccacatcctctccagcacgtgttttttctaattctgtgaaaaaaatggcattggtattttgatagggattgcactgaatctgtagttttcttgggatagtatggtcattttaagtgtaataggttttctttgcacagtatggtcatcttaatcacattaatttttccaatttgtgagcatgaaatgtttttctatgtgtttgtgttgtatatgctttctcttatgagtgttgtgttgttttccatatagagatctttcacctccttagtttaacatattgctaagtattccctatttctttttatagctattgtaaatgggcttgaaagaacgcaccatacttttttgtctactctcctttcatatcaaggtgtaggaggaggtctttagattatatattataatattattattatttttgtggggcccccgagtacttaagtgctaaaagaaacgcttttttttatataattttttaattataaggtaggcttatatatttaaatgtgttttagaatgctccttactgaaaagagactaaatgtcattttacgcatttccatagtttcagaactattttaggctataaaatatttatgtaaatatttctaaggtacatgaataaagatatgaaaacgttcttaacataagccattaagatgatactggctgttcacagttgggctcactttcaaggagggataatcaaatggaattttgctgagttgtactgggaatggagcttaaggagctaatatctatatccaagaatatttcgagcatgtcttggctacattctcctctttttttccttccttggtaattttttgtaggtctccaacatactgaatgtctttgtcactagcatgaaagatattttaaaacacccttattagcttgaattgcatccccttttattttggtctcctaaataatgagattttgacactttctctaaacatcctgcattttcttctgcattaaaaagtctataatcttctttcatgaatgtagtacagttaggtcttatttatttatttgtttatttatgatggagtcttgctctgtcacccagtctgcagtgcagtggtgcaatctctgctcactgcaacctccctgtctgaagttcaaatgattcttgtgccttggcctcctgagtagctgcaattacaggcatgcgccaccaagcctggctaatttttgtatttttagtagggaaggggtttcaccatgttagccaggctggtcaggaactcctggcctcatgtgatccaccaacttcggcctcccaaaatgctgggattacaggcatgagccactgcacccggacaggtcatttttttaattgtgaaaagtagttcaaaattttttagagctaaatattataaaattattttttaaagtgacagtcacttgattttcttaaattgtaattgaatattttgcaatcaagatttactgattattaatagatatgctaagcattttaaagttacaacaaaaaaatccattttaagggattaagtagattttactcaaatatgggttatttaaatgccctagagacaaagaacaaacacttgctcagtaaattatgattttcttccttaaccattaaaaacatttgtttttgtgttgtgatgagtcatttttcagttacaaatttcctctcgattaccttctagtatttttgagtgagaaggagctatttgtttggttggataacagtctccaaactcattaaaaataggtggctatagcaacattcttgtcacaactcactcacttctgcaaaacaaatattgacaaaatatgtttagttaaagacaaagaacaacagaaaaacaatgatattcaattgttccaaacttcgagctagcctgtgaagccaaaagatcaactgcatattattctgaactcattgttctattttctttttaataagattgttttctttgtttttatgcagttttagaagtattttagacctttttgattgtatgcattttggaacactgacccttaagcatacacactgtcttattatttcgatcttaggctaatatgtctttcttttattaaccagcctgaaatatctcttttgcccttatctaagaaaaggaaaggaacctcatagtttgaagaagcacagtttaaaaacttaagcctctagcttacttcatttctcatcatttcaaacaacgaaagatccacacagtagatgtttcctgtctttttcaagatttaactaatatttttccatcttgtttaaagatttagaagtgtagtcttttcagacacctcaatggtttaccataaaaaaggcgtgtgcttcaattctaccccataaattcttgagcgagtctttggttggtcttgtaaaaccaaccaaatgtactatttcccaaacctccgagtcctacttatgaaacattagaaaaagtatcttatctgtgtgtatttttctactaagcaaatgagtccagatttcttaaagttggacatccattccctaagacagccttccctattcagactaccaggacaaaaatcttgcctttgggatagaaaagagtgaaagtatctattatgtcctccacccacaaacatcatgctcaaggccatgcatcaagcccacactggtgtggagagacatttttttttttcatcttaataggccatcacagataatttttaaaattttagttataaaaaccacttgtgaggttagattgaggatcctaatctccatttcttaaaacatgtaggttatgttcccctttgctgcttggtagagactcttaggctgaggtgctattatctgggacatcatttgcctacaggctaccatcagaggctctgtggaacaactttttttcccctttaattgtgttttaccatagagtgcactgcccttttacacgtgatatactatcattagatagtttttgtgtaggttaaggcttttcatcttcagaagttctccatcaaaatgcaaattgccctcagagcgatatgacacagacacactaagaggctatttattaggcagaatccaggggaagctgaaactctcagctcaggatttcattatcttctaagagtattttgatgctgatttgacaccttgtcttctggcttggaggcaagcaaagaatgacagagcgatctatagggccagagcagagaggaaaagaacaagacctggagcaaaacagaaaggcagatctaaagtctcagtaattgttttctgaatcaaatagcattaatgagtcatctgtcatctgaaaatgctcttctcattgatggttggagagaagtgcagctttgtgggaaaatagagcagttgcactgaaaagacctgaacttaaagcacttgacttaaagagaggcacattttaatgcagagcttgagtctggtggttttaatgccagcattatattcaccagctgtgtgactttggacaaaactgcatttccttagaccctccacaaggtagaggtgacagtcagacctatttaatagggttatttggaggatttgatcagatgtcgtaggtgctgggggaaaaaaaaagtcagttactactatgatgtctaacaaatatagagttcttactatatgataggcactattctaagcattttatttaaatttattcatttaatttcctccatactctgatgtaggctctttcaaaacccctactttactgttgagaaaactgagaattccatactgaagactatagcaataatctctttaatgggtttgttgcaaggctttaataaaatactgtgattatgcttaagtaatactttttaaaatgtaatgtgcatatgaatcatttgaggtactgttaaaatgcagtttgtaattcattcagtaggtgtggagtggaacatttctatcaagaaaattctgtatgtctaagaagttcccaggtgatgctaatgctgttggtccaggaaccacactttgagtgtactaggaaactcctgaaaaattttgcacttttggtttggatgcttcttttttttttttaattatactttaagttttagggtacatgtgcacattgtgcaggttagttacatatgtatacatgtgccatgctggtgcactgcacccactaactcgtcatctagcattaggtatatctcccaatgctatccctcccccctccccccaccccaccacagtccccagagtgtgatattcccctttctgtgtccatgtgatctcattgttcaattcccacctatgagtgagaatatgcggtgtttggttttttgttcttgtgataaatggggctgggaaaactggcttgccatatgtagaaagctgaaactggatcccttccttacaccttatacaaaaaaaaaattcaagatggattgaagacttaaacgttagacctaaaaccataaaaaccctagaagaaaacctaggcattaccattcaggacataggcatgggcaaggatatcatgtctaaaacaccaaaagcaatggcaacaaaagccaaaattgacaaatgggatctaattaaactaaagagcttctgcacagcaaaagaaactaccatcagagtgaacaggcaacctacaaaatgggagaaaattttcgcaacctactcatctgacaaagggctaatatccagaatctacaatgaactcaaacaaatttacaagaaaaaaacaaacaaccccatcaaaaagtgggcgaaggatatgaacagacacttctcaaaagaagacatttatgcagccaaaaaacacatgaaaaaatgctcatcatcactggccatcagagaaatgcaaatcaaaaccacaatgagataccatctcataccagttagaatggcaatcattaaaaagtcaggaaacaacaggtgctggatgcttcttaactatttcttttgctttctttctttttttgagacagagtctcattctgttgcctatagtggagtgctgtggtgcaaacatagctcactgcagccttggcctcccaggctcatgggatcctcccacctcagcctcctgagtagctgggaccacaggcacacaccatcacatccagataatctttgtattttttgtagagatatggttttgtggtgttgccaaggcttatgttgaattcctgggctccggctatctgccaacctaggcctcccaaagtgctaggattacaggcatgagccaccaaacctggctgcttcttcaccatttctatgtgacaagttttcctgtatcttgacaagcagggcttgataaacattagtgtaccaatacagaattctgcacagactggnnnnnnnnnnnnnnnnnnnnnnnnnnnnnnnnnnnnnnnnnnnnnnnnnnnnnnnnnnnnnnnnnnnnnnnnnnnnnnnnnnnnnnnnnnnnnnnnnnnnaacaaagctgggagcatcacattatttaacttcaaattataatacagggatatagtaacccaaagagtacagtggtggtataaaaatggacacatgaatctatgaaatagagaactcaaaaatagagctacatatttatagccatgatgatctttgacaatgtcaacaagaacatatagtggggaaaggggcacccttttcagtaagccgtgctgggaaaattggtttgccatatgcagaagaatgaaataggccccttatcactcaccgtataaaaaaatcaactcaatgtagattaaagacttaaatgtaagacccacaactataaaaatactagaataaaacctagggagaaacttttctggacgttggcttaggcaaagaattcgtgactaagacatcaaaagcacaggcaacaaaagcaaaaatagacaaatggaacttaattatttaactaaaaacttctgcacagcaaaagaaataatcaacagagtgaacagacaacctccaagagggaagaaaatatttgcaaactatgcattgagaggggctaatatctagaattgataagtaactcaaacaactcaacaacaaaaattaatcatattaaaaatgggtaaaggacatgaatagacattttttgaaagaagatatacaaatggtgaacaagcatacacaaaatactcaacatcaatcatcagagaactgccaaccaaatcacaatgagatatcatcttataccagtcagaaaggctactattaacaaaaaataacatgttgatgagggtacagaggaaagggaaaccatatactgttggtgggaatgtaaatttagtacaacctctatggaaaacagtatcgatatttctcaaagaactaaaaatagaactaccaatccagctatctatccaaaggaaaaataatcattatatcaaaaagatacctagacctgtatgtttatggcagaagtattcacaatagcaaataaatggaatcaacctaagtgtccatcagtggatgaatggataaacaaaatgtgggatacatgaacagccgaatactatttagccatgaaaaagaatgaaatcatgtattttgcagcaacatggatgtaaatggaggccattatcttgagtaaaataattcacacatgaaaagacaaacaccaggtgtttacacttatgagtaggagctaaataatgtgtacacataaacgtagggtgtggaatcatagacaatggcaactggtaagggtaaagggagaggaggggatagacaataagtaattacttattgggtacaaggtacattattaaggtgatattgagcagtgaattatttgttggcaaggtcagctatttagacttttttttcttcaagaaaaaaatgtattagtttgtggagcccataagacagtttgcaaagccagcttaacccgtattcatctgaagtatagtacttcatgtgactaccatagaataattgacaaaattgtttctaaagtggcaaaaattttactaattccagctaggaataccagtactcatggccctgtgttggaactgttttggcaaaggagttgtatgtacatgtatgtgttaggcttgattagataagcaatatgtgaatagatggttgtgcctggattaataagagaaagtgggttttacttctctttggtatctataagaaagcaaatctttacactacccttttgcaaatgcttggtcaaatctaagatgtcaacaatgagtagagcaatgggataggatctgctggaagaattgcattatatttcctcctcctgatactcaaatattcaaaaacatgagtcattcttaaatttatcgagtatgagttacctacactggcctgataaggaattactttaaaaccatttttaatttagcaactatctactcaatttccttggcaaatacatgaataccaataatcaaaatgtcaaggattatataaagctgatcaagctaaatggacaaatgtttgaaacaggaaatttatagtctcttattaaccacacatggcagtaattaaagttcattaaaaaatctctagtcccagggcaatagtctaaatcagtggttgtcaagtttagcgtacatcagtattatctggagagcgtattaaaacacgggctgctgggacccatatccagagttactaattcataggtctggggtggagcctgaagatttgcatttctaaatttcccaagtgctgctgctgttggttataagcatcacattttgagaaccactggggtaattttttctcaattatccaaaaacatatcagtaaaaacaattttcctttagatttaccaattttttgtaatttcatataaaagaattatagacagaaaaaattatgtaaacaaacattcattctaaactaagcattatttccccaaatcacttttgtgtgattaatctttcaaaataacatatatgtagtttttattctcaattatcattttgttttattccttaaatacttccttttatttctaaggtaataaggatgccagattaattctttctgctttacatagagcaaaattaatcttaaatatctcaacttgaggcaatatatgattatatcatcatatgaaggaattaaatttcctaaagaaaaagaaaatgtctatgcatttcagtgccattttctcagttgataacggagagtaatgtcactttttccttcaacactgcatcaccacttcattgtatgaaactgaaacgtttgtgttagcttagtagttctgtagtaaaatcatttgagtctctaaaatacatgaacaaaataaatctgtaatctttaaaaagtaaattcatgagagtaacattgtcacgtgtttttaaatgcatttctggccgggcaccgtggctcacgcctgtaattcccgcactttgggaggccaaggcgggcagatcacgaggtcaggagatcgagaacatcctggctaacacagtgaaacacgtctgtactaaaaatacagaaaaattagccgggcgtggcggcgggcgcctgtagccccagctactcgggaggctgaggcaggagaatggcgtgaacctgggaggcggagcttgcagtgagccgagatcgtgccactgcactccagcgtgggtgacagagcgagacttcgtctcagaaaaaataaaaataaaaataaataaaataaatgcgtttccatggaatgaaactttattttagaaaattccatcagaaagcaattgcgcattcgtatattttagcctattaacaaaaatcattttgacaatcattccatctatacttagttccaatgttcattatttagtatgaatcttttatgcctaacagctgttgatatatctaagctgttattagctagcatctagtttaaacccaaattccttagtgatttcaggttttctacaatctaaacataatccatttgctcattattatctcttcaactaaattttggtaaaaaatttagtttatagaccttaaattttagttagttagaccttaaaatttagttatagaccttcaaattttcctggtgttttcttgcctctgagcttcaagccgaaattccttgcttcgtcctttcttgctgtgtaaatcctacccacctaccttcataacgtcttttcttattaaatcagctgtcattggacacgttattttctaccacgtattattagctaacttttcctgtattaacaataaataactacgattgcattattattacttaccaggacctaaaaaacaagtcacttaccataatcgtcaaaaggatttaggtgctatcaccatgttaattaatcaagttaatattaaagctgaagatcagagtttttaccagtcacacggccattaagcagcagagctgagatttaattctacatctccatgtcttgtaaaatcatgtacacataatcaaccactatattacattgtaaggcagccttcaaattataaataggttatgatatttttaacatctgggagtacttagcataaagaagtgcttacaataacttacactttgattaaaattcaccttatttagttgtatattgggaagaggtacctattttctcttacaccttaaagctcaaatcacgaaacctcttattttgcttatgagactagtgatttttgtgtaaattttaaaaattactctcactctgataaatgcgtctttaattactctatttggcggannnnnnnnnnnnnnnnnnnnnnnnnnnnnnnnnnnnnnnnnnnnnnnnnnnnnnnnnnnnnnnnnnnnnnnnnnnnnnnnnnnnnnnnnnnnnnnnnnnnattatttcactgcattaaaatatgcaacttatttaatctattattgatgcacatttggggttttcaagtttgtagcaaatgtttatgccagcaactaatgctgttgtttaatgacaaattatctaagtagagcataaccaaatcaggtgatctcttaaaatcatgtgggcttttcctggtgaaagagatttagaatttgagggggattttaagggaaggagattctctgttgctggctttgagatacaagaggtcacatgtcaaggaatgcagatagcctctgggagctgagtggtcccagctactggccagcaaggaaagagggacctccgtccatcaaccctagggactgaattctgccacaaactgaatgaacttgggtgcatattccaccctaggtcctccattaaaagaacatagccctgccaactccttgatttcagcctgtgagaacctgagagaggacccagctactccatgcctggacttccagccgataaaactgaaataataaacaggagttgttttaacaagtttgtggtcatttgtcaggcaggagtagaaaaccgatacaagtagtacatgtggcaaatgcaagcctcaaaggattagtgtggaagaacctcaggaagaaactgagagagcagtcagagaactattgtgacacaggggagaagggagtttcaaggagactgtttccaagagtttgaattgcaacagagacagcaacaagtataatgtgtaaggaagtaaaatctttggattcgatgatacattggtcactaataactgtcagagcacttagggcagaggaatctcaaactgcagatatgtgggggaaaaatggaaagtgaaggggaaacctatgagtatagacttatctttcctgaaaagtgattgagaaaagacagaagtaggaaacgggataatgagcaaactggaagagagatgagtctgtttatatactcaaagcagaagaggaatgggagaaatcagagtagagaggagaataactgaagtgacgtttccaggtaaatgagggaagatgatatagtgagtgcagatggagcagatgatcttgaaggggaaaaaggtaccttcccttctgatatttacagtgcagaagataaggagggaaacagatataactaattttgaaaggaggaaatgggcattggaggaagtatcactcttagacccggacaattgggaagtactaacttgggcgtctacagatcccaagctttggcatgcatttctcaaaattttcaagtcctccactaagacttggaattgatcagaaacagcagtgctttcatcagtagggtaccctggatcaggaccctgggatagttccacactatcccttgtcaacagaagtatcttcctcaaaattgtcttagatacctgggactggagatggcagtgccatctgagaggatgtggatggaccttgggccctatctttccccttcaggacaccctctgctgctttgttacttgcatgggctctaccaaatgcccctaagatgtttggaaatcatacctatgggattgtcattggcctgaagttagtcccagattttaggagagtgacttagtaagcaccttgttcttgctggctggtgtagtaactttcttgtatgggactgtgtgagaatgggctgccagaatggcactggaatggtgatttttggtgacacttgcttgtgaggatacagtcagcaatcagcaaccaagggctgtgggggtggcagcagagatcttttatcctatacgcctttcacttatggcactcagggaagtcaccttaacttctctacaggtgccttgttcaagcagtcactgggaaatggctacacctatcttctctaaaggcttttatgaccattgctccttaataccaaaagttgcttccagtcaacccttctcttgcctctcattgatatggtgacattgtgctcccctcagttggtcttcagctgtactggaagagaaacgaatattgcctgcatgaaatggactgatctgcttgcttcaaccaagagtcattcacttaccctcctctcctgtagtgacatgtggaaggcagggtgtggacatgctgaaagagatcacattcttgaaatgcattcattatggcctaaaacattcaaaaaaggacatgattggaagatgtctttttctatatttattttaaaagattctgaacaataaatttaacatgaccagaaaatgaattatggcaagacttggatttgtggtcatcatcaacaaagcagagtcagaactgtcaagagggtcattggaagctaatattcatgggtggcacaatggatgatgtagcatcatgagtaatgatgtaatgagcattaaataagtgatatcagggatcccccttttttttttttttttttttttgagacagagtctcactctgtcacccaggctggagtgcagtggtgagatctcggctcactgcaacctccaccttgtgggttcaagcgattcttctgcctcagcctcatgagtagctgggattacaagcatgcgctgccacaacgggctaatttttctatttttagtagacatgggggtttgccattttggccaggctactctcgagctcctgaccttaggtgatccacctgccttggtctcccaaagtgctagaattctaggcatgagccaccatgcgcagccctcctattgttttaatacagacattggatattgtgattaataacggtactgctaccttttactaacggtaggagatacagaattaaccagaaatggctcatctgataataaagaatatgaagccacaattcctgaaccatctttctagagatggtgttggacactatgaagaatcttcacatgcactgaatagacaataaataaataaataaatacacaaatgtctcttctctacctactacgctaagtcatcataaataattgccataatttggctgggcgctgtagctaatgcctgtaatcccagcactttaggaggccgaggcaggtggatcacgaagtcaagggttcaagaccagcctggccaatatgctgaaaccccgtctctactaaaagtacaaaaattagctgggcgtggtggtgggcgcctgtagtcccagctaccagggaggctgaggcaggagaatctcttgaacccgggaggcagaggttgcagcgagccaagatcacaccactgcagtccagcccagacgacagagcgagtctctgtctcaaaaaaaaaaaaaaaaattgccgtaattcacatgggtccattaatttagtaacactttctttaataatcaaattgtttctacaaatagggaccctgcaataaatttatttcccctgagtcctacatgccctataggcagcccctgaatgaagataattcacattttctcatcttaattttatctataaggtgagatttaaggtcatcagctacaagtgaaaagggtgatgtttttgaagaggtgtgaaaagagttggtgaagatttaaaacaaccactaatgagaatgggacacagttctgttttggacacataaaatgaataatggccagttttaagaacctggttaagtgtgaagaccatgaatctgtactgagcagtctatatatctgaggaattttattccagcaattttcaacaaatcatgtataagagtggaaaagacacacagtgagattaattctaggcttagtactggccagatagttgtagcagaaagacatgaatccaagggtattaagagagatttgggtgatctatcatgggtttcaggatgagtggtgatgtaacgtaagacagaagtaaactagtagttcttggagacaaaacccagagttgaaccaaaggtaagggatttttaggatgataagagagcaagaggtatatatgagtcaggtgccagcaccttctataactttgacaagaaacagggagttcaaggttgtataaacagacatcataaacctcataggggaagcgtttagccacaaagattgatgagtaatggcgcattacttttatattgatggtgttacaaatcacagatacttagaggcttgaaacaacacaaacttattatgtgtagtcaaaagttcaaagtcaatttctataggctaaagtgaaggtcttatcagaactgcactccttcttgaggctctaggggaaaatctgtttccttgccttttccactttgtagaggccacctgcatttcttggcccaagggcctttctaccattttaaaagtagtatcctttctcctctctgatctctgcttctttccttataatttctttccctcgaactcttatctttctacttccctcttctaaggacccctgtgattacaatggacccatccagatcacccaagataatctcccccagctcaagacccatagcttcatacatgtgtagtctctcttatcatgtaaggtaacatattcacaggttatcaggaatgggatgagaacatctttgggggtggacatcattcagcctcccacaaatagtgtattgaaagaatgaatatttctgcttggagtgctctgggggcatttgtattcaccagacagggcaggattttgctagggcaagaaaaaggaaaatatatcctatgtcaatgttgagcccaatcacagaacagtggaagagattcagcaacagaagtctgtaatggaagcttccagacaaaatgactgggctttatattgtttatttaatcagtaaaataaagtaaatttgcaatgcctgagaagtagttatttttttcatgtttgcattgtctttttcatttataaaaaagggtgttccattctatgacaagcttcacacaattgaaattgaaagcatttctatttccttgaaaatgcatgaatttagattctgaaactcaagaaaattacattatagtggaaggcaatgtgtctatacttcatatattgcataatacttatatttcttagactcatgctgaatagaatgagaaagtcagtatcatttatgtcaacctttaaatggtacttttgcaagaaagtaacaaaaaaataaaaaaaccaatatcctagaaaaattctggatattctagttgctgactgaataatgtccataatgggcaaactatttcgataaagtttacactttgttattattttatttctacactctcaaaatttaatttccttagataaattgatctgagatataattactgaagagctgatgtctgttagtactggtgacttgaacagttaaagactcagtgtggcataacttctgccccttctcattgctggtcaagggtaaattttttaaatcttttcctttaatttttatcaaaagtggtaccaggtccatttgggatgaagcctgctttttgtcgttgttgttggttggttgtttgtttttgttaagacggagtttcgctcttgttgcccaggctggagtacaatggcgcgatcttggctcactgcaacttccgcctcccaggttcaagcgattctcctgcctcagccttcccaagcagctgggattacaggcatgcaccaccacacccggctaattttgtattttttttagtagagacggggtttctccatgttgctcaggctggtctcgaactcccgacctcaggtgatctgcccgcctcggcctcccaaagtgctgggatcacaggcgtgagctaccgcgcccgggagagtaatctttagatatgtgtttcacattctgtgataaagtcagtagcaaagcgctaaaggaaagagaaaggtatggggagtctacgcacacgtgtgtgagacacatatcagcggtctaggtctaaagcacacttctagaaagggatgaggggaccctacacaggtttctccattcatacacctctcgtctgcatctgggcacctgctgcagatggtgacgtagggtgaggaggctcattttctaaaaagtctgtaaatctttcttttaaaaaatcctccatggaaataccaaaaagtgaataatgtatcacttgctttccaccacgtatttctccttttaaaaattttattttatttttaattgacaagtaataattgtatagagggtataatgcaatatttccatgcatgtatacattgtggaatgagcaaatcaggctaattagcatattcatcacttcagatacttatcatttctttgtgctaccacagatttcattgctgaaaatcagcagctcagacatctgaaatgtcaccctctaaaatctttgtgcaatttaacacaccattatgtagaagggttgagaaatagagaaatatcgaggtgttgcccgcaggcaacacaacacaattgcagtcccaggcaggagattctggaattcggtttaacaagtaaggctgcttaaagctgtcagggaggcaagcaagacactccctgaatgtggaaaacactaaaggacccacattttggaagtgaggctcacagcaaaaaatatgttattattgcaagtgattaagactccacccccacagtgaccaaaataaggatcttggggcgcagaggaggcacgaaaaagtcacttttcctggagctaagtgtaaaggctcaactacactgtgccagctgcgtgatagaaccccatcgaataaagcacaaatgtgataatgtgtactataactcaaaagcatattttatcattgataaaacccccgatacatcatctaataaacataatatgactttacatttatcgttggcctgacattttaagctgtgtactgtgtttacagattatattgggtagagtggggaatggaagtgagaagacactgtagaaaaaaaataatctattacacaaggagcctcagggcaggacacagaatcttttattttactgtgtgtactatatctgtatgaaatagacacagagcattatcagatataaatgagactttccattgccaacagcgaattcatttatgtagctcgctttatcactaatgaatatctatttttttgcttaatatagggaaatattttactcgaaaaagaggatattcaaatatttaaaatataagctaatgggggtgtatattttacaactccttatataagtgatacatcccatgctctatatatagatacacacccacctttaagtcagaaaattgtgttttatctcaaacattttccaaatgtgcagaattctactctgacggtgtatcattgagaatcagaatatgatttcaagcagcattgatatttgaggactatattagggacatttctccagattagtgtgtcataaaatatgccacnnnnnnnnnnnnnnnnnnnnnnnnnnnnnnnnnnnnnnnnnnnnnnnnnnnnnnnnnnnnnnnnnnnnnnnnnnnnnnnnnnnnnnnnnnnnnnnnnnnnattagctatgagtctgtcatgtatggcttttattatgttgaggtatgtttttttctatacccagttttttaagggtttttatcatgaagaaatgttgaatttttatcaaatgcctctacatcatcagttgaaatgatcatatggtttttgttcttcattctgttgatataatatatcacattgattgacttgcatacattgaaccatatttgcatccctgggataaatgccacttggtcatgatgaatgatctttatgatgtgttgttgaatttaatttgctagtgttttgtacaggattattgcataaatgtttattagggatattgtcctgtggttttcttttcatttttctttctttttatgttttgatttgtctttgtctggttttggtaattcttcaccttgtagaattagtttggaagtaagtattccttcctcttctattatttggaagtttgagtaaaattggtattagttctttaaatgtttggtaaaatttagcaatgcagccaacaagtcttgggcttttccttgctgacagactttttatcgtggctttgattttgttgcttgttaatggtctgctcaggttttggatttcttcttggttctgtctttgtagattgtatgtgtcaagaaatttatccatttcttcaggttttctaatttattagcttatagttgctcatagtagcttctaatgatcttttgaatttatgtggtatcagttgtaatgtctcctttttcatgtctgattttgtttatttgggtcttcaccctatttcttagtctagctaaatgttattcaattttgtttatctcttcaaaaagccaacttttatttcattaatgttttatattttttcttcatttcaattttatgtatttctgctctgatctttattatttattttcttctactaagtttggttttggtttgctcttgcatttctagttctgtaagatgtatcattaggttgtgtatttgaagtttttctcctttttagatgtagacacttatagctatagacttccctcttagtaccgctttcactgtatcccataggttttgatatgttgtgttttcattatcatttgtttcaagaaatttttcaatttctttcttagtctgtttatcaacccactgccagcataaaaccaatgtacatttaaggcccaagagctcttctgtcatgttatggtgaatgctgaaaggcatgggactcacgcttcaggacactgggctcccctctagcctagggtaggtccagaaatgccatctaaaagccaaagtctggaatcacagactccaagagcctacttggtgaccaagctgatacctaagctgcaagacaaggtcccgtttcttcttccctcccctcttctcaaacagaatgattctctcctgatagacaccatagctctgattattctgggtcacacctgaagtcagtacagctctaagtctcacccaaggtgaatactacctagctaccactgctgataattcagggcaaagagctctttagtcaggaggtaatgaatcttgccagtactgagtccttccttccttctcttcagggcacaaggttcccatttggctcaggatgtgactagaaattctgtgtgggagataaggcctggaactggccctgacaactctgtctagtgccctgtcctactgtggttgagctgatatccaagtggcaagacaaagtcccctttactgtctcttctcctctcctcaaacagaaataaagggtctcttttggagctgcaaactgtactgcctagggctgcagagggatgaggcaagtattcccttagctgccccagttggtgtctcactatgtcacctgcccaccaagtccactggctctgagcccagcaaaatactggcctttcctaggagttgcagtcattgtgtcctggactgcctttcaagtttatttagaaccccagagcattttaatcctcagctgtgaggcttgctgaaactcaagtttgactgctgagatgggcaattcccctctggctagggctagtctaaatggtacctccatgggcatcagctgagttctgtctaatgttggcagcatcgagttccaatacaaggtcccacaaacactgtgctctgcctcccctaagtgcacatattctctctctgtgccacttggccactgccagggagttggggaggattggcatcagcaattcaagactgtcttttctaccctcttcagtacgtctttaagtaatatgaagttaaaaccaggtatcatgattacttacctgatacttggctcttatgaaaggactttttcggccaggcgtggtggctcacacctgtaatcccagcacttttggaggctgagatgggtagatcacgaggtcaggagatggagacaagcttggccaagatggtgaaaccccgtatctactaaaaatataaaaattagctgggtgcagtggcatgtgccttgtagtcccagctacttgggaggctggggcaggagaatagcttgaacctgggaggcggaggttgcagtgagctgagatcatgtcactgccctccagcctgggtgacagagcgaaagtccatctcaaaaaaaaaagaaagtgttttttgtgtagatagttgtcaaatttggtgttcctgcaggagacttctagaagttcctcagtggaggcctctatttggccatgttgttttgcttcctccagtcattcatgacttaagctcatttttctgtttattttctctttttgatttgtatgatttctttatataataggtatactaatcttttaaacacaattatgtgtgtttaaaatatattctcagtttttaagtcatattttcactttttccatcaggttttttgattgacaagcattcatttaatgacatcaaatttagcaatattttattttatggttattggttagtgttttttgtaagtactcctctcctatgtagaggtcattaaagtatactctttaagttataaagctttgccttttacattagttctttaatccacctggaattatttttttgcatatgtttataagatagaaatttattttttaaattattctactttaataggtaggtggtataatgtaatttattgaaaggtcttgtattttcctactgatcttctctcatatcttaagttttttatatgcatgaaactatgaaactatttctcttttttgaaaaagagaccaatggaatagaagagtccttgtgccaatatcatattgtctgaagttgtacagttaataggtttaactatctggtaatacaaattctttacctccttcttttataggaatattttgaatatttatgaccttcattcttccatataagtttttaaattagcttgtcagattatcatgaaacaatgtcagaatttttactgaaatagtctctatagatttattaatgaaaaattggtttctcaataatatgaactctacctatttcactgatgctcaaaacagttaataagcatcggggcatacacatcaacctgtccattgatatcagaacaataagggttaattttgcatatgaggaaccagcatggccatcaaaaggcatactggatgaatatcatccctgttcctatctatagttaaggtaaacttttggagcccttgaaaatagcttttgtgcttgaataagattactcatacctttgtattgattttcaatttatttaaaaactcagttaatccctaattttgtagctatatcttacacatatggctctttttatgtatctagtaatgttaatctaaagcttttgattaatgtgtgactcctcctataaacttaatcaaattcatagcagcattctaagtacatatataaattttatatagtgtatttatttttaagtaatcttaatgtaaaacttaacaataaaaaatgctgagtatttaaaccaaattaaaatatctaaactgattactcaataatataattgcattagacttataatgttgacctgctactctgataaaacaaattttttaaatatcacaaatatataaaacacaaatatatgagaagttcttaatctataatattaatatgatagttttgagtcactgaaaaatttatttgttgtgtgtaattcagaggttatacaataacccacaatatagattactgtactcttttctcatattgcccatgtgtcattcttgtatcgagaatatgctcaccttgtaaaagaatgtaggaggttagtgtctttctactccttagaaggctttatataatattattattatttgctctttgaatatttgatagaaattactggtaaaactgtctagttcagagatttttctttctaggaagattttaaattactgataaatgactcagtaatttaatgatctttgtaaagagcactcagtttggatcttctacatctataaatatatttctctgtgtactcctttgtattccacagtggtatcagcaactgtgtctcctcttccttaatcagtatttccagctgataacaattataaattgttttattttccaacttccaacttttcagtttgttgctcttttttaagttgtggttttctgctctgatgtttctctcttctatattttctttgttactattgtgttctctttcttgactttgaaagttggaaccttagcttattaattttagtctttcttcttttctaatatcaccctttaaggttatatatttcagtctaaatgtaactttttaactgtatttcatatattctgacactatttaccacattaaaaaatataatttcttctttgatgcatgggttatgtggaagtatttctttgaaaatattgaaatatctgtatttgcttttcttgtcatagattcttactgaattccagtgaggttggagaatatggtctgtaattttctgtaattctttatgatgtttggtaattgttttatggcctagtacatgttcacttttcatagttaattaaaaataagcatttattcttcaattattggaaacagtattttctatatctattagaagagagctgtaaaagaagatgacttcctttgggtagaggaagattaatatctttttatatctatgtattttattcatactgtaagcaaaagttttctggataagacccagactgattatttacttatatcttgtaaaagataaacacagccaagtacttgttaaagcaataaacactgattcagtaactactcacagtagatgaaagagctgagctccatttggatttgtgaaaagattattgggggttttttaagggagaattaggaaggggagagctaggtagagtcaaagaggtaaaaaatttacaaagggttgatcagtataaatatgattaggcaagctgtgtttgctaacattctaatgaaagttagaattctgtcttcccacagagacagaaagacagaggccctatctttcctggtgataactgaaaaattgattcactgaaaaatttatgaattgtgcataattcataggttatacaataaccctccatatagattactgtactcttttctcatgttgcccatgcccattttaaaggaatggctctgagaatcttctgaattgtaagtaatacatattcacaattgtaaacattttttaaaaaggaatgtctagggcctattgtcagcagttgactagaacaaacagtaaattctcctggcggtatttagctttctcagctaggcattataacgagctgtggttatcctgggaacacacctctgtgctactagaagccatgctagaatttgatcatctcttagtgcagaggtttggatggagtcattatgtggtgagaattctgcagttctcaatagcaatcttagtgctggtttccagtgctctatttcccctttggggcaatagagggcctatatcaccctatacgtaaagagggaggggctctttaggagaagacctgaaaattatgattcttggagtttgtgcagaatctgctgcagagatgcctctcttctcccactgagaagagacagaaacttttgctctccaatgtaatcaaatcctctctggaaagggaaggggaaggtcgccaagttgttaaaacccttttcaatgtgaacaaatgggtttaagagagacaaatcattagaaatctctcctgggtatttcaatatctttaatgtccaaagcttattttctgttcactcatcctttaactcaggttgccagtaagtaatgtttcatcagaaagtcctgactatacagaaatatgaaaatatttgttgttttccaacagagaaaccccatcctcccttaatgcctaccttggcagactgaagtcagatggagaagtagccctaattctaagttgctggttatgtcccatcttcctgttgttggttattactggatggtgatactgccttgggatttcagccacaagcaatttggaggtttagaattcatctcttacctctaactactccacaacgtaactactctttcatactccatacctactctttcagcctctactctgtcatgatggtaacagaggtagaagtagggctgtctcccctacattttagaagtgtcagtcctttcaccactctacttccatttacaccattttctgccacaatatctcaaaaatttaggtagtaactggaaacttgaaaaataaaaacagagttcaatgattcaactgaccctaactatgtaaagctgaaattaaatgagttgcatacacatttaagcctgatttcacattagcatttctttttatgacttgtttttaatttttttctctgtgcacaataacataatgaatgcagactcagtagaaattgaactcaaaggcataaacttaaacaataagcacaggaacattcacagcaattaataagcaagataataaaggtacaactcagagaataaaatgaggtgctctatgaatataataataagcaaccaggcatagttttattacattaagtaaaagtagcatttcctaatctgtatttataatagtcacaataaagacacaaaaatacccaaattcatagcattccaaggaacaaaggcataactctaagggatctgtacaattggaagtcttttaaaattacatttgtatactagaaaaggtttaaaaaatactttggatgatttttaacattttgattttcctattatatattcatggaataaatatttgaaataaataatctaataggcttatgatttttcatgttttttcttaagtaaagaaaaatattcaattatactttaaaaaatacaaaagctggacatccaggtcccaaatggcagcatagaagcaagctggcatcacttcccaacagaaaaccaaaaacaaatatactgcgctgagattacagagaaatcaaatttctgtatgtgtgggactcctcccctgaatctgcctggcaccaagcatgtggaaaatttccccctaacttagtttctatactagaaaatgtgagatcagggttgacaaccagctccctatcatctttggttctctggctagagacctgtccctgcctcgaatttgggagcggctaaagcaagaaagatttctgagaacaaccaaacaaccagagacaaatggtgatgttgggggaggaggacactaccatcttctctagccctggaaactttgctctgtaacttggcaaaaggagataacaactccgagtggctgttcaacaaaaagctactatccaagaatactgtaagatatttgttccacagaccccctaattataaactcctagccagctttcccacactattgggatatcccctttgtgatctcctccattctggctaagcagctctgattgtttatgagaactgaggcaaacctgggttaaggcaacatctagtgccagaaaggaggcaccaatctagcaggtaaaaagaaaaaataaaaccaacaggtaaattacaaagaatgtctgagctaacatagtcagtgaagaacaaaacaagccagatagaagatactgaaataaataactaatctttcaatctttcttggacatacttccatgagaaataacagcaaatggaaaaccatgacctactcaaatggacaaagcaagaaaccaatgactgaccctaataagactgaaatgtgtgaattcnnnnnnnnnnnnnnnnnnnnnnnnnnnnnnnnnnnnnnnnnnnnnnnnnnnnnnnnnnnnnnnnnnnnnnnnnnnnnnnnnnnnnnnnnnnnnnnnnnnntggcaaacgcgcctctcacactttatagtagtggcatctctttaatagagggtaataattttatatttttccatatataaataattataattgaaggaaatgtgctttagcacaagagtccccagtgtgagtttacagcagtgttttctatatgtgacagaaaagggtgtcaatatcactctctaaactttttaggaaatctctgaaaacgaaatagtaatgggaatttttgcactttcagggagtgttttttaggtaatcattaggaactcatgatataggtggtatttttgtgtgccctttccatgcatttctcaccccagactttcctgctgccaagttgaggtgggagactagcgttttcaaggttggatcacacattaaaatgtcagaattgacctaggggttttgcaaatgtgtattaggagattcttataaaacagaggaggacaactgagagaaaacttgagacagtcagactttttaaatgataatggaagggtactattacatcatgactcaagggaaaatgtaaagactttggatccccagaaagatagtagcactgccaaggcctaaacttactatcatggatgtgatttactgcaataggtttccatatgatttatatttcataaatgactcgttattataaaaggcaatcataaatgacacaaagctaaaccttttatgaaatatagtctatatctagagattcttcctgaggcagaaacaagagaaataggatgaccagacaccctaatataaaaagacgtttttgatgtagtgtcaccttgatgcttctttcatagaagaatattcttatggttttctctttcactatgaatgtcttatatgcatttatttggacccaatggaaactaaagggggtagtcataatgactatttactaagtttcattttgcttggtaatgagatatataatgtatcctaactcagaaacatctctttctttccctgtactccattgtgcattccctcacttaccttttcccagaaatacttaataacaccaagtcattttacaaagaatcacctcttgctaattaatttaaaaataataagtacctctccaaaatagagcttcttcctcccttttattttcttaaattccctgcaaaacagttgcttgagtagcatttatatctgtgccaggaggtaacctacacatattggaattctcagtatatagacaactctcttttaggctaattagtagtaggaattagaaatttataccaagattgaacacactcattttatgtgctagttgcatttttatttttcccccaaagcaatttttattttaagcttagaagtataaagaagaaaaaaagaataacacatttcagtcagtgctttgctccaatatcacatacatctataaatatttattgactattctctgttgataaaatatcttatgcagaaacacctaatctttgacttagtcttttgtgagagatgaaacttgggctttagtcttctgggaagacctctatcactgcatctttttatttttattttaaattctggggtacatgtgcaggatgtgcaggtttgttacataggtaatgtgtgctatggtggtttgctgcatctatcaacccatcacctgggtattaacaccagcatgcattagctactttttcctaatgctccccctcccccaactcaccacctgacaggcctcagtatgtgatgttcccctccctgtgtccatgtgttctcattgtttagctcccacttataaatgagaacatatggtgtttggctttgtgtccctatgttagtctgctgaggataatggcttccagctccatccatgtccctgcaaggaacatgatctcattcctttttatggctgcatagtattccatggtacgtatgtaccacattttctttatccagtttatcattgatgggcatttgggttgattccatgtctttgctattgtgcatagtgctgcaatgaacatacacatgcatgtatctttgtaatagaatgatttatattcctttgggtatacactcagtaatggaattgctgggtcaaatggtatttccgattctaggtctttgaagaatcaccacaatgtcttccacaatggttgaactaatttacattcccaccaacagtgtgaaagcattcctatttctccacaacctcaccagcatctgttttttcttgattttttaataattgccattctgactgatgtgagatagtatctcattgtggttttgatttgatttgcatttctctaatgatcagtgatgttgagctttttttcatatgtttgttggctgtatgaatgtctttttttgagaatgtctgttcatgtcctttgcccactttttttttttttttttttgagacagagtctcgctctgttacccaggctggagtgcagtggcacaatctcagctcactgcaagctccgcctcccaggttcacaccattctcctgcctcagtgtcccaagtagctgggactacaggtgcccacggccacacccagctaatttttttcttttcgggtttttagtagagacggggtttcaccatgttagccaggatggtctcgatctgacctcatgatcctcctgcctcagcctcccaaagcgctgctattacaggtgtgagccactgcacccagccctttatccactttttcataaggtttttttgtttctttcttataaatttgtttaagttcattgtagattctggatatcagacctttgtcagatggatagattataaacattttctccgactctgtaggttgcttgttcgctctgatgatagtttctttcactgtgcagaaggtctttaatttagttagatcctgtttgtcaatttttgctcttgttgcaattgcttaactatcctaaatatatatgcacccaatacaggagcacccaaattcatgaaacaaattcttagagacctacaaagtgacttagactcccacacaataatagtgtgagactttaacaccccactctcaatattagaccaatcatcgagacagaaaattaacaaagacattcaggacctgaactcagctctggatcacatggacctgatagacatatagagaactctccaccctgaaacaacagaatatacattatccttggtgccacaacttattctaaaattgatcacatagttgaaagtaaatcattcctcagcaaatgcaaaagaactgaaatcataacaaacagtctttcagatcacagtgcaatcaaattagaacttaagattaagaaactcactcaaaaccacacaactatatggaaattgaacagcctacttctgaatgactcctgggtaaataatgaaattaaggcagaaatcaagaagttttttgaaactaatgagaacaaagagacaacgtaccagaatctctgagatgcagctaaagcagtgttaagaagaaaatttatagcactaaatacccacatcaaaaagctagaaagatctcacattgacatcctgatatcacaactaaaggaactagagaatcaagagcaaacaaaccccaacactagcagaagaaaagaaataaccagagcagaaatgaaggaaatagacacaaaaaaacttccaaaaaatcaatagatccaggaggtggttttatgaaaaaattaatgaaatagatagactgccagctagactaacaaagaagaaaagagagaagaataaaatagacacaataaaaaaatggtaatgggaatatcaccactgacccccccagaaatacaaccatgaaagaatactataaacacctttttgcaaataaactagaaaatctagaagaaatggatacattcctggacacatacactttcacaagactgaaccagaagaagttgaatccctgaatagaccaataagaagttctgaaattaaggcagtgctaaatagcctaccgaaaaaaaaaatagcccagtaccagacagatttaccactgaattcaaccagaggtaaaaaggaaaactaataccccttcttctgaaactattccaaacaattgaaaaggaggaactcctccctaactcatcttatgaggctagcatcatcctgatatcaaacctggcagagatacaatgacaacaacaacaacaacaacaacagaaacttcaggccaatattcctgatgaatattgatgcaaaaatttttaatgaaatactggccaaccaaatacagcagcacatcagaaagcttgtccaccacgatcaagttggcttcatctctggaatgcaaggctggttcaacatatgcaaatcaatcactgtagtttgtcacataaacagaactaaagacaaaaaccacatgattatctcaatagatgcagaaaaggccttcaataaaattcaacatcccttcatgttaaaaactctctataaactaggtattgaaggaacatacctcaaaataataagagccatatatgacaaacctacagtcaacatcatactgaatgggcaaaagctggaggtactcctcttgaaaattggcacaagacaagaatgccctctctcaccactcctattcaacatagtattggaagttctggccaggggaatcaggcaaaagaaagaagcattttcaaataggaagagaggaagtcaaattgtttttgtttgcagatgacaaaatcaatgtgcaaaagtcacaagcattcccatacaccaactacagacaagccgagagccaaatcatgaatgaactcccatgcacagttgctacaaagagaataaaatacctagggatacagctaacaagggaagtgaaggactctttaaggataactacaaactactgctcaaggaaataagagatgacacaaacaaatggaaaaacatttcatacttatgtataagaataatcaatatcttgaaaatggccatactgcccaaatttacagattcaatgctgtttccattaaacttttttttttttttttgagatggaatctcgctctatcgcccaggctggagtgcagtggcatgatctcggctcactgcaagctccgcctcccaggttcacgccattctcctgcctcagcctcccgagtagctgggactacaggcgcccaccaccatgcccggctaattttttgtatttttagtagagacagggtttcaccgtgttagcaaggatggtcttgatctcctgaccttgtgatccgcctacctcggcctcccaaagtgctgggattacaggcgtgagccactgtgcccggcccattaaactactattaagttccttcaaagaattagaagaaactattctaaaattcatatgaagccaaaaaagacctcacatagccaagacattcctaagcaaaaataacaaagctggaggcatcacactacctgacttcaaactatactataaggctacagtaacctaagcagcatggtactggtaccaaagcagacacatagaccaatggaacagaatagagatctcagaaataagaccacacacctaaaaccatctgatcttcaacaaacctgacaaaaacaaataatgggaaaattattacctgtttagtaaatggtgctgggagaactggctagccatatgaagaaaattaaaactggaccccttccttacaccttatatcaaaattaactcaagatagattaaagacttaaatgtaaaacccaaaattataaaacccctagaaaaaaaatgtaggcaataccattcaggacgtaggcacgggcaaagatttcatgcccatgcctatgttctgaatggtattgcctatatttttgctagctgcatttttaaaatgaacattagaaaagaacatttcctaccacatagtaaatgtcagttaaaaactttaaatgtacaattttggggaattaatagatgtccagtttagaaccttatttttaataggttgtgatttgtgatcttttgcttattaactatcacaccattttagtcttaaagctaagtaaaaattcagctaatcttttttcataggatcaagtttttgaccttactaaaaacactaagtttgaaaattcaatttcttaatttaatatacatatacagtcataattagttattttgagaaatgtgtgcctttggaatgatggtaacctactgagtaaagggacacgtcatctttcaccatgatattgcctcaaactttgatcctaactaatttgtagaatgtggcctgtgctttgaaataggcattaaagacattctgtttctaaatcacatctgaaaaactggcatagcttgttaagattctcacatatccgattccaacttggattcacccactcttaggaggaaataattgggatatgccatagaggaggttcctatcactcagaatttttcacttttgttttttccaatgttcagtttcaaacaactggagaacatagatgccttcaggaagaaacatctgatatactactcagaaaacattgctctatccattgtcatcaccctactggggaatgtcattgcttttgttatatgtgctgcttcttaagagagcaagtataatagccatctattgctacgtagcaatatcatcaaaaatttagtagcttaaacaacacatatttattatcttacagttcatatggtcagagtccaagcctcccttgcccaaggcttctgcttcatggtctcacaaagctgcaaccaaggtgttgtctagggctgcagtcacacttgaagttcagctggggagggaccagctctcaagtgtacatggttgttggcagctttcagtttcttgcaagctgttggtcagaggccaccctcagtttcttaccatgtggtattctccatcataaagctcataccatggcagcttgtttatcctaaaccagcaagggagagactcttcttgttagactgaggttacaatcctctgtaatgtaaccacggaagttacagtccatcacacttgctgcattctactgtttaaaatccggtcatggattccacccatgctcaaaggaaggaaatcatacaagggccttaataccagaaaatagggatcaggggacccacccagactttgtctgccacagcaggcaataagcctactaaaataattatgggggaatgtttgcttaattatactctttaatattttgtttcatttttgaaattttccttaactcattctgaaaaaaacctctcaaatatacagtgctaaaaatcacaaaagaaatagaagctaaaattttagaatgatgaaccatataagcttaaatttccttttatattccattatattgagagggaaccctcagtttagaatgttgagcagcaatttgcaaaggatcttggagaataataaacttgcattaactgtcaaccaatgaacttgattcaagggaaaatgccaagtgtttataggttgtcaataagaacatcgtgaaatactgttagcattacctcaccacagttcagctatgctttaagtgtagccatcccctcataaaacagggtgatgatgtgcttaggtccagaaggattcaatgcaatgtatagtagaggaatggaggaggttggtatagggtctaaataacatggatcttgccagtagtgatgttggtaattgcaaagatttttttttctaataacttgtacaaagactttgaaatcttttttgtcaaataaatttactataaagctgaaagggatagccaataggttgtatgacagaagatatggcagaatggatgtggtgacttcctgatatggtttagatttatgtccctgcccaaatctcatgttaaattgtaatcccccatgttgggggaggaacctggtgggaggtgactgaatcatgggggtggatttccctcttgctgttcttgtgatagtgagtgagttttcacaagatcttgttgtttaaaagtgtgtagcacctcccccttctctttttccctcctcctctggccatgtaagaaatgcctacttttccttcaccttccaccactgttgaaagtttcttgaggcctcctcagccatgctacctatatagcctgtgaaaccatgagacaattaaaattcttttctttatataaataagttacccagtttcaggcatttctctatagcagtgtgagagcagattaatacagaaaattggtatgtaggagtagggcattgctataaaatatatctgaaaatgtggaagcaactttggaactgggtaatgggcagaggttggaatagtttagagggctcagaagaagacagcaaaatgagggaaagtttgaaactttctagagacttattaagttattgtgaccaaaaggctgataatgatatggacaaggaagtccaggttgaggtgatctcagatggagatgaggaacttattgggaactggagtaaaggtcaatcttgctatgctttaacaaagagactggtggcattgagcccctgctctagggatctgtggaactttgagttcagtgtgatgatttagggtatcaggtggaagaaatttctaagcagcaaagagttcaagatgtggcctggctgcttctaaaagcatatggtcatatgcatgagcaaagagatgatttgaaactggaacttatatttaaaagggaaccagagcacaaaagtttagaaaatttgtagcccgaccatgtggcagaaaagaaaaaccaattttctggggaagaattcaagccagctgcagaaatttgcataaataaagaggagctgaatgttaatagccaagacattgggaaaaaatgccttgagggctgctttgtggcagccccttccatcacaggcctggaaacctaagagaaaagaacagttttgtgggctgggcccagggcccactgccctgcacaaccttggaacactgctccctgtgtcccagctgctccagccacacctatgactaaaagggccccagatatacctcaggccactgctccagagggtgcaagccataatccttggtggcttccacgtggtgttaagcctgtgggtgcacagagggtaagagttgaggtttgggagcctctgcctagattttagaggatatatggaaacacctggatgtctaggcagaagtcttttacaggagcgaagccctcttggagaaccaatactagggcagtatggagaggaaatgtgtggttggagcccccacacagagtcctcactgggcattgcctagtggagctatgagaagagggccatcatcctccagatcccagaatggtagatccaccaacagcttgcactgtgcacctagaaaagccataggcactcaatatcagcccatgaaagcagcctagggagctgtaccctgcagagccagaggagtgaagctgttcaaggtcttgggaggccaccccttgcattggtgtggcctcaatgtgagacatggggtcaagggagattattttggagctttgagatttaattacttctctgatgggtttcagacttgcatggggactgtagcccctttgttttggctgatttctccattttggaatgggtgtatttacccaatgcctgtattctcattgtatcttagaagtaactaacttgttttagattttatatgcttacaggcagaatggacttgccttgtctcagatgagactttggactgtagacttttgagttaatgctgaaatgagctaagactagggggacttaagttgagaagggatgattgtattttgcaaggtgaaaagaaaatgagatttgtcaggggccagggacagaatgatatatggaattgtgtccccacccaaatctcatgtcaaattataatctccactgttggaggagaggcctggtgagaggtgattggatcatgggagcaggtttcccccttgctgttcttgtgacagtgagtgagttctcacgagatctggttgtttaaaagtgtgtagcaccgcccccttctctggccatgtaagatgtgcctgcttcccatttccctttaccttccaccttgattgaaagcttcctgaggcctccctagccatgcttcctgtgcagttgcctgtgaagcaatgagccaattaaacctcttttcttataaattggccagtttcaggtatttctttttgttttttttttgtttgtttgttttgtttttgagacggagtcttgctctgttgcccaggctggagtacagtgacgcaatctccgctcactgtaagctctgcctcctgggttcaagccattctcctgcctcagcctctcgagtagctgggactacaggcatccaccaccatgcccaggtacttttttttttttgtatttttagtagagacggggtttcaccatgttagccaggatggtctcaatgtcctgacctcatgatccacccaccttggcctcccaaagtgctggaattacaggtgtgagctaccacacccagcccaggtatttctttatagcagtacaagaatggactaatacactccaatccccgatttaccacttacagggtatatttccttagctatcctgagctccgccttcttcatctgtaaatttaaggtgatcttacctatcgcaagtaggtaatggcagtgaaaggcattagaaaagtcaattagcatagtgcctggaacataaatttaatcagtaataacagtgtctatagactaagtatttttcatgagtcagtaattgagctgtgtcttattctaagtgaaaatattattattcaatttatttcaagaaactgaaatcaaagtgatttgcattaaataagactgaatgtggcaaaatgacacttaacagaaattaacctaaagtttttacttgtatcctcaaagagaactgcaaaggcaagaaggcatgatttagtagcatctgtgtaaagtgtgtataatctttaaaggactgtgacctaaatgtgagtgacaaagtataatgtggttaccacaaaacagctaaactttttaggtggctttaatagaggtagaatggtagtaacaaagaagataatcacccctctgtgctcaaccataatcaagcctcactgagaagctgatgttctcttctgagggccaaaaggacacgatatttagctaaaagacaataacagattgatgaaaaccttgaaaactgcacagtttgtgaaagatgtgatgattggaataggaagaattatggtgagaatgtgattattgtctttaagtatctgacaaattatcccatgaagcaaagcatagacttcatttatgatgtcctacagattgtgaaaaaaatcatatgaaaatagtcaggttcagaaattacaaagtatgagtgtattggcttacagtcagatgatttggatatattaggggtaatctaaccgaataccccttccacaggccacctttacgctcttccctttgttgttttgtattttcactatactgtcttggtacagatttcaaagatattgcctgagacttattggtcattttgaatcttctaattagttttttttatcagttctggaataccctcaggtattacattttcaaatatttcctctgcctcactgcttcctctccttcttaagctctgtttagatgtacattagattttcttactcaatcctccatgtttcataacattgtttctatctcttcactctgtgttgtattatagaaactttattcagatctattttccagctcaataattttatcttcacttgagtcaaatatgccataactgtttcactgaagttactttaagtgaatttcagctccatgtaatcacatagggcttgattaaatcaatcagatacatacttgatttttcacatatttagaatatgtatttgtgtgattccaaagtcttctgccttgggagttaccagtggactattatacattgacatttgatttaacttggaagatcatgtatggagataacaaggttaaggcccctttaaatagcttaggatagcaaatatctaactggatatttctaaagacattacaccacagttttaggaaattggattttccttccaaacaattattttaacatttcgttctatattttgcattttaaaatgcaaacttttctttctacttttcatctttaatcttagaaaagttctctaaataacattttctgatatattcagttagcatttatctaaatagaattttagaagttagtttttaaatttaatgtcatctttaaaacattaaacattctcactgcaaataaacttaaaaatattatctccatatataactctctgtttactcataaaacaaagtgagaaatatgtatgttgcaatgctgatttctgtattttttgttcttttgatgagtctctaaaatggcaaataaaatctatcaaatttatgactgcagttcttttttgtttggataaaatgaagctggcttaaaacaattaagctttttggaacacccagaagggattttttttctgttgtgtgctggttgttggagtctatccaggtatattcaaaaatgcagttttaattttagtagacatttcttcatgaacttattgtgaacttatttttaacaaaaattgtttataatctctgcttttgtaaagagggggttgagtattgccactagccaaatccatggctataagactgaggtcatagatatgtggtgacgtattgtagattttttttaaattaaaggtaaaatcagagatatactgggaaaaaaagttctagagaagaaacgttactctccaataaatagtaatggacagaatcaagaatttctataaaagcaatttatctaaagaaatcctacgttggactatgtctagctttttctaaatccttctatctctttggagaagttattttgcagtagttactatatttctgataactcattgaaatatgattatggtatatgaataggatgacttacatagcatatgcttatttctttcatgctttatgtatgtttattaaacaatattctttcatttgcaagtttcaagagcccgtttcaaaaatggctaaagcacaatggctagtccaaggatagctttgacttctttatctttttctttgactgctttatctttccgtccttacctcatctatatcgactgatttgcaggcaagcacttttcacatggtagcccctagcacctacaggcttatagacttgcagaaagagaataactccatcccagtagtgctaacaaaatctcagattgtgtgctgcaggatctaccaggacccctggctctttatgattcagtcaccatggtcagtgagatggaacacactgattggctagacttaggtcatgatcttctagcacaaccttaggctcatgtggcctgtgaaggctggtataccagggaagatcatcccccacaaaaacatggactgagagatgagaatggtaattttccccaaagcaaaagtatgttgttaccagaagaagataaaatggtcattaggtaggtaaaaattgcagcagtccacataacatctgaagtaaagtaatgtggtatatgcatcaaacaaagcctttaaaaacaagcctctctttctatttaaataggctttatttctttctcttgcctgatcaccccggccagaacttccaatactgtgttgaattgaagtggtgagagagggcatgcttgtcttgtgacagttttcaaagcgaatgcttccagcttttgcccattcagtataatattgcctatgggtttgtcataaatagctcttattattttgagatatgttccattaatacctagtttattgagagcttttaacatgaagcgatgttgaattttatcgaaggtcttttctgcatatattgagataatcatatggtttttgtcattggttctatttatgtgatggattatgtttattgatttgcatatgttgaaccagtcttgcatcccagagatgaagccgacttgactgtgggagataagctttttgatgtgctgctggattcagtttgccagtgttttattgaggattttcacgttgatgtgcatcagagatattgacctgaattgtctcttgtttgcagatgacatgattgcatatttagaaaatcccatcatctcagcgccccctgcccccaaaactccttaagctgataagcaacctcagcaaagttttaagatacaaaatcaatgtgcaaaaatcacgagaacttctatacaccaataatagatcagcagagagccaaatcatgagtgaactcccattcacaattggtacaaaaagaataaaatacctaggaatacaacttacaagggacatgaaggacctcttcaaggagaactacaaaccactgctcatgaaaataagaggacacaaacaaatggaaaataattccatgctcattgataggaagaataaatattgtgaaaatggccatactgcccaaagtaatttatagattcaatgctattcccatcaagctaccattgactttcttcatggaattagaaaaagctgctttaaatttcatatgaaactaaaaaagagcctatatagccaagacaatcctaagcaaaaagaacaaagttggaggcatcacaccacctgacttcaaactatactacaaggctacagtaaccaaaacagcatggtactggtaccaaaacagatatatagaccaatggaacagaacagagaccttagaaataacaccacacatctacaaccatctgatctttgacaaacctgacaaaaacaagcaacagggaaagggttccctgttaattaaatggtgctgggaaaactggctatccatatgcagaaaattaaaactgaaccccctccttatatcttatacaaaaattaactcaagatagattaaagactgaaatgtaaaacccaaagccataaatatcttagaagcaaacgtaggcagtaccatttaggacataggcatgttcctaaacaccaaagggaattgcaacaaaagccaaaattgacaaatgggatccaattaaattaaagagcttctgcacagcaaaagaaactattatcagagggaacaggcatcctacagaataggagaaaatttttgcaatatacccatctgacaaaggtttaatatccagaatttataaggaagttaaacaaatttacaagaataaaacaaacaactccatcaaaaagtgggtgagggatatgaacagatacttctcaaaagaagacatttatgtggccaacaaatatatgaaaaaaaaaagcttatcatcactggtcattagagaaatgcaaatcaaaaccacaatgagatatcatctcatgccagttagaatggctgtcattaaaaagtcaggagacaacaggtgctggagaggatgtggagaaataggaatgcttttacatggttggtgggagtgtaaattagttccaccattgtggaagacagtgtggcgattcctcaaggatttggaaccagaaataccatttgacctagcaatcccattactgggcatatacccaaaggattataaatcattctataaagacacatgcacatgtatgcttattgcagcactgttcacaatagcaaagacttggaaccaacccaaatgcccatcaatgatagactgggtaaagaaaatgtggcacatatacaccatagaatactatgcagccataaaaaaggatgagttcatgtcctttgcagggacatggatgaagctggaaaccataattctcagcaaactaacacaggaacagaaaaccaaacaccatatgttctcactcataagtgggagttgaacaatgagaacacatggacacagggaggggaacatcacacactggggaacatcacacactactcctacaaatacctaatgtagatgacagagtgatgggtgcagcaaaccaccatggcacgtgtatacatatgtaacaaacctgcacgttctccacatgcattctagaacttaaagtataataataataaaaatctatgctatagctaatctatttgaagattaaatgagaaaatttatataaaatgcctgcctggcatatgagacaagctccaaaatatataatcgttcaaaaacaacagaaaattatttctcatttatctaacaatctgagatggtgtagctggttagcaaagataattctccccaactcaattactcagggaactgaattccttccattttgaagctctgcgacccccagggccttatcattgtcatgcattaggttggtgcaaaagtaattgcagatttgccattacttttaatggttaatttttcaacctaatacagccacctgctaaaggaggaaagggaggaaaaagcataattacttattcttagcacacaagtggaacataccatttcgttcatcattcattgagttccatggccacacctactcaaaaggggttgaagtatgtggcctatcagtctttccaggcagaaaagaaaaataatctctgagaggctcatttactaataatcacgagcaatacagaatcatgagctttgctctagacataatctgtgtagttatatatatatctatcttttgacagatagatcagcccatacatggaatgtaactgatccctttcaaatgaaaaatcacatttgcaaatttggccactatgacatgtctcagtataggattattgaattaaaaaatgataaagttctcaaaggcaaattagtgaaagtatgattaacacaactgaataccatttagcaaataagaaattttataaaaataaaattttttaaaattctaaaattctgaaaaatttctaaccttagtttttttaattgcaaataaaatcatttaaacatgagaatttttctctgctaatttgcaaatgtttttgtccctttcaaaagtgccaagttatatatttgaggctcagagtagtttttgacattgaaaggacttaaaaatctcacaaacattagtaaccacagagtccattcatttactcatcgtccattgactcttcactacgcccttcaaatctcatcccttcacctcaatgatcccaggaattgcctaattctctgtcctgacacatgcctacctcctacgcccagactcacccctaacatgctggcaggaattatgatactagtagggaatctcacagagtcattagctcacaaggcagaatcaaaatctgaattgaagccataataaatcctaaattatattgggtagggtaaaacagatcaccacataacttgcagagttgtcttttaaagaaaccacgtaagatattcagttcctaatagtctcacattcttgtatagaattttcaatctagcaatgagaataaaaaagaagaaagtagatcatactgaaaattgaataaagttaatgtttgtaaactcaaatcaacgaaatatttttatgcataaaggagattctagtattctcttgtaaaagacaggacattaacagccatggcttttatggcaatgcagcttgtacctgcccagagcaggtcatcagatgagaatgtgacccttggtcagaagagcacaacagagctcactgttaatttgaacagacactgtagcataaaacaaagactctgacactgaaaccttgtcagttagaatgtaaatgaatcctgctgacagaaaactcttttctccatccagaagccagagtcatcatgggaggcactgtgaacggctgcctgtcaaagcttgcagagagcctaggcttctgaacacagtttttgtggtgctgagaagagaagacatccatgaatgtaatttcctactggagacagtgtgcatcgtaggctgtgcactttagaagaatctacaagactagtgacgtgatttgttttttgttttgtattttttgccctttacactattaagtatttgaactaacaggaggcgtcaaaatgagggcagatgtggggtaagcaaatgaaaattgatgcctttcctaagttaacagaataacggctcaattagttattttactggcttctagcatggctctaaggaagcattctccagcatcatttaaagtcactgccaccactgtaaaactgccctggagttctgattcttactgactttaaaattaggcttaaaggagattcttaggctcaggaacattctaaacactttgcagtaactgagaaaactttgcccatgatggggccccaactaactgtgtgatgtagagcgagggcagatatttagaaagctgactttggtagctggatggtaagcagggttcatcacatgtaagatctcatctggcagaagggactgtgatgaggagaaccgggcagcaggctgaggatcagttcaagtctatctgctgcaggattcctttccaatctctctgagccttccttggacacaagagaaatgcttttatctattgcagttaaaaaacaaaaaccccaaaatatatttattacataatgtatgtttctaccaagtagctgtttaagatgtgcatgttttttcctctggatttgagaataatgagatcactgatccacactttgcagattgctaaatctattttccttacccctcctccctcacatacaaagttagtaaaactacgtcagtagtgtatacctcatctcttcctctttctaatatagaatttcctcgtggaccatcccagcacttgtccacacatgcttctttttctaaccacaccatactctcatgggatacctgatgcgccatttctcaattttctgtgatttttcttctttggttgcaaatatgcttggaagaaacacactggcctctgcttgctattaacgtgataaagtgaattatgttaattcaaagataaattgctttcttctttctgagcaggccagattaatcccagaccagactagaacgcacagtaattctgaagtgtgggccactgtgggcagaagggacacttgactgaggctttgatgtcatgaattgatacagagaaatgtggcaaaataaaaacccagggtatgggggggtggtctgggcaagggaagtggaggcatcaccaggaagcaagcaggatttctggcaaagaattatgagtactttaaattctcctttcatttctaattttgcaaagaatggggctcacctaggccttatatcatcagcaggtgagatcagaagagtcagttatgaaaattagtaatttcaacctacatatattaccttttatgtgttatatttaaaaacataagaataaaaaatatttggaacatacagtagcacaagacaaaccaactaaatagttgtttctggagcggtatatcaagtgtccaagttaatgttttgactgagtcattgctatgctcaaggcttttcaggccaaatgttcaagatattttcttggccagaatttaatctacacaaacaatgtgataatttgtgctcctaagcatgactattgtggtacaatttctttctcctattctttcttaggctctttaaatcaggcctctgtcttttaactctttacgatcagtagaattttacttttttcatattgtacttcttagagactgcatgggcctttgatgttgaacataactttgtgtcaaatcctagcctgatcactaattcactatatgactttggacaaattatcttctctgagcctcaattttttcatctataaaatgcatatgggtaatacctgcctttcaggcttatcctaagacatttaatacaagggataaaacttctgttattactaaccatttgttttgaaagttaatgttgtcattttcctattattttacagtgtggcatgaggcccaaaattatgtactgtcttgacatctgaaactgggagggcctcaaatggcttaactgtaagttcttcacatcaatctacttccatgaagaaattgaagtcattgtagaaaataaacagaaggatggaaaactggcatctactgaacaccaaacagatgccatgtactaccctagtgagctcaatgttactgacagataaacaaagaattagagaagaaaggtagggtgtgaaagaatatgggtgtgtgatattggcagaatgaagatccaaactcagtatgtttgacaccgtatttatcttagtcagtttagggtactataatagaatactatagactaggtggctggaacaacaaacacttatttctcacacctctagaggctgggaagtccaagatcaaggtgccatgggatcctgtgtctgctgagggtcctcttcctggtttgcaggtggagatctcattgtattttcacatggctgagggagagggagaggaagcaggctctcttgtctctcgtttataattccgtttatgaaggctctactctcatgccctaattagcttccaaaggccacacctccaaatgtcatcactttgagggttaggatttcaacatacgaatgttggagggacacaaacattcagtccataacagcattctgtgacctttttactataccaaatatctttgcagcaatgacaacaaaaacagaaataggccaggctcagtggctcatgtctgtaatcccagccctttgggaagttaaggtgggcagatcacttgagcccagaagtttgacaccagcctgtgcaacatggtgaaacttcatctctacagaaaaatacaaaaattagctggccttgtggcacatgcctgtagtcccggctactcaggaggctgaggcgggattattgcttgagcccaggaagcagaggttctagtgtgccatgatcatgccactgcactccagcctgggtgacagagcgagactccatttcaaacaaaaaacaaacagaaacaaccagaaataatataaaggcaattaaattttgagcagtgttccagatcctttcaaattattccccatggcttatgtggagaagaatcttctaattttcttgagccttttaaatcataaggataagggcagagaggcaagaaaggaagtgtaatataaaatccatgagggcagtattcagtattgcatattcagatagtggcatctcataggctttcagccaatatttgtaaagcaaaaaaatgaagaaaaacatgttttcacacaggtccttaactgaagccttgagattacggaaaagaagatgtcatagattcaaattgggacgccccatccatagctttcattcatctattccatatatacttgttatactgggcactgtggggatgaaatagcaaataagatgtggtatccatcctccaaaaacatactttaagataatagagaaagctaataaggatttttttgaggatctactatgcacaaagttcattatagaggatacagtatagacacaaataagaacaacatgccaatcaagttagtttttggtaagtgtattaagtagcagagagcagtagcactgtggatttggggatcagagaatcacagaatttccaagctggaagaaactttaaagaggatctcctttgtcactgcagtgctcctttatggccaaagatgaaattcaagcccatctacaaagcacactgggcttcttaagatcttcctcttgctcacctctctggttgaatttcttacaactttccccctcccactttaggatatgcacttgcccaggagcatccaattctcatttctctatgagccattcactccctcttcactctctacagtgataattgtcatgcgcctcttcctcttgtggcctctgatcatcccagcttcacctctgcttttcttgtcactggggttcatgtcccctctttgagtgcacaggcattcttctgtcaaagagccaaatgcacactgtgaccaaggtctctcccactggactgtaaacctctgagaacaggaacaaggcctcaccatcttagaagccccagtgtttagtttggggcatagaactgactcttcagagattagctcaattgcccagaggtagatgtcataaacaaggtgtgagggacataagccacagcttaaaagatgagtaaacgttgagtaaagatgatagtgtgaaagttgattatacaaattgggtcattcttgccatacccacctaaaacagaatcaaaaagtcagaggaaaaaaaccctcagggtccaaaacattgctccaaaaatgtaattatctgaaagcctggcagctaaaactgtctgctataaactgaaaccagttttatctaattgctactgaaaccacttgctgcaactttaaggccagttttacctaatgttgtcactcaccaattagagcttgccagctccccaaaccttactagtactcacgagctttttcaaagagcaatgtgtaacatttctcctttttataaaacctctagcctttgttctttgtacgtatcaaagaccaggcagtgtgtgttgtatgccccaaactgcaattctttcttcacaaataaaacattttaatttcagagctttgtctctgtattttatttgactttgacgatagggttgggaactctggtgaagtctaagaaatcaagtaagctgaagccttgctctaaccatggtgggtagaccagtttgtctaaagcagaaagttaagtagagaatacctttgaaaggtagagggagcctactttaggagggctttagtgccacacagaaatacaagcatcttccttaaaggaatttgatctcatttatctttttatactcattaacacattccgtcttctcagagataatctaggagttactggaggatttgtagtaaagacatgatcttgctaattacatatgaattgatttaataaccaataacttagagggaaagtcagagcacagaagatgactataagctttatatttaacagggcaataagtataggcaagaaaaactccagggtaaggtctccagggcaacttagtttgattatatgtcaagtagaagttcattaaaaagtaattgtccaaaggcatcttagacatcctgagacagatgtttacaaattctgagtcccttcaattataggaagacaagtaaacattgacaatactttaattctaacatcatttacagggataagtatttcaataaaatgaaacatttttgccagaatacatattgactacatctcttacagcacttaccatttttttttttttggtaaataatatagctttaatagatctggtgctagttagtgatttttctggagaaatatggagacaatcattctgctgagtgtgtgtaggtgttctgaacatgtcacccatatgtgctaatgtaagaaataggcaactaattgcctcagttacagtgcatgggacgtgctattgtgcacactccctctccatgatgcacgtggcagtgctgaattcttgctttatttaacacaggcctcaataaagacaaatgattgttcattaaaaaccatcctgtgacatgcagagtggctgtggtgaggatatgtagacactaattcaaaattaaaaaaaaatttaaggtggcaaatttttaatgtaaatatacctaaagataatatgtgaaaccatatcatgaagttttgtgtgtttttcaaaaggcatacattttaaagtttacaatgaacccttttatgagtacaacactttagctgaattgaccaaatctaacgcatattctagaagccagctaagactctattgcagacagtttttatttgttttaattttgtggcttggcagcgggaaccttattccacagtatgcctaactcacctctgcagagaaggtggatggttttttatatagcataataaaaggctaagggatgcaaagctttctaatgagtagattctgaagtaagaagacacagatatgattattatgagtttcttaatggcttcttttcagctggagttattctcagtgtgtacctcagtgggaagagactcactctgccccttcattgtcagttgatagtcctgaagctgcaatctcctgtttgccttttgttcagtgaattatagatttttttgttaattaaaacggtgaaaagtggcttcattaagatgtgctatccacagacttctctgtccaatttgaagaagaaagcaggattttaatggatatttattgcctgaaaaataataaaactagaatcataaagaaagcaaagaagaaagaactggaaggaacatgggattggagcttatggcttcatctctgacatttagtcttgtgtggcccagaggttgccataaaatgtcaccaaagatcaagttgggattaaaatgagtgaggcaggcctggtggggaagactgtgaaaaattcagtattctaagataacttgatttttcaaggaaagccaaaaatatagatttatgcaaaagtgcccaatttttgaatgttgaagactaaatttaactaaaactaaaatgcattaaaggcaaaacaaaacatatctgcagctgcattctgcccataggcccctaggataggactgatagtattttcaggcttcattttcttagcaattaaaggagagacagaagtagaagatcactaaggtcttttagttctaagatttcctcctgggcagtggagtggagactctaggggttctcaaactctgtcttttcctttctcctaagcaacactccttctgtgcagtcttctgttcagtcttcaaaaattcactcaaatactgtctccttacttgcacttagaatgtggaaaattgctgtaatgagaacagcaacaacaacaacaatgaagaagaatgaagaagatgacagcaattttttaacttagaaatctataaatagttatgtcaggtaaaatacatgcattcacggaatgtacacatgactgcaaggatttccagttaataatttaaatggctgtttccacctcagagtatttttatactgcctaaagttctttggagaaagacaaaatgccttgcttgagaaaatcatgatattcttaagtgtgggatggataatttaatacaatttctatatagtgagaatgtgatacatgaaggccattgtcttttcctggaaaagaaagctttaattttttgttataactgacttataccattttgcataaagttgaacctgagggaaaacatgcattatgaccataacaactctgtctattaaaagctgtcagcctctttctgtaagttaaatgaatgatagagaaaatgctattgtattagcctcctaactcatctcttgtttattcttcatgcagcagccagtgtcatctttgaaacacaaatttactcttatgacgcccctaatcaaaatcctcctatcacttctcacagatcttgtaacgtaattctaagcctttcctatagtctgtgaagtagttttaaagtggtttcaaatgcttcggtgctcatcccatcaagaggtacagcctcttttcccaccctctgaatctgggctgacattatgacttcctttgattattagagatgtgtcagaaaggatcttgagcaggttctgaactgggtatcaagaaacctgaagctggagggacatggtggctcacacctgtaatcccagcactttaggaaactgaggcaggtggatcatttgaggacaggggtttgagaccagcctggccaacatagtgagaccccatctctactaaaaatacaaaaattagctgggcctggtggcacgtgcccataatcccagctacttgggtggctgaggtaggagaatcacttgaaaccaggaggtggaggttgcggtgagttgagatcacaccactgcactccagcctgggtgacagagtgagactctgtctcaaaaaaaaaaaaaaaagaaagaaaagaaaaaaagaaacctgaagctggactctcactctctggaacacatctgccactgtgtgaagaaacccaagatagaaaaccttctcagctgaggccctggagaaccaagtgaggacatgctagaccaggggtatccaatattttggcttctctgggccacactggaagaagaactgtcttgggccacacatagaatatactagcactgatgataactgatgatccaaaaaatatatttaaagatctcataatgttttaagaaagtttatgaagttatgttgggctgcattcaaagctgtcctgggtcgcatgcagccagcagcctagactgtaagctccagcagatctacccattgactgcagtgcatggaagagggcaggcgagaccagcaaaattgcccagtaagaaataataaatcgttactgtttaagcatgtttggtgtgattaattacatagcagtagttaactaatatggcctataaggcactggatgatctgagcaggggtacctccttaccttacctcctccacctatttcaaccactctggcctccttgctattcctcaacctacaaggcaggccctacccttcactctgcctgcagccccctttctcccaatagacacggctactgcattcactaaagtctcctttatcattctgtcaaaaatagcaaccgcctctctcctccctctcatggccactctctacttccatcccctgctgcattattcttcctagcacttatgtacttagctatatattattttctggattaacaatatatttattttctctctttcttaacctgagtgtaaacttcaaaagacagatattttatttattttgcttgctagtatatccccactaccaagaacagtgcctggaacataataggtgctcaattaaaaatatgttgaatgaattatttttcagttcctagagattattccatggacattcaaagtagaaaatctgttcctcacatgtgtgctccagcttatatgtaatacattctagggactaagacagaaccttaaacagaaaaaaccctaaaaatcctggaatggaacacttggtgcatatgtgctctagagttttcctggaagatagaaatgagagttgcctctatggaacagttgtagatcctgtatttatactgagataaaaaagaacttgatgtcattcagtttctctctgggattctttatctaaaacacttctattctatttttttctaatccctaaacagaattttgtgtctctgaatgtgcctcaaccatgataatttcctaacatgtgtcataacctatttcccacttcacaccattccccttctgtctcacccatttacttaggtttaagacattagttttgtgggtatgtactttgcatcagcttgaataactgtcacttttttattagactttaccttttagagcacttttaaattcatggcaaaattgagttgaaggtacagagatttctcatataacccctacttcacacatgcataaacctcccagattatcaacatcacccacagattggtagatttgttaaaattgacaaacctatattggcaccacatcatcatccaaagtctatagttcacattaggattcactcttgatatacattccgatggtttagacaaatgtataataacctgcatccatcatgacagcatcaagcagagttgtctcactaccctagaagtcctctgtgcttcacctattcatccttccctttccccacaattgttgtcttttggtggaaacaatttggacattaatgaggtcccaggaaatgtcctaaacactgcatgtgcatcacacatgtcaaatacattaagcaaggagacgttatctggtatcccttatactcattgcacaaaggtaggagatcaacattatgcataaaatgcacgctgcatgctgccatttgtaagtcggttcacatgggccagaatctgtttctgttccaaccagaaacctgggtatcatgctagactccttctattttttttaaccctttccccatttatttaccaaatccaggtgatatgaatttccaagcagccatctaatccatcctctcatcttcctttaagtaatcaatacagctataactgaggtgactattatctcttacctggactatcacaatagtttcttattctttatgcttgccttcaaccttgccccacctccaattcattcaccacactgcagcaagcctgtgcattctgttagcaatggaaagactagggagggaaggatgtagttattactcctcacataattacttttctagaacgtgaatatactcaactttacatctgtcatgcacatctattttcctatgagggtagaaatgatctcttggaaaattggcagttttcttgtatattttcatctctagttttcttttctttctttttttttttttttttttctgagacaaagtcttgctctgtctcccaggcttgtatgcagtggcagtggcatgatctcggctcactgcaacatctgcctcctgggttcaagtgattctcctgcttcaacttcccgagtagctgggattacaggcacaggacaccacaattggttaatttttgtatttttagtagaggcagggttttgccatgttggccagcctggtctcgaactcctggcctcatcctgatctcaaactgcctcagcctcccaaagtgctgggattataggcttgagccacctcacctggcctagtttgtttttctattcttttgagagaatataatacttttctatcagacaatcctggaacttttatttgcaacttctcttctgtttttaccttcattgtaaacaaacagtccctgacgtccaagatggccaaataggaacagctccagtctacagctctcagtgtgagtgatgcagaagacagatgatttctgcatttccaactgaggtaccaggttcatctcactggggattgtcagacagtgggtgcaggacagtgggtgcagcgtaccaagcgtgagctgaagcagggcgaggcatcgcctcaccagggaagtgcaaggggtcagggaattccctttcctagccaaggaaaggggtgacagatggcacctggaaaatcgggtcactcccaccctaatactgcgcttttccgatggtcttagcaaacagcacaccaggagattatatcccgcgcctggctcagagggtgctatgcccatggagcctcgctcattgctagcacagcagtctgagatcaaactgcaaggcagcagtgaggctgggggaggggcgcccaccattgctgaggcttgagcaggtaaacaaagcggcggggaagcttgaactgggtggagcccacctcagctcaaggaagcctgcctgcctctgtagaatccacctctgggggcagggcatagacaaacaaaaggcagcagaaacctctgcagacttaaatgtccctgtctgacagcttggaagacagtagtggttctcccagcatgcagattgagatctgagaatggacagactgcctcctcaagtgggtccctgacccccaagtagcctaactgggaggcacccccaagtaggggcagactgacaccccacacgacaggttacccctctgagatgaagcttccagaggaacgatcaggcagcaacattggctgttcagcaatattcactgttctgcagcctctgctgctgatacccaggcaaacagggtctggagtggacctccagcaaactccaacagacctgcagctgagggtcctgactgttagaaggaaaactaacaaacagaaaggacatccacaccaaaaccccatctgtacgtcaccatgatcaaagaccaaaggtagataaaaccacaaagatggggaaaaaacagagcagaaaaactgaaaattctaaaaatcagagcgcctctcctcctccaaaggaacgcagctcctcaccagcaacggaacaaagctggacggagaatgactttgatgagttgagagaagaaggcttcagatgatcaaacttctccaagctaaaggaggaagttcgaacccatcgcaaagaagttaaaaaccttgaaaaaagattagaagaatggctaactagaataaccaatgcagagaagtccttaaaggacctgatggagctgaaaaccatggaacgagaactacgtgacaaatgcacacgcttctgtagctcattagaccaactggaagaaagagtatcagtgatggaagatcaaatgaatgaaacgaagtgagaagagaagtttagagaaaaaagaataaaaagaaacaaacaaagcctccaagaaatatgggactatgtgaaaagaccaaatctacgtctgattgatgtacttgaaagtgatggggagaatggaaccaagttggaaaacactctgcaggatattatccaggagaacttccccaatctagcaaggcaggccaacattcaaattcaggaaatacagagaatgccacaaagatactcctcgagaagagcaactccaagacacataattgtcagattcaccacagtgaaatgaaggaaaaaatggtaaaggcagccagagagaaaggttgggttacccacaaagggaagcccatcagactaacagctgatctctcggcagaaactgtacaagctagaagagtgtgggggccaatattcaacattcttaaagaaaagaattttcaacccagaatttcatatccagccaaactaagcttcatcagtgaaggagaaataaaatactttacagacaagcaaatgctgagagattttgtctccaccaggcctgacctaaaagagctcctgaaggaagcactaaacatggaaaggaacaaccagtaccagccactgcaaaaacatgccaaattgtaaagaccatccaggctaggaagaaactgcatcaactaacgagcaaaataaccagctaacatcataatgacaggatcaaattcacacataataatattaaccttaaatgtaaatgggataaatgctccaattaaaacacacagactggcaaattggataaagagtcaagacccatcagtgtgctgtattcaggaaactcatctcatgtgcagagatacacataggctcaaaataaagggatggaggaagatctaccaagtgaatggaaaacaaaaaaaggcaggggttgcaatcctagtctctgataaaacagattttaaaccaacaaagatcaaaagagacaaagaaggccattacataatggtaaagggatcaattcaacaagaagagctaactatcctaaatacatatgcacccaatacaggagcacccagattcataaagcaagtccttagagacctacaaagagacttagactcccacacaataataatgggagactttaacaccccactgtcaacattagacagatcaacaagacagaaagttaacaaggatatccagaaattgaactcagctctgcaccaagtagacctaataggcatctacagaactctccaccccaaatcaacagaatatacattcttctcagcaccacaccacacttattccaaaattgaccacatagttggaagtaaagctctcctcagcaaatgtaaaagaacagaaattataacaaactgtctctcagaccacagtgcaatcaaactagaactcaggattaagaaactcactcaaaaccgaccaactacatggaaactgaacaacctgctcctgaatgactactgggtacataataaaatgaaggcagaaataaagatgttctttgaaaccaatgagaacaaagacaacataacagaatctctgggacacatttaaagcagtgtgtagagggaatttatagcactaaatgcccacaagagaaaacaggaaagatctaaaattgacaccctaacatcaaaattaaaagaactagagaagcaagaacaaacacattcaaaagctagcagaaggcaagaaataactaagatcagagcagaactgaaggagataaagacacaaaaaacccttcaaaaaatcaatgaatccaggagctggttttttgagatcaactaaattgatagactgctagcaagactaataaagaagaaaagagagaagaatcaaacagacgcaataaaaaatgataaaggggatatcgccaccaatcccacagaaatacaaactaccatcagagaatactataaacaactctatacaaataaactagaaaatctagaagaaatggataaattcctcgacacatacaccctcccaagactaaaccaggaagaagttgaatctctgaatagaccaataacaggctctgaaattgaggcaataattaatagcttatcaaccaaaaaaagtccaggaccagacggattcacagccaaattctagcagaggtacaaggaggagctggtaccattccttctgaaactattccaatcagtagaaaaagagggaatcctccctaactcattttatgaggccagcatcatcctgataccaaagcctcgcagagacacaacaaaaaaagagaattttagaccaatatccctgatgaacatcgatgccaaaattcaagatggattaaagagttaaatgttagacctaaaaccataaaaaccctagaagaaaacctaggcaataccattccggacataggcatgggcaaggacttcatgtctagaacaccaaaagcaatggcaacaaaagccaaaattgacatatgggatctaattaaactaaagagcttctggacagcaaaagaaactaccatcagaatgaacaggcaacctacagaatgggagaaaaattttgcaatctactcatctgacaaagggctaatatccagaatctacaaagaactcaaacaaatttacaagaaaaaaacaaacaaccccatcaacaagtgggcgaaggatatgaacagacacttctcaaaagaagacatttatgcagccaaaagacacatgaaaaaatgctcatcattactggccatcagagaaatgcaaatcaaaaccacaatgagataccatctcacaccagttagaatggtgatcattaaaaagtcaggaaacaacaggtgctggagaggatgtggagaaataggaacacttttacacttttggtgggactgtaaactagttcgaccattgtggaagtcagtgtggcgattcctcagggatctagaactacaaataccatttgacccagccatcccattactgggtatatacccaaagaattataaatcatgttgctataaagacacaggcacacgtatgtttattgcggccctattcacaatagcaaagacttggaaccaacccaaatgtccaacaatgatagactggattaagaaaatgtggcacatatacaccatggaatactatgcagccataaaaaatgatgagttcatgtcctttgtagggacatggatgaagctggaaaccatcattctcagcaaactatgcaaggacaagaaaccaaacactgcatgttctcactcataggtgggaattgaacaatgagaacacatggacacaggaaggggtacatcatacaccggggcctgttgtggggtggggggaggggggagggatagcattaggagatatacctaatgctaaatgacgagttaatgggtgcagcacaccaatatggcacatgtaacaaacctgcacgttgtgcacatgtaccctaaaacgtaatgtataatcataataaaaaaacaaacaaacagtaggtctgaattctattttataaagtcccaaaatgcagtgttgcggcctttttactatctgaaaacatattgttttaatattattctctctggtgacttatttcattgatagattttcccgtgttctactttatatcttttatttcctttggttgccatatatacacatatagatatatgtatttttttttaatttggtagtccattttgtcaaagagttatatgtactagaaatagtctgggttttgagaatgtttcttgtgcttgcttttaacttattgaaagtcgagttctctttctgtctccatggaaggttagaaacacaaaaatacccagaaaaaaaccttttgcttgtgcctctgggctcacagtgatcttgtgtaatatgaatctttttctgttgatgcctcatgtagccttagacatgagggaagtgtggaggaagatcttttcaagattcttgttagctctacctttcatggaaatgctatggagagttttcttctgtcaagttgtaagatttctgttttgcttttgtaatggtcagtcgataaagtatatacaaaattgttaacggcattgggaaaaaattgcatttagtaattagaaaactcaaattttttactaaattcactaaaaacaataagccttttatatctaagaaatactttctggttgagttcaaataatactttctcatatgtccattttatttatattttacatttagaaaatcttgaaaataatcatagtactttattatattaaatcattggtcattaagtgatcaatatatactactttttctaaatttctgtgacaactgaaaattcaatgattcatttagtttttgagaacttcttgctaaattccatgattacctatctattaaaaccatctggttagctataactattctatttgtatttgcatgctgaagatgattttcaaataataaatagtagtaggattttttttcttcttccattaatgaacaacttttaactaaccagctttccaaccattgctgtgattttatgaggaaaagttgtggatattcttataaaccagtgaaataaaacatttatagaatgttaaaatgtgtaggaattccacaatcattgccaaagctatgtaccctacacataacttttgatctctactccataccatccttatttgggggaactgattcaactagagttagtttctggaagaaaatatcctaaattgacatatcattcttgctaaaaaatccatttttatgacttccattaaactcacattaaagacttcctttgctgcttagccagtagagaagacaggaaagtgaggaatgttgagggaagtttttagaaaggcatgtccagtgtttgctctcctgctctaagtttattgtgtaataacaggcatttttaaaagctggtttgggaatataaccaccatttttaacattcttgctataagaaaattcattctaattgccataaattataaaccgttttctgaaattcttttaaaaacgagtatagctggtatgctatgctttaagaagatcattataagccttttaaattcatagtaatttaatgttctatgtaatttggatttcctcatttcacatgcagtcagcctctactctatgttaagtgttagctagaactcgtgagaaattaagaacgctaaataaaatgtggtgccaaagggtttacaacctcttcagaaagaagaaaaaaagtgtctaatcaccatattcaagatgaaatgagaaaaaaaaatgagagagagaagtactgcagcatgggggagtagggttggaagaatggatctcatttattggctgggaagaaagagaagactgaaagtcttcatgaactaggatcaactaatataaattattctaatatggaatctaatataattcaagaagcaaagttaatgagtactacacaaaatttcactcaaaaaaataaaagataaaactgaaaactgagaagacattgcctaatttatatttctgaaacccttgcttctggtgattttttaaaattgcattcagtaatcagagcagtaccaactaagggaaaattaatgaacagaaatcaaagtgcaatggcattgaagatttatctttttctcctttagggacaagagtttcatagtagtcctgtgtgtctgatgtcactaagactggaactgaaaataaagcatgccagaggagatgacagaaagaagaaagacagaaacaaaatttctctacaaatcacttcacacttattttctttcccttagtaccacatgttaaaaagaaaaaagaaagaaagaaaacaaagaaggtatctgttagatatagaggttagtaaacactatgaagaaggtaaaaatgagatgtggaatttttataaggagagaatctaatgatgcagcttttactatatcagaaattactgtataggccaattatcatccattgatattctactaaattccaggtattctatatgtatatgtatgtgtatgtgtgtatgtatatgtatatgtatatgtatatgtatatgtatatgtatatgtatattctagtatgtattcaaccattgcagcaactttgcatggtagtataactttcctaacttcagcaatgagcagacaaacactcagagtgattaaatggtttgcctaaagcaatggtctgcaaactcacagagccagttagctacataagaaatcaacctgggtctacttaattccaaagtccatactattttcaccatagaacatggatgtggttgctttcctaaattactccaccccaaaggaattttgagggaagatttgataaagaataaaagaatgcaggttttagatgacttttctgatagcagaggtaaatatggaagtgagaatcctcaacattaatggaggtcaagttcctgactaacttcaagtccatgccaggagaaagtaactgcaggaacaatgtgggtcttgcttttcagtgaagaatttgaatggaaacctgtggaaggaggacaagaagttttttttgcctcatttattgcacagatcaccctgcatgttctagtgtccaaaggaagaggaagatggaaagatgacacaaccaaagcttccctgtggcttcaccacagcttagggttttgaaagccggagattaaatttgatttatgaccaccagaaaatttccctagaacctagtgtggcaattctcattaggcaactggccatttctttaaggtaatcctagactgtagccctgccattgttctcactagctatagtactcctagagatctaagtgcagttactgcaatactaatactcagtgggtaggttaaatctgaagaaaattttgctagcatcaattctgtattttcttttttacctggtaggaaggtcagggagagcccaaaatctctttctacctacagtctgatccctgtgattctactctgagaatttaacccctttcattgaaatctttggtccaaggtagaaccagagaaacctccaagaagaggtctttgcaggttctggccggatggaacaagataaccagaagctggaagtcacctaagagtatggagtgacaggagtgagggaataagaagaggaacaaacattgactgaggcttcagtgtcccagtccctgtgctcaattctttcacattccttttcttgtataatctcccaagcagttctataaatagctaacattatctttattttacagacaaggaaatcaaggatcagagaagccagataaattgtgatttgtaagtagcagaaacctgaaacagtaaccaaccttccctttatctggttttgttagaaaaaaaatgaattttaaaaatgtataaacatgcctaattgccagaagaacattttcccatgcagtgaacaccccaacctcaccaactctgttttgaaggtgaatgctacttcctcaatgaatttgtgacttcttttattggttgccaacatcacccaaactgtacaaacccaaacttagcagtgggatcatctctgcaaacaagggtttctcagatcattaacaatacctgttgcaaaatggtaggttgggggacactttattcaacaaaaatcgaatctactttaaatataaaagaggtgcttctacaattctttctactgacatttctgataggattttttcttatttaaattgtttgtttatgtaaattagtatctgtttttctaagttttaaacaagcaatcatctccaacttgaaagaaattattttgaaacatcacaagatctaatttattgttatttcggttggcaaaatattaagtgtattgttttcagtgaaacacattggatatttgtgtagagtgcatctgaacatatttacataagtaatttagaattatgcttttttccacaaataaaaaacatacagccttcatattaattattttaaatcacatcctcattgcactagaagaaataattgtgtttttggaactgaacacatttgttgtgcaaatgagaatgctcttgcttctgctaaaatatgtggaaatataagacctcatctaacataatgtgttctgttttgtgagatgacaattacatttctcacatacagagatgtgtcattagaacgcacaaggggggcaccatgctattattctttgtggtgaatgaagcgtgatactgatgaaaaccagaactctcattgataatgcattgtctggtttcattttccaggtagtatcaaacaccatgtagtttcccaatatatttaattggatatgaagttagactgctcatttcctaagcttaattttctcttccaaataaaccctaaagcaaacatgatataaattagctttattattattttttatttaatctgattacggacacttagatctttttgttctgtttctgagaatccagagattcattaagtcctctcttctggttttatatccaaaagatatatatatatatatatatatatatatatatacacacacactggtatatgtgtgtgtatatatacatacacacacataagtgtatatatatatatacacacacacacatataaagagtgggctgctcatgaacagctattatgcagcttctaaagcttttcatgtatgaattaggtaggaatgtgttggttgcatgtggcagagatcttaacctattgtctaaagtcaagagcagtgcctgcttttgtccaactcagtgcaggggttattccagctgccagaaccttatctcttggcttacctgtgctacacacacacacacacaaacttatatatacacatgagtgtgtatacatatatatacatatacatacatatgcatatacatagagttctcctatataaaaagacatttatataggagaattcagatttgttactgaaataaattcttagcaataataatatatttgcattctcctcttccctttcttagaaactactctttgatctgccttctctcagaatgatattgtgtaaattactacttaatttaatattctttaaaataggatagcatccttctcctctggtaatcttattccctgaaaaaaatccttgagaattgtacattgtttttaaacataaaaactgctttgatctttttgtgagaaaagatgtatgatttacaagcccctttcaacctacaaattctatattgtgtgtctgctgggcacaaaacatgatgaagtttccacaggaataaaatgaagtgtaagatgccatcccttctctcaatgaccttataaattttttggtgacacataatagaaacacctacaaatgatcatatgttacttttgtacttggaaatcacttaactttcttccagcaaactaagaactactaattccctcccatctattactgttcaagcaagatagcacaggtaagccaagacataaggttctggcagctatactaacccctgcactgagcggcacaaaagcaggccctgctcttgactttagacaagaagttaaaatctctgccacctgcaactaacacattcccacatgattcatacatgaaaagcttaaaagctgcttaatagctgctcatgagcagaaattccttttttctctgtgcagataaggaagtgaggtgctacattcctttgagaaatttagtttctgcataaaaccaattgggacaagttttcaatacaaaaaatattagacattatcccaagatggaaattttggttcctgagtcctcaataaaatattgctgtattttaaatagaagctcgaagtgtgacccctctcagtaactatgtaggatgccatgtaatcatgagggagtctctttcaagatgacagaaagaaaatgagactgggaaaaagaaattttccccttcttggctctgtagcagtagttctcaatcaggatgattttgcttcccaggggaaatttggcagtgtttggagatattattaccactggggtagagagattagtagaaaggtgctactgtcacctagtggagagaaaccagggatgttgttaaacatcctacaatgcactggacagcccctgacaacaaagaattatctggcccaagatgtcagtagtactgacattgaaaagtcctatactgcagagtactccttagtgttgagatatttagttggataggattaacaaaactaataggaagaatcaatagaaatgctgcttacattggatcatagaaaactaagtacagttgctcttatgttacaattacctacatagtcatatattagttgcctatgaaagatattttattgtttcagtcttcccttattgtcttgtaactgtcacataatagatcaacaacctaactggtattcacagcctttgtatgggcttccagaggtttttggtatggggtatctatgcaaccttatgatttaaagaagctagtctcaactgggttatttcccatgtcatttacgtaggtatactgcatgtgtgactttgtattaggccttcaaagtgaaatcaaatatttgtgcatctgaagtcaaagaggaatactctttatttaaaattgttttattatactttaagttctgggatacatgtgcagaacatgcaggtttgttacataggtatacatgtgccatggttgtttgctgcacctatcaacctgtcatctacattaggtatttctcctaatgctatccctcccctagctccccaccccctgacaggtcctggtgtgtgatgttcccctccctgtgtccatgtgttctcattgttcaactcccacttatgagtgagaacatgtggtatttggttttctgttcttgtgttagtttgccgagaatgatggtttccagcttcatccatgtccccgcaaaggacatgaactcgtccttttttatggccgcatagtattccatggtgtatatgtgtcacgttttcttcatccagtctatcattgatgggcattcaagttggttccaagtctttgctattgtgaacagtgctgcaataaacatacgtgtgcaagtgttttatagtagaataatcctttgggtatatacccagtaatgggattgctgggtcaaactaattgtttaaattagtcaatcgatatgtttttttgtggcagagtttgctgagatatttttctatagaccagttcagaaatgactgtattgaaatgaatgtcaatcagcagagtcatttgaataaaatctggtgttcagtttcacagacacaggatgcaaggacacccatagcaaaacttctgatagaaactttggtgttttcgaaagcaatctcgtgtatttaattttccttaagtcactataaggtggaaaattatttctttgtcaaaaggatcctataaaaagttctgaatgctaaagaaataaaggccatcattttgcacaataaaaataacaaccgcataaactcattagcagagaaattttggtgtcccacaggacattttgcagataaaatatcaaaagcactttgatgcactcaaacgtaatgaaaatctttgacacttataacattttagaatatatctaaaaattgctcaaataaaaataaaaattcctactggtatagtctaattacataaaaaagaacattgtagtttaacatttatttaatttcagtcacatattctcaaatgataaaatatttattttgtaatctttctgttttttatttaaaaacaagatcatccttataaataggaattgaaaatttagtagcccaaataaaatttttaatagctcttcttccctatggaagataataagtaataaaatgaataaaatgtgtatactttacaactcaaatcatattaattgctacatgctctaagcaaattattctgctgccattataggtcaaagctcaacctgggataactttattattcagtttataagataggtaggcataaatgtcattattttaaaggttataaattttaaaaatcgagacaggaatatgtatttgttcaaagttatctattcataagatgggaaaagagtcaagataacaagatatgtattagatgcagaagaattccatcacagtgagatgatcaggagattttataacagatataactgaaagcattgctgtttgagcatatttgtttacagataaaatgtcacgattatttttactggttttttttgtttgttttattgctctttttctctttgtaagatgaaacagatttgattagatgaaataagagctctcatcttatccaggtggatttatgtagctgcacttattgctgaccaggaaaaaaatacttcatattcttctagcccaatgctttgcaaactttctcactaaagtaacccaatggatggtgacaatataagcatatcccatggaatataagctttagcctgattcagacactgcatgcctgccatttccttgaaatttaacgttatgttaaaaatacattcaaattcatgattcaacttcttaacacagcagtgtcttggcatctcagtttggaaaacaaggcacttcagctggtgtcttggcacagtaaatctcctataatggaagataccttaaaagttacctagtgtggtagttcaaaatgttttggtaggctcacagtgcttgtctgttcctcccttcattagctactataatttttttttcattttgtgaagacaaattatttcatcactgtgtggcaatgagtaaaccattcagtctctctgggcctttaatttcaactgcaatgtgggtatttaggtagattattatagtctgaggcctgaattccgaccccagctttatttattactcattaccaggatttttaaatttttttaatgagatccaaaacagctttattatgagtaaaatattaatgtatgtgaaaagtaaggtaatgagactgctgtagcatagtgccttgcacatgataggctctcaatggcgttggtggaatcaggttaatgaattcaaaaagaggatgcctggactatttagacaaatcttgaaaccaacagtgatcctccctactgatacaatctctgtgctcctacttgaactcactcatctaaaatacagaccaggacaaatgaagtgtattatgcatgtcaagagatgaagtctcagttccatcatagtctattccaaagtttgttattatctctgatgaggaaaacaccttttatttaagctaatgcacaattgctatgatttaagcttttttttccctctgtcatgctccttaattggaacaaggaaagggttctctctttctttggacattacacgttataaaattgaagtcccagcttcttttcttcctcttcagaatgagccctctatatattaggctctttctttacattatgaaaaaatttattattatacaagtgtatctctatgtatgtatacataaatatgtatacgcacacacactcccacgtacaactttttttcacaaattattttcagaataatagagatgactaagttcagagaatctcttcaaaaccattaaggttattggttttgatttcaaataagaaaaataaataaacctcatgctacagtgtgcattagccacttttgaattttcatgaaaataaaaaacattattctgaattcatatatgataaatgatggtggatttagaaagcatagctgtggcagaacaagtttagggaaagagaattgtgccacctgaagaaaagtcctgagattaggaatgaaagacaagtgatctggtggggcacccagaagtgcagaagtctgagcagacagtgtggaagcggatgaggggttcaggtttatatacaacaggatactgcacttgattgaggtaggacgtctataaatgtctgaggataggtttgcttctcacaatgacagttgatactggcatttagtggcatgagactagggatgttacaaggcaagcactgagacagtcccacccacccaagaactgtatgacccaaattaaccatagtgctgtcattgagaaacactagcaggataaagcaaatttcacaggttatcatagataatagacttcaagttcagaaaggtgatctggataggcagattcaggaatctgcctggactgagcagtggaacaaagtcttagaaacaaggtgttggctaaaatcaccagagtctactaattgatggccattaccaccaacgatcagtgcctattgtgttcaaaacccatatccagcacttcaggggaaagacagacaataaggaccttacccctagtccactgtgggcacgaatcctttatcacacagagctcccagccagactgggtgatcaacactgccttcaggaaaacataaatatggttcatagcacacactgccactgccagccttgcaaagtcactaataagacacagaaagcacaatggatctattatcttgccctgatttgtgacccttataccttacttccctgactgtggccagacttatttgagtccaaagagtaaactgtggtcagcaaagctggctggccatcaacaaagattcatggtcacccctgtggtttctgttctccgtgagtgaatcattccttggcttctgccactcctcagccctccgagtctatggggaagagtgcttccttaggctcatgtgtggctggactgcctgccagaacctaagcacatacattagtccctgtaggctatgttggagcctctaatctccctccaccttgtgcctttttgtattaaatcacctagatttttatttctgagacttaattatcaaggacatttaacttggctaattttagaggcaatagttggtttttatctttagagttaataaaagaggtaaatcatatatccaattgtttgggttttttggtttttaaaacctgatccttagaaggaaaactacggtacatgtgatatgtagagccaagatttgttatgggttataagagagtgagatttggcggaggttgacaatttgaagaatcaccatgaaaacgtatcctcaaggaggcattcggttgtgatgaaaagctctgcttgtttccagaaataatttttatcatttgctaatcactgggctcttttctcgcttaatggcctgagatcagaactctggaaagaatcttggagaaaccaagggcttcatgcctggctgcacaaagtaccagcattccttcagcccaggggcaaagagtgggggaaacttctactcagcctggtaaatactgggagcttctccatagaagagacgcgggaccctgcttctaagtggaagggcttactgtgatgggcctctctctattatacttgtttaggaactttgagactttggggtccattctttaggcacaagcaaatggaaagagaaagaatttatttccttcaggaccttacagataagtagatgcttttctaggtagaggtaaaaatcattttgtcatttcctttgtttttaaagaaaatgtaaaaataatactattactgataacaaaattagcagtattttttggtgtagcttcatgctcacagagtcatgcatgtttatgtttgaaggggtttcttgaacgcaggcccatggtctcttcctaaatatgtttgacactcatgtgctttggaaagcaattgcatgaagtacatatcagctaactttttaagtcttgcaacacttcctacactcacaattcggaagctaaccaaacataattgaaaattacaggcatctaaaacagataattatctttccagaattaagttcctcttgggaaactatttttactcaaatggttcactggaatgaatttcttctaaagaaaatgtgatagcatcttaatccattattaactcattgcctttaactttggccctgattttgagcagcaataaaatcaaagattaaacatgcttatactcatgtcaggtacttgtagctcaaagggcctgctttaaattatgtgtgttatacgtctctttgcttaaagtcctaagcagaaatttaaaaaaaatcatccaactggacaaaatgtaggcaagtatactgactataatatttatcaaactttcctaaggaaataagtcaacaagtgttacacaatttccacttcctgccaagataaaacaatgagcactgggtttacccttttatctcaaacaacaaaaatatccaagaggtaaaatttatatttataaaagttttcaagacatgagacaagaggaaatgaaggacagtaagtccagagtgaggcaaatgaagccatttcaatgactgctcccagcactgccatgagccagtgtccaggccactgatcagggaggaaactcaagcagagcctggtgcgctccctgctgagaagacagagttgacagtctaagggggatcaggcagctacatcttatgggacaggacacagagaaggagaggagagtgtggcacagacagaactcctgagatcggcagagagtccttctagaaactctagcagagaactagcagcacatgtatataagaaaatgacttgaagccagaaaaagaaagcatctgaaaagattagaggaatgcaatagtgactgatatccacatagggctagaaataatgcttgttaccacagtcgggctggaaaaaaaccttgtcacttacaggcaacagttaggtaaattcaggatggttttgcttcagtaatggggaataattagcccaaaatatgcactgctctggttctacttaatgaatcttaaatataagactctagaggataaaactatttccaagtaccttaaccacatcccagaacaaagctcaataatttttatagaaatacaaaaatactcaacacccaataaatgttacaagcagcaaatccacaatcctataaatattcttttatgtaataacaaattcatggaacaaaggcttattatattgagaaataagtactaacaacatgcaggttctcaagaagttttacagtctagcagggagcaagaagggtagcgtatctcattggggaaccatggatctgctacagtgggagaccacagattcaaggtggttattccatgtgaacgaggctttggcaagggctcttcttgtttcaaagaagagtagttcttcccttcacctcaagcaaagtagggtttattaaaaatacagtcattgactagaaatggaagcaaccagcaagccacaaggaagctgggcagccactcagggccacatggtccctcacacacagaatctgtttctgcctgtgcgtccactccattctcctctctctatgggctgttgtccccaggacatcagcttgcatggcacaagagagccactgcagccccacataacccatgacctggctgctcctgcacctggtctctctgtttctacatccccaaagagaagccagtaggccccactccactctatctatgagctggatcacaccatgagcatcattaagttaggggtcccacctctttgcccaatcagctgtgactatagacagaacataagtatcccccacatcagtgctgtgttcagggcagattgactcagcagaggttgagggcaggcaagaattctttattcaggagtagctggaaagacaaacagatgtttgccaagcagatgggagacacagagagcattgcatgccgagaaaaccatagaaatgtgagtacttggtatctagtccctagaagatacatttccttgttggtccccctctgcttaaaaaatatggttgtatatacaagtcagttctactattctgcctatttggtcccctctttggcatatttttcttatggaattgacagaaatggtctgattagggatttttttttttttttttgagatggagtctcgctctgtcaccagactggagtgcagtagcatgatcttggctcactgcaacctccgcctcctgaattcaagcggttctcctgcctcagcctcccaagtagctgggactacaagtgtgcaccaccacacccagctaatttttgtgtttttagtagagacaggattccaccatgttgaccaggatggtctcgatctcttgacctcatgatccacccgccttggcctcccaaagtgctgggattacaggcataagccaccacacccagcctagggatcttcttaatcaaatgcattgatagaaaaaaagcaaccagaacaagttttgtctttgtgcactctggctggtaggaccaaatctgcagaattgtgttacatctgggcagtatcctgagtgggcttttggcaaaa

SEQ ID NO: 1394 - protein, 484 aa, Homo sapiens [sequence omitted]

SEQ ID NO: 1395 - DNA, 898 bp, Homo sapiens
  source
  (1)..(898)
  CDS (201)..(698)
aggacccggcacgggcatttgttacatgcacagaatctcagtgcaactgaggtgtgcacctgtgcttggcttgttagaaaagtccttgagtctaatttaatctttacgatgactcagggcctggccacagatctcacgtccccacccgcctgacacccagggctacttggaggaagtgaccactccatgaggttgtgttgatggatgtgttggacccgaggcacgaatgtgaccctcggtggagaagactcgctgagcaggggagggagcctcagaggctacaggtggcactggtggggacgtggggagaggaagacctggaggggtggggtggggtgatgttgggtgcttctgtgggcatccacaggtcctgggcactggggtggcagatgcctcgggggtggccactcacccaggaaagcagcccacatggaggagaggtgggtgcccagagttgcacccattccacagggaagctgccagtagaatccagctcccaaagtgctctgggcttcagcagtgggacctttgtcaagggtggaagcattacccagtcccctgagacaggggaggcagagggagctggacagaggcctccagctggtgggggctgggcaggaagaaagttgagccctgatgggagaaggaaggtgggagatggggctggcaggtgtctgcaaggaagggtggggtgctgagggctggagtccaggaggggcttcaggatggggtccctggaccttgtatcgtccatccccaaggcccaaggagggggctgagaggacagcaggctgcagggactgcaggctgttggggttgaggggctgtgattgggggccaatgtttctaaccactgtcccaggcctgcttcacagcttatgtaccgagctgacaccaa

SEQ ID NO: 1396 - protein, 165 aa, Homo sapiens [sequence omitted]

SEQ ID NO: 1397 - DNA, 1318 bp, Homo sapiens
  source
  (1)..(1318)
  CDS (201)..(1118)
attaatgaaactaagtttttttttaatacaaaattgatgaaattttagctagactaatgaagaaagtgagagaagactcaaataaataaaatgtaaaacaaaagaggattgcaactgataccatagaaatacaaagaatcatgagagactaatatgaacaattatgtgctaaaaattggattacatagcaaaaataatttatggaaacatacaaccaatcaagacagaatcaagaaaaaatagaaatttcgaacagaccaataatgggtaaggagattgaatcagtaataaaaaatatcttatcaaagaaaagcccaggactagatggcttcacagtggaattgtgtatatatacatatatacaagtatatacaagatatacttgtatatatacacacaagtatatatatatctacaagtatatatatctacaagtatatatatatacacacgtatatatatatacgtgtatatatctacaagtatatatatacgtgtgtatatatatacaagtatgtatatatatacaagtatgtatacatacaggtgtatatatatacaagtatgtatacatacgggtgtatatatatacaagtatgtatacatacgggtgtatatatatacacgtatgtatacatacgggtgtatatatatacaagtatgtatacatacgggtgtgtatatatacaagtatgtatacatacgggtgtgtatatatacaagtatgtatacatacgggtgtgtatatatacaagtatgtatacatacgggtgtgtatatatacaagtatgtatacatacgggtgtgtatatatacacaagtatgtatgtatacatacgggtgtgtatgtatacacaagtatgtatgtatacacaggtgtgtatgtatacacaagtatgtatgtatacacaggtgtgtatgtatacacaagtatgtatgtatacagaggtgtgtatgtatacacaagtatgtatgtatacacaggtgtgtatgtatacacaggtgtgtatgtatatacaggtgtatatatgtatacacaggtgtgtatgtatatacaagtgtatatatgtatacacaggtatatatgtatatacaagtatatatattattcttgttgaactcttccaaaaaattcttgtcgaactcttccaaaaaattgaagaagaaaaaatacttccaagttaattttacaaggcagcattaccctgacaactgattaccctgataagccagccacagacactagaataagagaaaattatcccgaacaatatccctgaagaatgtagatgcaaaagttctatactaacaaatgtaa

SEQ ID NO: 1398 - protein, 305 aa, Homo sapiens
METYNQSRQNQEKIEISNRPIMGKEIESVIKNILSKKSPGLDGFTVELCIYTYIQVYTRYTCIYTHKYIYIYKYIYLQVYIYTHVYIYTCIYLQVYIYVCIYIQVCIYIQVCIHTGVYIYKYVYIRVYIYTSMYTYGCIYIHVCIHTGVYIYKYVYIRVCIYTSMYTYGCVYIQVCIHTGVYIYKYVYIRVCIYTSMYTYGCVYIHKYVCIHTGVYVYTSMYVYTGVYVYTSMYVYTGVYVYTSMYVYRGVYVYTSMYVYTGVYVYTGVYVYTGVYMYTQVCMYIQVYICIHRYICIYKYIYYSC

SEQ ID NO: 1399 - DNA, 874 bp, Homo sapiens
  source
  (1)..(874)
  CDS (201)..(674)
tgaggaatcacagacccgcggcttcagttcacatcaaaggggctctattgtcagctttaaatttatctcttaaagagccaagaaaaaagtcagataaaatggcaagaatgcgcaagaaaggcaagaaaaggtgatcaaggaagctgaaagaagccattcccgctcagagaagggaacggtcacggaaagaacgcactcagatggcacttggagcggccgttcttcagtggacggttttgttttgttttgtttctgtttttgttttttttgagatggagtttcactcgtcacccaggctggagtgcggtggtgtgatcttggctcactgcaacctctgcctcctgggtccaagcgattctcctgcctcagcctcccgagtagctgggattataggcacacaccgccacgcccggctaatttttgtatttttagtagagatggggtttcactatgttggccaggctggtcttgaactcccgacctcaggtgatctgcccatcttggcctcccaaagtgctgggatgacaggcgtgagccactgctctgggcccaggggacaggttttgaatagaagcaaagaacagctcttggcttatggagggaagccattagtaggcaggatgaaccgggtgaatacactggaaaacacagaacagctttcgtgccattattagtaatgagttgtgaagtcaaaacgaaaagaaaacagctttaaaaaaccatcaggagtcaaaaacagctttcagcctcaccgtaagggaagctggaactaataatatctttccagtgtttacttagagaatgatgtcacggcaccgtctcgtgggggcagacagaggcacacagggcagagccctgagaaatccactttacc

SEQ ID NO: 1400 - protein, 157 aa, Homo sapiens [sequence omitted]

SEQ ID NO: 1401 - DNA, 1024 bp, Homo sapiens
  source
  (1)..(1024)
  CDS (201)..(824)
ttgcataagtaatgagaagccaaatgttaatccccaagacaattgggaaaatgtcttcagggcatgtcagaaatctgggcatcccctcccatcacagcccagaggcctaggtagaaaaagtagattcatgagctgggcccaggatcctgtgccatgtggagcctaggtgcttggtgcccagtgtcccagccacagcagccatggctcaaagaggccaacatagacctcagaccatggctcagagggtacaagcctcaagtcttggaggcttccacatggtgtccagcatatcagtgcatagaagtcaaatattggggtttgggaacctccacctagatttcagaggatgtatggaaaaacctggatgtccaggcagaaatttgctgcagaagtggggccctttatggagaacctctgcttgggcagtgcagaagggaaatatacgtttggaggtcccacacagagtccctactgggacactgcctagtggatctgtgagaagagggccactgtcttccagaccccagaatggtatgtacactgacagcttgcaccatgtgcctggaaaagccacagacactcaacaccagcctgtgaaagcagctgggaaggaggctgttccctgcaaagccacaggggtggagctgttcaagaccatgggaacccacctcttgcatcagcatgacctgaatgtgagacataaagtcaaaggacaccattttgtagctttaagatttgactgtcccgctggatttcggacttgcatggggcctgcaacccctttgtcttggccaatttctctcatttggaatggctttatttgaccaatggccatactcccattgtatttaggaagtaaccaatttacttttgactttacaggctcatagacagaggagacttgccttgtctcaactgagactttggactgtggacttttgaattaatgctcaaataagttaagacattgggagactgttgtgaaggcatgattgattttgaattgtgatgacataagatttgg

SEQ ID NO: 1402 - protein, 207 aa, Homo sapiens [sequence omitted]

SEQ ID NO: 1403 - DNA, 892 bp, Homo sapiens
  source
  (1)..(892)
  CDS (201)..(692)
ccacctgtctgctgtgagctcgtccactcagtttccagagcaattattgtcctgagcagagaggcctgtctggatgggcagtgtgctcctgcccttagggtagacgggccggctgagctcagccgacgtggggtcatgtcctgtttacacagggaaggtgaagaaggagctggaccctgacgacagccatttgaacttggatgagacgacgaagctcctgcaggacctgcacgaagcacaggcggagcgcggcggctctcggccgtcgtccaacctcagctccctgtccaacgcctccgagagggaccagcaccacctgggtgagatgcccccacccacgccgcatccccagagaccccagcacagtcagtgtgacgtctagacgaggtagtgggcagcattgtagttgtgggaaggctggaggctgcatgggcagcggtgctgttgtggaggtcggtttccacagatgtccttgggtcgcggcctcggtgcagagccggagcggagctgggatgctggcctggccgcacgctgggttacaggctttctgccagataccgtccccagttctgtccacccctgtgccctctgtggaccctggttccagtgtttctgctggggagagagcatggcttccttggccatgtgtcctggagtggttttggtgggtggggttttgttcccacttgtaaacactggatcactctgtcggcagagtgaatcttggcagttcttcagctgcagaggtttagctgcaaccatctgcaaaaaggccggtattttcgattccattgaccttgtgatcagggtgttaacagtgcatggagcaggctttggagggccgtaggtcaaagtctgaggcccccgatatcccagtatgactttgggaact

SEQ ID NO: 1404 - protein, 163 aa, Homo sapiens
MRRRSSCRTCTKHRRSAAALGRRPTSAPCPTPPRGTSTTWVRCPHPRRIPRDPSTVSVTSRRGSGQHCSCGKAGGCMGSGAVVEVGFHRCPWVAASVQSRSGAGMLAWPHAGLQAFCQIPSPVLSTPVPSVDPGSSVSAGERAWLPWPCVLEWFWWVGFCSHL

SEQ ID NO: 1405 - DNA, 871 bp, Homo sapiens
  source
  (1)..(871)
  CDS (201)..(671)
acctccaccttctgggttcaagcaatccttgtgtctcagcctcccgagtagctgggattacaggcatgcaccatcacacctggctaatttttgtatttttagtagagacagggtttcaccatgttggccaggctgctcttgaactcctgacctgaagttatttgcctgcctcagcctcccaaagtgctgggattacaggcatgagccactgcacctggccttgtcattctatttttaaagagaagttcaatgctgttagaagcagctatcccatttctacatctctgaatttctcacatcttttatactctttggaagcaggaagacagtatcaaaaagttttgcttcacatgggcatgttatttcagatgtccattgataataatttatttggccatcttgctactatatactatgaacttccagattcctatcatgtgaatattaatgagactttgactcattctgccccagttaatctagataaccccagttttctcacgttttccttagagtctattgcctacaacacatctgctggtgccaatttttgttttgaacggtattcttggttgcaagccagggaaaccaactcaggcatcttagccagaaaaggaatactagggcctcatagaattggcaggatgctggagaccaggatcagaaattgaaacatataaaccaaggtagctttgggaagtcaggatgctggaaatacaattgtctcttgaagaacactcttcccagaatttagctgctggggttggcacctccccgcaacttttgtttcctctcttaccatatgttctttgcacacaccagctcctttttgccttccaccatgagtggaagcaggttgaagccctcacca

SEQ ID NO: 1406 - protein, 156 aa, Homo sapiens [sequence omitted]

SEQ ID NO: 1407 - DNA, 1318 bp, Homo sapiens
  source
  (1)..(1318)
  CDS (201)..(1118)
ctttgaggacaggtggatgcggttttgcttagtagtgtttctggatatgccttctgattgaaactgagattttgtttctatcgtgactgcttggcatattctgctcacctggatccccttcctccccatagacctatatgttccagatacttgaagaacacacctaagacaagtacaacagtgtttgcacgtgtacacctatgcacacgagctttgcacaagtaaaaaaaatcttttcaatttctcaccgttatttagtgaggtataaccttttttgttatctttctttaattattattattattgttatttacaaagggggatatatgccaaagagcatacaactcaaaccggtagagtcaggatataattcaagtcttctgaccacaaatctaatgcccagattgaccgctgagaggtacaaacacatccaagtactggtaagatttctgttaccctcttggatagtagcttgtctggctgatttctccacccagggaagacaagcccaaggaccgggaagtgctgtggtagaagggtatgttattccgtgtaatccatgtaactcttcagcctgctctcagttagactggatgaaaagaggtgtgtcatcttcaagaagagaagaggcttcctctgctattacccaaggctcccagcaagagtgggggccctctgagcagattgcgggtcgaatggaggcacttcatcaggtaggggagagtgtagaggtcatacttggagggtggctacattcatgcagatggtgtaactcctgcatgacgtctgtcccagaagaagatactggtagtataaagttgctttccccagggcgctgtaatcagctacaggcagcgctctatgaaggccatcaaaaaactggggagttgagggaccttcagttactggaatatgcctgttacagaaaatgcttcttgattttgcttcttcttccttctgagttgctgtggagattgtgtttggcatggagatctggtatcttctgtgatgctcagtatgagggaccatctttcaagtcaggtcaagagtataacagcctaggagacaccttggacctttcttctaagagcaccccttatacaccatgcttacattagaatttctcctcctctttttcttttgccttcttcatctctttttttcatatttttttaaaaaatacattttattgcatatatttgaggtttacagcatgatgttatgggatatatacagatagtaaaatggttactatagtgaggcagcttaacatatctatcatttcatatagttattttttgtgtatgtgtgacaagag

SEQ ID NO: 1408 - protein, 305 aa, Homo sapiens [sequence omitted]

SEQ ID NO: 1409 - DNA, 958 bp, Homo sapiens
  source
  (1)..(958)
  CDS (201)..(758)
ttaccaacactatttccccccttgacctgagttctcctaattcctgagttgaggcctctctctcctggcccctgaggacacgtcccagggtttagcgcggggcctgcacgctgtaggtgcccaataaacgtgagtgggtgatggagggatcaagccagcaacaacaaaaaggcatgtagggaaagaattcctcatttaggatgtccacgagacccacaaagaaatgcgtgtgttgtatgtgtatgctcacaggtgtgtgtgctgtgtattgtgtgtgtgtgctcccaggcgtgtgtgttctcacaggcatgtgtgtgctccgtgttgtgcatatgtgcttgcaggcttgtgtgtattatatgtgtgtgcttgcaggcatgtgtgtgttgtgtatatgtgctcacaggcatgtgtgtgttgtgtgttgtgtgtgtgtgctcacaagcatgtgtgtgttgtgtgtgtgctccctggcgtgtgtgtgttgtgttgtgtgtttgtgctcgcaggcatgtgtgtgttgtgtgttgtgtgtgtgctcacaggcatgtgtgtgttgtgtgttgtgtgtgtgcttgcaggtgcagctgtctgcttgtgggtgtatctgggataatgggcagagccagctatgcgtggggctctaccagcttgggacgttttgtctgtgtgttcccaccagacagcgctgtgtgcaagtgtgggaattctgtgtgctgtgcacggggccacccagagagcaccagaactggccctgaatgctctgctgactgcaacacagcaaaggatgtgcagcccctgactctccctgtcctgcgcgcagtgctcacaaccttctgcctcggatcatccttcggcacagtcttttgtcctttcactcaggcatcagcaaacatccctcaggtcctcctgtacactgccatctgccactctcggtggctctccagtgggtctctct

SEQ ID NO: 1410 - protein, 185 aa, Homo sapiens [sequence omitted]

SEQ ID NO: 1411 - DNA, 982 bp, Homo sapiens
  source
  (1)..(982)
  CDS (201)..(782)
tatgaaaatgaaaaggcaaaggagaaattggaaaacaatctgcaaaacgtatctgacaaaggaattatgtctagaatatatgttttaaaaactcttacaactaagtaatataaaaagaaaaaagtccattcaaaaaaatgggcaaaaaattgaacagacacttgaccaaaaaaaatatatagcaatggcaaaaaaagtacatggaaagatacttaccacacatcatcagtgacatgcaaatcaaaccagtgagatactactatacacccactagaatggccaacattagaacaaatgataaatacaaaaggttgggaaagacatggagcaactggaactccttagtaactgctgctgggaaggtcaaatggtacagtttggtagtttctgaaaatattaaacatagatcttccttcaaccctgccatgctaggtattcatccaagagaaataagaacatgtccacacaaagatttgtccacaaatgttcatagaagttttaattgccccaaactggaaacaatccaaatgtccaagatgggaatggatagacacattgtgatatataaaaacaatggaatactactgagcaataaagaggagggaattactgatacatgcaacagcatagataaatctcagaaacattattcttgccaaaaggaaccagacacaaaagaatacatactatgtgattccattttatctgtactgacagaaagcaaatcaattattgcttggggcatgagaaatttttttgtgagtaatggaaacatcctctaacatgattgtagtgatgtttacctgactgcatacatttgctaaaactcatcaagttgtactcttaaaattggtgaaatttattgtcttaattctgtctcaatttttaaaaatgaggcagctctacaaggtacatatggaatagactccaaagttcatagttaagtggaaaaaactaggtgcagaaatatgtatacagtata

SEQ ID NO: 1412 - protein, 193 aa, Homo sapiens [sequence omitted]

SEQ ID NO: 1413 - DNA, 979 bp, Homo sapiens
  source
  (1)..(979)
  CDS (201)..(779)
aatgtggccatgtgcatattacatgttgtcatcataactgcccttcttgcctgttttctggcctcctgtcactcttcccttgaccccgtgctgtcttgtgggccactggcattgctcagcctgccacctgctcctcctgcggctggagaaggcgtaacacggacagtgtcaaggtacaacaaactgtaacctctcagaaaatgaaggcatgctggatgagtgaaggagatgtttctgtgctaggctccatgtgtgtccacaggtccatgtgtgtgacatggctccgtgcatgtgtgtctcatggctctatgcatatccatgtctccctctatgtgccatctaagtgcctcccatggctgcacgtgtgtgacatggctccatgcatgtgtgtctcatggctccatgcatgtgccatggcactatgtgtctcccacagctacatgcatgtctcatggctccatgcttgtctatggttccatgtgtgtcccacagctccaggcatatccatgtctttatgtgtgtccatgtatccatgcatatcccatccctccatgtgtgtccacagttctaggcatgttcacaactccatgtatgtatgtcccatggctccatgtgtgtcccatggttccacacatatcccatggttccatgcacgtccacatctccttgcatgccgcatggctccacgcatgtcccacagttccatgcgtgtcccatggctccatgcgtgtctcatgatgctctgtttcttctctgggatttggctgtctggtgtctaatgcaccaagcagttgtgtggagtcatggtactggctgagtttagcctcttcattaggatacagcaacctcattgccacaggacaggctgcagtagaggattcctcgagtccctgtgagattccagaggtttctgagtctgaatatataaatcttgggtaaaactgcttccagtatttctctctgttcatctagtctcaga

SEQ ID NO: 1414 - protein, 192 aa, Homo sapiens [sequence omitted]

SEQ ID NO: 1415 - DNA, 880 bp, Homo sapiens
  source
  (1)..(880)
  CDS (201)..(680)
tttctagttaaaatggaagttaatgagagcagacatttttttcatatttataactgtcactttgttaatcagaactgtatctgaatagagtaggttcttagtgattatttcttcaataaatgaaggaataaagtatgactttcaatttgggctaccccaggtgagatgaaggcagagatgaattgctgatgctttgagaaatgcaatcccagggcagaaaggatgtgggagcaaggcagaaatggatgggagtcaatgccagccaaggctttattgtgccaacccctcttcaccatgagccagaaagagatccagccagttgctcagtggagcatctgcttggctctatggaatgtctctgcacaggctgtgcagaaaagtcctgcctcagagcagtcctccagagagaagaaatgtatcttctcggcttggtcctgtctcctgtttcccactggatgattttcactacctggggagtcagctcccacacgtccatgccatctggtacgattattttttatttttttttagaaacagggtcttgctctgttgcccaggctatagtgcagtggcatgaccatagctcactgcaactcctaggctcaagagataatcctgcctcagcctcccaagtaattagagcaactagcgcacatcgccacacccagctaagtttttaaattttttgtagagatggggtctatattgtccaggctggtctcaaactcctggcctcaagcaatccttctgcctctgcctcccaaagtggtgggattatagatgtgagtcactatgcctggcctatctgatgcctttaaaagccacttaagaagttatatccaaagactctgtctcagggggaggagccaagatggccgaa

SEQ ID NO: 1416 - protein, 159 aa, Homo sapiens [sequence omitted]

SEQ ID NO: 1417 - DNA, 1159 bp, Homo sapiens
  source
  (1)..(1159)
  CDS (201)..(959)
aaaggggagaaggtgcatgcaaatcatcctgacctatgggcaaggagaggagcagcaggggaaaatggagagctagggaaagaaggcgcttaccaggccacctccacaggtgctgaaagaagccagcgagccagggtgccgcagcacagctccggtgtagaagcagcctgcgtctggtggcgcgggaggttgcggggcggatgctgcccccgtggggccggggccgggatttggccgctgttccactgcgaagcgcggcgccaggaagcggccgtctctccggagcagcaggtacaggtcccgagagaaggccgggatccgcagcaacacttcgtcgccatccggctcggcatgctgggccgggggcggggacgggggcggctgcgggggaggcggcggctgccacgaggccggggcgcccggggacaaggcggcagccccgctggatccccgcggcagctcctgcgactcgagctcctcgtcctcctcaccctccgacggcggcgggggccggagccgggactctgatcggccctccacgggctcctccaaaggcaccggagccacagagcgcacctcgcgtgagctgccggcagcctgcgcccgggcgcttccgccgcccccaacgccgcgcacccagcccgggtccgcgctgcccccgctgccgccagccgggtccaccggctcccggcgccagagcgcaggaaacacgacttcccactcctcgcggtcgggggcgaactgcagctctgcgggcggggcagacagaagtgcggggcttaaagtgccgcggttccagtagcacaaacatttccaagctcacagtccatagatacagggcgctcgcgttgaatgcaatggagaccacccgtctagaccctgaaactctgcaaccccagaagccttgcgatcagattacagaccccagcattttcagagtaaaagtacgattatattaggggcgggggagggggaatcaaagtttggtgaccgcacttcattgttgaaaagaaaaccgatgcaaagactccagcacgagtaaacgatttctgaagtgtatgctagagcagagcgttgctatcaacttaggtacgttctaattttcctccaggtgctgtaaacgtacctttgcaaatattattgctctaattagaaggaa

SEQ ID NO: 1418 - protein, 252 aa, Homo sapiens
MLPPWGRGRDLAAVPLRSAAPGSGRLSGAAGTGPERRPGSAATLRRHPARHAGPGAGTGAAAGEAAAATRPGRPGTRRQPRWIPAAAPATRAPRPPHPPTAAGAGAGTLIGPPRAPPKAPEPQSAPRVSCRQPAPGRFRRPQRRAPSPGPRCPRCRQPGPPAPGARAQETRLPTPRGRGRTAALRAGQTEVRGLKCRGSSSTNISKLTVHRYRALALNAMETTRLDPETLQPQKPCDQITDPSIFRVKVRLY

SEQ ID NO: 1419 - DNA, 988 bp, Homo sapiens
  source
  (1)..(988)
  CDS (201)..(788)
agccttaagcttcagttctttcttccttcaggaggaatagggcccgtacatcacagggttgcttgaggaataagtgggagagagctgacggttattgaacctcgattaaaacctcacctctgctcagccctgtatgggtggttattctggttttacagatgggtaaactgaaaggggtgggggacggcagagatttgtgaatggcagggcaagatcccctaggtgttctcctggatgaccgggctggttccctagggctgcagccaccagcttcctggaaccacctcttccagggagtcctttgggtctttctctgcagacaaatcagcctcggccctgctcgtggcaactttcctccaatcaggcaggggttgagaagagaccagagagctgtacccagggattgggagacaggagatactccctgctgtttgtctaaacctaaagtttcttcttcccttaatctccacctctcactagatagatctgccaatctgcttccttcccaaaaggtaggtagttattcccattttacagaagaaaaaaaaatgaggctccagaaagttgcatgcctcaaatcattcaatgagttccatgcctcgaatcatccaatattagatcattcgatttcaaatgtgcacgatgcccaggaagatctattggaaagggaggtaaaaagtaacatcgataatgacttaagaaatgagaataatatcccacatttactaaatgctaggcactctctcatgttacagctgctgaatctgcagtgcagaaaagtgaagtgatttatctagtctcacaggaaatacatggttcaaccttacttgaagccagttcagctctagatcttgaagccagtttagctctaggagatccgaagcagagctgtctcctgggtcagtgcctgcttccagcacactcagcgctactcggtattttgtaaggcttgtcacctagttctcaccagcaaccctgtggatgggca

SEQ ID NO: 1420 - protein, 195 aa, Homo sapiens [sequence omitted]

SEQ ID NO: 1421 - DNA, 6269 bp, Homo sapiens
  source
  (1)..(6269)
  CDS (201)..(351)
  CDS (517)..(955)
  CDS (2699)..(3014)
  CDS (3969)..(4047)
  CDS (4440)..(4680)
  CDS (4756)..(5169)
  CDS (5631)..(6069)
gccacgtggccacactcagttccctgagggtcccctggagcctggcacccccacgtggcctcctcgaggcctgaaccctgggttgaatggcaaagacttgtgaaggataaggctgcatttcagtaaaacctccccagcgaggggcaccagagcccacaggcagatgcggggagggaagccggccgggagctagggaccacatggacccacgtcttccgggcccccttgctcccaccgcagccctgctcatccccacaatctgccccacaccccaaaaggacctcccacctggcccctccctggaccgcgcccctgggtgctgtgtgtaccggcatccggggcccgtcctgggtcagacccacttgcttctcctgggctgggacgccactcacaggcgatgggaccaccatacctccaccagaatggagagagacacctgcaaccaacatgactccgatatcacccaaagataaggagagggcaggccaggtcagtctgtctgtctgtcttgctcagatggggtggcccctcggaagacagcagccttccctggagggggctgggggtctgtgggagggacgcaggaagctgacccagctccccacgccaccggcgccagccagacgggctccgaaccccgacccgtaggcgagcgcctccccagggccctcctcctcgggtggcaggccctgcagctgccccgcggcccggcttgtcttccaggcgacctgcagattgggctgctggacttcctcctgtttggcagcctcatggcggctgtggacccggtggccgtcctggccgtgtttgaggaggtccatgtcaacgaggtcctgttcatcatcgtcttcggggagtcgctgctgaacgacgcagtcaccgtggtgagcaacggagccaccgctccagagcgggcgagccgtgggaggcctgggccccgtctcaccccccatcggtcagtcagcaaaggagggcgtgaaaccctgtcctcaaactcccctcccgggggcgtcccgtccctccacctccttcctcccagctcagaacgactggcagctttcgcgaggcttctttgtatcttccacagttcccaggccctgcccgcccactccatagcttcagggttaatgatggcgctgttgaaatcccgccctcctggtccccagagcgtctgtgactttggacccacagttactgccacccattcctgagttcctaaaaaatacatgagtggccgggtgcggtggctcacgcctgtaatcccagcactttgggaggccgaggcaggtggatcacctgaggtcagcagttcgagaccagcctggccaacatggtgaaaccccgtctctactaaaaatacaaaaattagccaggggtggtggcacgcgcctgtaatcccagctactggggaggctgagacaggagaatcacctgaaaccaggaggcagaggttgcaatgagccgagatcgtgccatcgcactccagcctgggtgacagagtgagactccatctcaaataaaataaatacgtgaatagcaaacaacaaaatcccataggaaccacgtaatctgccagggccgccatgacaaagtaccgcaggtgcagtgccttgaacgacggtgggtgtcagtgtggtgggtgtcagtgtggtgggtgtcagtgcggtgggtgtcagtgcggtctggatcacggtgtcagtgtggtgggtgtcagtgcggtgggtgtcagtgtggtgggtgtcagtgcggtctggatcacggtgtcagtgtggtgggtgtcagtgcggtgggtgtcagtgtggtgggtgtcagtgcggtctggatcacggtgtcagtgtggtgggtgtcagtgcggtgggtgtcagtgtggtgggtgtcagtgcggtctggatcacggtgtcagtgtggtgggtgtcagtgcggtgggtgtcagtgtggtgggtgtcagtgcggtctggatcacggtgtcagtgtggtgggtgtcagtgcggtgggtgtcagtgtggtgggtgtcagtgcggtctggatcacggtgtcagtgtggtgggtgtcagtgcggtgggtgtcagtgtggtgggtgtcagtgcggtctggatcacggtgtcagtgtggtgggtgtcagtgcggtgggtgtcagtgtggtgggtgtcagtgcggtgggtgtcagtgtggtgggtgtcagtgcggtctggatcacggtgtcagtgcggtgggtgtcagtgcggtctggatcacggtgtcagtgtggtgggtgtcagtgcggtgggtgtcagtgtggtgggtgtcagtgcggtctggatcacggtgtcagtgcggtgggtgtcagtgcggtctggatcacggtgtcagtgtggtgggctcctgcgggaccccggtcctggacttgcagacggtgccttcccgtgtcctcacgtggccgtccctgcgtgaatgtgcccgagtcgcctcctctcacagggacacgggtcctattggatcagggtccaccccggtgacctgactgtgccatactcccctttttcacgctcacatgcccaggtcctggggactttaacatgggaatttcgggggcacaatttggcccatgacagaggtgaagggagggaaactgaactggtgctaacggcagagcccggacggtgtgtgggtgtccctggaggagatggtgttccgggaggcggggacggtgcctccacagaggcccaaaggccacatcagcgctcagtaaggccaggagaagattcaggaaccccaaggaacatggttactacttcacagtgacaatcgtgacgtttcaaagccaatcccatcaaatggggccactgcctcccggaagtgagtcatggggccatccgaggggcacgtgcagagtggccctcctaggaaccgtcagtgaggccagccctgggcccggccccgacaccatcccagcccccacactgcccccgccccgtgctgcccctgcccatcctcccccagccccgaggaccctgcagacgcagccggagggaagggtggggtcagcttcctctcccctctgaaagtgcctgtggtttgaaaggtttgaaacccgtcagcctctcatgttcccttaggggttttggaaagaggaaagtcctgtgggtgtcgcacaccagacggcaagatattctcgggggaatttgggaagtgagacttaatcgggaatagagtgacagccccgtgtgccccgcagccctgcggctcccgtccctggagaagcaagagtctcccaagaggttgtcttccctcccagctggattttcattaaaaagcccagctccgagaaggccccaagagaccccgggaccctcatgggccccccaccccagcctgcatttgcaaacccaacttacacgcctgccccagggtcctctcccaccttggccagagccagagacacagagctgggtgcagagccaggttctccccaggggcctcggcccacccaggacggccctcggccggtctcacctgcgtcaccactttgctgggcgtggagcccagggcgtggataaggtttccccgcattttatctctgggttttgccgggctaaggtttaaaaacatgcaaagacggcaggggctagagccagcacagcagggaagtcactcaaactgacaccctgggtttgtctccgtagatgagactcagaattcaagtggcagggagctttgcagctgcccctgttttgcagaggataggaagaggccagctttgctcccaaagcttctggtcccctccagaacattcttttgccccatgtcttgctggctgctgggctctgggcttctcccctttgggggccattgccctgtgatgattttccttccaacggcctcgggtgccatgggctccacactcgggccaagtccagcgaggcccgggccccggagagggggtggcactaaccaaggaccacccaacgccctgcccgttttccctgcaggttctgtacaatgtgtttgaatctttcgtggcgctgggaggtgacaacgtgactggcgtggactgcgtgaagggcataggtgtgtagctgtgggtcagggggagtgggcggccgtgtctcctctggggccaactgtcttctctggcctgcagcccatgcaggaaaaagctttgcactcaaagctgctacactgggcccttctgtccacgtcacgtccccgtccagagcgattcacacacgatttgacatggtcctgggggttcctgggtgtttcccagaacagggatgagggcagccaggtcttcctgagacagacggccggatagggcctggggccaggctcccaggggcacgggagggtcctccccacttgctgaaccaaggctggtgctgagaccaggcccgatctccaagagagtgagggatccacccccgtttcccgggctcccggcacttccgcggggtcaccaggcggcccctggcaaggaagggcccggaaggccggcacggccacaaagggcgtcctctacccagtgtccttcttcgtggtgagcctggggggcacgctggtgggggtggtcttcgccttcctgctgtcgctggtgacgcgcttcaccaagcatgtgcgtatcatcgagcccggcttcgtgttcatcatctcctacctgtcctacctgacgtccgagatgctgtcgctgtcggccatcctcgcgtgagtccctcccacacacgcgagcttctccacgccctcctcccgagcttctccacaccctcctgggtccggcagggcgagccagccagggggaccccaacccgagcttctccacaccctcctgggtccggcggggcgagccagccagggggaccccaacccgagcttctccacaccctcctgggtccggcggggcgagccagccagggggaccccaacccgagcttctccacaccctcctgggtccggcggggcgagccagccagggggaccccaacccgagcttctccacaccctcctgggtccggcggggcgagccagccagggggaccccaacccgagcttctccacaccctcctgggtccggcggggcgagccagccagggggaccccaacccgagcttctccacaccctcctgggtccggcggggtgagccagccagggggaccccaactcggagggaggtgccagccgcatggacaccgggggtgtgtgtggcagaagctccgggctctgcatcaccaagttccccgtgaacccccgtgaggggaagtacaggaagtggagggcctcccctgccctctgtcctagcgcgggaccttcagagcagtgtcccgtcacctcgcccgctccgctggcgctcccaggctgggtgggaattcagtgtggggcaaagaatttatttaaattttaaaataaggagttggcgtttccactgaattgtctgtgggccgacagcagtgcccaccctgagacaggtcaggtggggagggactttggaaccctttgttgccctccctgctggcaggcagccccggtgcccattatctgcatgacggtgatgccgcctgtggcccccgcagggctgtgggcaggaaccctggcggcccagcctggctcgggaggaagaggcccccgtaaccacacaactgtgactctgggcctacaggcgccaggccgtggggggctgggcggacacgggggcctcgggcgccaggccaggtggccgtgtcctgaggcgcgtctgtccctgcagcatcaccttctgtggcatctgctgtcagaagtatgtgaaggccaacatctcggagcagtcggccaccaccgtgcgctacaccatgaagatgctggccagcagcgccgagaccatcatcttcatgttcctgggtatctcggccgtgaacccgttcatctggacctggaacacggccttcgtgctcctgacgctggtcttcatctccgtgtaccgggccatcggtgaggcggggccgggtttgcggccgtgggaccaccgatgggccggcaccgtctccgggaaggcgcaggctttctactgggcccagggagatggaggtgcagccccgtgcaaggcagaggagaggacctgatggtggcggcctcggggctggggtgggaggctctggaaccccaagggaaaccacttggtttcccactgactccactggatgtgcctcaagacagggtcagtggcacgagagatggaacgggaagcaagacagccccgcccccgcccagccccatcccccagcacccgtgtgtgtgatgcacggagcgtgggggggagacg

SEQ ID NO: 1422 - protein, 692 aa, Homo sapiens [sequence omitted]

SEQ ID NO: 1423 - DNA, 9428 bp, Homo sapiens
  source
  (1)..(9428)
  CDS (201)..(294)
  CDS (3082)..(3183)
  CDS (5501)..(5674)
  CDS (6450)..(6731)
  CDS (6872)..(7080)
  CDS (7150)..(7353)
  CDS (7391)..(7779)
  CDS (8142)..(8369)
  CDS (9093)..(9228)
  modified_base (1488)..(1587): a, t, c, g, unknown or other
  modified_base (4590)..(4689): a, t, c, g, unknown or other
cactgcctccccagtgacggtggatctcatcatatttgtcgttgtaattggtcctgatagcttccaccagcttagccaaagctcttttgtcttctgagttaacctgtgtgaaggcggcagtggtgcaggtcttcctgtggactgactacacgccccagtcttgccttccccttgataatgcagtaagggaccccccttttatgacacagtgcaggcagggagacaaccagcttgatgggatccacgttgtgtgcaatcaccaccagctgagctttcttgttctctaccaaagtggtgatggtgttaactcctgctcaaaggacagatggtctcttagtggggctgtcccctttgccagcagctttcttcttggcctgggacaaaagcctctgcttcttcacttgctttgtctctggtctgtacttatgagccagtttaagcagctgagtagctgtttggcggtccagggcctgggtaaactggttaattgcaggaggcactttcagcctatagccacttattttaaagatctcacctgaaaagctgaaggcagagaaaaccagtcaggggcagggggtgaggtgagtgctgtgaggctaatatgagtccatttcaagacgtctgctgagctggagttcaagataggtgaggatagtttagggtatactggaaagaagggcatttggtcatggaacttggcttggctactttctaactgcaggaatagggaaagtgacaaaaatttttttttttttggaggcaaagtcttactctgttgctcagattggagtgcagctggagtgcggcagaacactcatagctcattgcagccacgacctcctgggcccaagcgatcctcctgcctcagcctcctgagtagctgggaccacaggcgtgcaccaccatgcccagctaattttttgattttttttgtagagacaaggtctccctgtgttgcccaagctggtcttgaactcctgggctcaagcaatccttcgcctcagcccccaaaagtgctggaattatacgcatgagccactgtgcctggcccgacaaaaccttttttttttttgagacggagtgttgctctgtcgcccaggctggagtgcagtggcatgatcttggctcactgcaagctccgcctcccgggttcacaccattctcctgcctcagcctcctgagtagctgggactacaggcacctgccactgcgcccgccaccacgcccggctaattttttgtatttttagtagagatggggtttcaccgtgttagccaggatggtctcgatctcctgatgttgtgatccacctacctctgcctcctgaaatgctgggattaccggcgtaagccaccccgcccggccctgacaaaacccttttaaggctcactttcttcatctgtaaaatggactccacaatgaacagcagatttcaaagcttcagtgagctcacgcagagagcctggcatactataagcccccacggannnnnnnnnnnnnnnnnnnnnnnnnnnnnnnnnnnnnnnnnnnnnnnnnnnnnnnnnnnnnnnnnnnnnnnnnnnnnnnnnnnnnnnnnnnnnnnnnnnnagcttcagtgagctcacgcagagagcctggcatactataagcccccacggaggctggtttgctcctagtctgcttcctgcaggactccggtgtggagtttaggatctgggtagaagaaatggactgtctcggaatattccccccaaattgctcttctctccaaagcagcactggcaggacctgagcttcacaagccacagggatggctttggggtccagactgagacgggcatgtcccagagtccctctcccagcctccaccattccactttcctgcccggggtccccagggctgcctggcttgtgcctcagccattggatcacagcaaacacacagagaccctgagatagaagagcagggcctggagaggggaaatctgactccagtttcttgcaggccctcaagaactggagcccgtgcagtctggggcctctgctggtggcggttgcggttctccaacctgccaaatgatgagaatcatctggacaccaatgcagttttgaaggccctgtccctggggagtccagttcaaggcagctggggcaggcaggggtttgggtttgtcccggcctccaggcagtttgtctctttgggcaggcttgggagctgctgagagtgggttgaagagctagggctctctggaaccatctggatcccagcaccagcttccccactccacactactggagtggccttaggtaggtgatgtttttaacttctccgggtttcaatttcctccttggaaaatgacagaatgagatttgcagggtaagcatttagccctgggcctggcacaaagtaagcaccaacagatgttaggcaataatccatactgttattccacgcagctgtgggctgcagcagggtgaggagcccatggtgatctgagggtctcgccctcgggtctcttcactgctcaccactggggtgagctctcctctgagtcgcagcaagagggccgggctgcatccctggagtcccagctgccaccatcccgtctgagattcctctcagactcaaagggaataataagtgtgcttctctggtaatttgttgtgcctggcacatagaaatcatccaggaattgttagctaatatcatgtctgtactctttaatggacaaacatttcctggcgcctactctttgccagtcctgaactgggatgggaccacgctacatactggggctctggaaccagcctgcctgggcttgaaaccaagctctgacactgaccagctgtgtgaccctgggcaacgtactccttctttctgggtttaaaatgaatccttcatctgtttcctcacgataacccagaggtataaaaagggattcaatgggttcacttgtaaagagctcagaacagtgcctggcacgcgataaactctgtgagtgataaattaaaggcaggccacaggcccctttctccaggagctcagcctggtaggggagtcggcaaggcttagaggccacaaggctgttgcctgcggcgtagaagcgctgggcctgagctcggaatgcttcccggaggatgcgaggggcgggcgctgcggggaagacggtgctactcccgcgcgggaccgcgtgatgtttccgagtcagcggtgaaacctgcggcttccgcgcgtcctttaaaaatacaggtatttagatacacaccgtggcgtcgacttaaggtgaaatctaaacaaaatgaaaggacgggagctattctgatttggccgaacctgtgcctgcgggctgggaatgacccaaggaaacgaagggacggcggagccagtgcggcgggggccgggtgggaggcggtggcctcgtgctggggacccccagccccggctcgcctttgccgggaaccaccaagctaatttttttccctttcttttttaaataaacctaccttccttcccccattttttccttttaatatcgctgtttatctccattttttttaactgcggcgtgttcttgttcgattttaaaaaatactaaaaataaaatgagtcccctaggtgcctccctggcgccctaggcatggagagctcatgcctgcgccaccctcatctccgctggctttgccacctcggaggcgccccacacttctcctttgttttgcttttctctgagccggttgagttttcttaccctgaatgcgtcgtttatacaattagcaactgaacacagaacaaatatcaccgatataattggggtgggggtcgccatgtaaacacggggtgttgttactttaggatacttctgaccctgtcccggcctgagtcctcgctccctgactcagcatccacgcaggaaagcctcgccccagccaggcaagggcagtccctgccggctccttgagttctgccgtctacagcttgccccatcatgagcctggatgtgaggcctgagatcctcaccccactggcaagagtctgggttctgctcagcgcggcctggagccattctgtctgcatctttactggagagacatccacagtgtggcgggctctggcttcaggaacactctccccagtatgtgtcctgtgtgtttcccagctcccgttcccgcttagagactggatgatcttgaccacccacgtaacctcctcagtttcccggtctgcaaatgaagatgggttcggtgagagaactcctgtatacacttagctggggttgctggcatttggtgagccctggcagatgccagccagccgttgttagcctttgtgagcgccttgggaaagctgcaggagatcctgggtcactcagctggtcccccaagggagagtatgacacataaagagggaagtatcatggagaaatcctcgtggtataacgttaagtgaaataaatattgtttctaatgctactgcagacacctgtaaggtgaaaaaggcccacaggagtgcgggacggaggccacagcgatctggttaagagcaatacgggtcatttcggatagaagaatttcccagttgtgtgagttaggcctgctggggctgtgggctgnnnnnnnnnnnnnnnnnnnnnnnnnnnnnnnnnnnnnnnnnnnnnnnnnnnnnnnnnnnnnnnnnnnnnnnnnnnnnnnnnnnnnnnnnnnnnnnnnnnntggtctggcaactggaggagcctcagtgtgtccctccgtaagactgagacaggaacatgttaaagactcgcagcagggtcacaggcccaggaggtggaatgccagggctgagctgatcatccggctcccactcctgatggctctctctagctgccagctggcccagaccttcaggtcccttcttctactcagccaagccttgagcacagccctttcctcttccttcccacagcacagcccagaaccctgtgatggtagactgcctgcactccactgcccttgtatcctactgtgtccagtggtaacactgggtatagacagtggttgtacttagaacctcctggcatcctcccctcttccacgggcgtgtggcacttacccagagagacaccacaggcgctggcggggctgcatggttcctggtgaggcagtaggacagctcctggttgtgccaggccagcctggcgacccttactgggagtcaggggaacattgagaagcactcggttcctggctgccacaagcaatgctttggctgtgtcagggagctctcagccggatgccccaatgccccaggcctccaactcagtgcttcctgggcaaaatatcagaaaaacccatatccagtgagaaaacaaatcctcaactccctctggctttggtcccttttaaagacgtatcttaaaaagatcctgggtcagttcctcaggctctggggctggtgatagaggagctggaggtccggtcccagcacctgctgactggcgatcctggatgcgagcaaggtgtgtttgttatcctcattttacagacaaacaagagcaaccaccgccgccgccgccaccaccaccaccgccaccaccaccaccgaggcatgcagtgggcaagtcccataacaagcagggtttaaacttgatttcgctgagcctcagttttctcatctataaaatcaggacactagtaacatttgttggtcagaactatggtgaaattaaatgccctaaggaaaggacatcagtaaggttagggcttaggggctcccttgaccatgtgaatttatggggcctcaccacagctggaggtgagcaccatccgcaggacacctctctggggtccagcctcggcactcagtcccacgggcagctgatgaggccccgacgtggcatctgggggcatctgaggagcctgagaacgcttgccaagggcttgggttcttggcttttccatctggaaacaggctaaggagttcttttaagtgggatgatcacggtgctctccagctacagagggcccaggttcttttgctgtccatttaatgcccagtgcctggaaccgtgcctggcacacattaggattcaaggaggggagcttgggagcacagggaaggcggtctctgaagtgaggcatcctgaatttaaccagagttcgactagtactggctatttgctcgcaggtaagtcattaaacctctccgggcctcagcttctaaactttaggatttttttttttttggattattgaggattatatgagacaatctcagaaagtgcccgacacggaaccagtatggttccagcaagggttaggttttattagtatcaatgttatcaatttgctcagggaatgcctgtgcctgagatctgagaccagtcccgggcggccacctctctcctgcttctgaagcgccgcaagctgaaagaagcacacgtgcggggtcaacgcactctctttaatgggaaggggatcgtcatttcttacagcaataggtaaaaacataaatacgggtgggtgcgtgggcgggcgacggcgagatagcaaaggcccgggcgcccggccctggctcgcggaatgggcggccagatctcaggccctgcgtgcccgagctcagtcccagttccaaccgggggtgcccatggactctcggagggcactcctggggggacagctaagacaccaggctgcaggatcactcattgcacgctgcataatcgccgccacaaactctcccgtgcgcaagaacaaacgcgcgtgggacagaaaaagttcctaggtctccgcaggagtgaatgcaaaatccaggggactcagggtcatgttgggagccccttctccccccgagagtcagggagctgttgaggtgggatcggtcagggtcgcgccacgcgggtcccttccctaccaggctcggataccatgcagcgtggacactcccgagttgctctgcggaatcccggggctctgaaccgcattcaagtccccgacgccgaagttcacgaagttgttgttggcggcggcagtggccggctgcgctggggaaggcccggcggggtaagcggcagtgcagctgtagccagggctgcaggccgcgccgccgtaacccggataggcggggtaggcgttataaccgtagggattgaggcccacgccgtaggcaggcgcgtagggcgccgagtcccctaggcatggcttgccatcgcgcaccagcactggcaccgcgatcctgcgggcaggcggcggcggcggcgggggcagccccaccagctccagagtctggtcctgccgctgccgcttgcacttgtagcgccggttctggaaccagatcttgacctgcgtggacgtgagtttcagcacgctggccagctggtcgcgttcgggggccgacaggtaccgctgctgcttgaagcgccgctccagctcatagacctgcgcctgcgagaagagcacgcgcggcttcctccgccgtcgcgcccggggccgctccgcgttgtccgcctctgtcttctccagctccaccgccttctgcagcgcgcacagctctgagggggaacagagaggcagagagacgcttggtaagagcggcttgacctacggagcgcggccgcacagtaatggtaagggatcctcgtggaggccactgtgtcctgcctggagcgcccagctggctgcggctcactctgccaagtgcactgggagccaccgacacgtctcactcagcatttgtagaaagtcaggctggctcaaggcgctggagaacaaaacgggaggtctctgccctcggggcagttcacaccctggtgagggagacagacggtgacttaaaatttcaggctgcaaaaaaaaaaaaaataaataaaaaaataaaaaaataaaaataaaaccaggtgatgctctggggtgaactgaattagggctagtttggtttgagaagttaaatgaacagaggccgaggcctcactgctagggacggtcttatctcaaaattaaggaatcaagaaacagaaggccagggagtgttggtttggtgatcggaggctccagcctggccgcagcagggtttgcgcagtgtccaagaagctgcgggtgggcaggcggcctcggaacctgccttgctggcttcctcgaattggtagcgatcagttctagccgccgtgcccgcccgaatttgttcccaggcctctgctcctcaacaaacctatgaattctctcccggctggcagcggcccttcgcccagcgcttcgcccagcgcctgcggcctcccgggaatcgcccgggctcctgccttgggctggggggtctcccagaaggcccctttctgcagcggggccggcctccctccccgatcctgggatggcctgcgggatgatcccgcactcatctcgtccactcccttgtgcccgcggtagcgcagcatttcctaacttttccacgagggaacctctccgccctggccgcgccggcaagttgtgctgaaaaaataaagtgaagtcagattcctgagggtccgcagtatcccattttaaaatcaaggccctcgatcccagactccactttcctggcgcaaagaaagaaaggcaccagaaacccgggtcgtgggtgggctgcagaaagaaggtccaggaccctcctccgattgtacgcaaaagctgtctggtgagcaacatttcaatttctgtttagcggttctcatcagatctttaaaaagattcgtaaatccaaaggagatttaaaaacagagattatctgcttgtctctctgttctgtctaccataaaccgatttctcaacttcctaccagacccaggagcagagccgaagccgcccggggctttgttaggccggggggaaacgttttttggtctcttgcttctgatcctttcaatccggcatttcctctgaacctccgattggacgcggggcgcgggagcctggcgacaacaccaggcatcttacattctgaaccccccgccgcagcccagccctcggcccaagggcgcgtgtctcctcctcctggccctgagtttcttggggacgaaagcgacccaggaggggagaagggggcctgtgtttcctcctcacctttcttttcggctctagggtccttggctgggtcggggtcgctgtaggcacgtggatagaaggcgggggcggcgggaaaggcagacgcacacttggccggtgaaggcgcgcggcccagctctgcgcgcagctctgggaggcccggcgcagccgcctcgggcccagcgtaggcctctggcttgaaggcggccagcatgcaggaggagggcgccagggtcgcctccaggcgggcagagagctctccggcggcagccaggctgcgctgctgctgttccaggtttaggatgtctttgactgagaagggcgtgggcgtgagagcagggctggggaacatggtggcagcgccagtctcacagcgccaggtgggcggcagaaagcggcgc

SEQ ID NO: 1424 - protein, 605 aa, Homo sapiens
MTQCRQGDNQLDGIHVVCNHHQLSFLVLYQSEALGLSSECFPEDARGGRCGEDGATPARDRVMFPNKQEQPPPPPPPPPPPPPPPRHAVGKSHNKQGLNLISLSLSFLIYKIRTLVTFVGQNYAIGKNINTGGCVGGRRRDSKGPGARPWLAEWAARSQALRARAQSQFQPGVPMDSRRALLGGQLRHQAAGSLIARCIIAATNSPVRKNKRAWDRKSSDTMQRGHSRVALRNPGALNRIQVPDAEVHEVVVGGGSGRLRWGRPGGVSGSAAVARAAGRAAVTRIGGAWLAIAHQHWHRDPAGRRRRRRGQPHQLQSLVLPLPLALVAPVLEPDLDLRGREFQHAGQLVAFGGRQTCACEKSTRGFLRRRARGRSALSASVFSSSTAFCSAHSSEGEQRGRETLGKSGLTYGARPHSNGKGSSWRPLCPAWSAQLAAAHSAKCTGSHRHVSLSICRKSGWLKALENKTGGLCPRGSSHPGEGDRRPLLLNKPMNSLPAGSGPSPSASPSACGLPGIARAPALGWGVSQKAPFCSGAGLPPRSWDGLRDDPALISSTPLCPRHVDRRRGRRERQTHTWPVKARGPALRAALGGPAQPPRAQRRPLA

SEQ ID NO: 1425 - DNA, 1383 bp, Homo sapiens
  source
  (1)..(1383)
  CDS (201)..(386)
  CDS (512)..(1183)
  modified_base (1290)..(1383): a, t, c, g, unknown or other
ggtcgctgttaccgagcggctggttatgtgtgaaaacttcagtaattgccatgatagcctcttaaacgggggtgtttaacaaatcgtcagcggcatcagaagatgcgctacctgcttggagtgcaccgggtgctgtttccatcaaacgatccagcgccgtatcggtacgcatctgggcactttgcggtgcagcagccagaatgcgctgtgcgctctctaccgtcatacccggcgtttcggccagtgctcgcgcctgtgactcacgccctttagcctcgtcgcagttcaggatgcccatgatgcgactattctctgcagctactgctgcagtaacctgcgcactgacatctacaggggctgctacggaagcaattgtcgtgtcaacggtagtggcctgttcagctgatgcagttgtctgagttgctgcctggtcaactggcttagtggtcacagctgatgcagaaggtgatggcatagttcctccaagggttgtttttttgcgtctgtcgagtgcttcgcgcatcacgccgagcgcatcggtattgttaacaagttcatccgccagcccgttatccaaagattcctggccggagaatactgccgcttcggtgtccagcacgtcctgaacagacatgccggtataagcggaaaccttttcggcaaacatctgacgagtggcatcgatacgcgtctggaaatcagcacgcacatctttcggaagcttttcgtaagggttgccgtcgaccttgcgatcgccgctgtaaatcagcgtgacctcaacgccgttagttttgagcgcagcgccatagttactgtgcgccatcatgaccccaatggagccggttctggccgtttgtgtgaccagccgtcgcgatgccgaactggcaataagctgacctgcactgcagttcatgtcattggccagcgcccagatgggtttgatatcgcgcatacgggcaataatgtcggcgcagtcaaacgccccggacaccattccacccggcgtatccatatccagaagaatgccgtcaacgccggggtcactgattgcctgctgcaggcgagcaatgatcccgttgtaacccgtcatcccggaataaggctgaagcgcacgggttttactgaccagcgtgccggaaaccggcaagaccgcgataccatttgccacctgatagctgcgtgatggacggggatccatgtcatcatcctcaccaaacagcgccagcggttcggctatttgtccggcatcaagcgtgatgccagagacggtatctgtcagccgggtgatgnnnnnnnnnnnnnnnnnnnnnnnnnnnnnnnnnnnnnnnnnnnnnnnnnnnnnnnnnnnnnnnnnnnnnnnnnnnnnnnnnnnnnnnnnnnnnn

SEQ ID NO: 1426 - protein, 285 aa, Homo sapiens
MRCALSTVIPGVSASARACDSRPLASSQFRMPMMRLFSAATAAVTCALTSTGAATEAIVVSTCFAHHAERIGIVNKFIRQPVIQRFLAGEYCRFGVQHVLNRHAGISGNLFGKHLTSGIDTRLEISTHIFRKLFVRVAVDLAIAAVNQRDLNAVSFERSAIVTVRHHDPNGAGSGRLCDQPSRCRTGNKLTCTAVHVIGQRPDGFDIAHTGNNVGAVKRPGHHSTRRIHIQKNAVNAGVTDCLLQASNDPVVTRHPGIRLKRTGFTDQRAGNRQDRDTICHLIAA

SEQ ID NO: 1427 - DNA, 2149 bp, Homo sapiens
  source
  (1)..(2149)
  CDS (201)..(236)
  CDS (1218)..(1410)
  CDS (1438)..(1949)
ttggtctctggaactagacactcactctctggtctcttcccccacttccccttcactcctttactagccctctgtcaccatttcagatggccacccctaatgcagagacttctggacatttatttagtttcttctccacagaaataaacttctagagcctggagcaaaatagtggctgcgccatttgtgtgtcagatgagatgaccctggctcgggccatggaggtggcaattgaggtgtgagaaatggtcagatttaggataaattttgaagaaagagtcagtagaatttctgatggattggattagggtgtcaaagagcattccaaaatgaccccgattttgatttttacttattttaaaaagaaaacctataatagaacattggagagccagtattgaccttttcaaataaaaacaaaattattcaaaagctttttcttactagtactattcaaatcgggtaccctatgtggtaccaatattatattctaggaaatactgacggttttggaaatttggaggaaaaagcatcgagaagagctccaattacttagaaaagagagtccaggagatggggtggtgtatataagcctatggatggtgtctctgcaactcagtggccccgcctgtccaggggctgggtccccacgggatctccctccccacaaggaggtggagaggctatgtgtcttgaacaactggggttgcgatccagtgtatgggcagtcccactcctggaactccagggtgggcactcgctccatttccacaggccctcaagggttccaggattgccccgtgggaggggttttagtgctgcatctagtaagaagctgtaagatgctcagaaacatgttttgaagctactttgcacagaaagaagactcttcattcagatttgtattacagatcaataaaagtagctaagtcgtatctgaagatgtttttgtttacactttgtatgtgacagaaaacctccagttgtctgtgtcaaggacaattacttaattttattacaatgtatactgatttggttagtggaagcttctagcgcctactgtggtggtggtgggagctatctgattcccattcccaggcctggccatcgacgcgaaggcctccagctgatcggaagtcggcgttggccggcgcggagcccggcgcggaggcttctttcagccgcccgggcaagacacccctccctcggtcccgcagcggtcactccgcctctggcgcgcatgcgccgaccccagcgggcgtcctcccgggctccctctccctccctccctcatccgggtcctgggcgagcgggcgccgtgcgcgtgtcccgcggccgagctgctaataaagttgcagcgaggagaagcgcagcgacggcgtcgggagagcgcgcctagccggctcgcgagtgagtgagggtccccggcgcgcgcgggcgaggggaactgggggctgcaggctctgccccggcggactcgggccgaggcgggggcgttcggccgcggacggagcggaaacgacccagggcctgtcgggcgggaggtaggccgagtcctggcctgccggggtcccggctggcggacacggtgcggcccagcggctgcggaggcctcgctggctgcccggggcgtcctgaggcggggccggggctggccctcgtcccagccccgctgttaccgcccagactttggagggaggcgtctgggacgccctggaggggaccccctgaccccgcgctgtcctggggagcggtttgctttcctaactcatcggatgtaccaccctggatacacacccttgataggactgcggtgctcggccgggcagcctgggctgctgcactgcgaagctgtccaatggcttgatgaatccgtgccgccgtcgctttgtgtttcaaagataaggatccgcgcttatcggtgggaattacactctgggcagttgtgaccggctactgcaatcagctggtagttagacctggtttctgccacttgccatgtcagttttcaccactgcaaggatttcttctacttcatgtaaacttctctgtgctgcaaagagaatgccaaagcagcgtctttttgccttcaccatattcagccgctggccgggtcctatacttcaatatcagggctcaaattaatatt

SEQ ID NO: 1428 - protein, 246 aa, Homo sapiens
MTLARAMEVAIERSLRLWRACADPSGRPPGLPLPPSLIRVLGERAPCACPAAELLIKLQRGEAQRRRRESAPSRLASEGNWGLQALPRRTRAEAGAFGRGRSGNDPGPVGREVGRVLACRGPGWRTRCGPAAAEASLAARGVLRRGRGWPSSQPRCYRPDFGGRRLGRPGGDPLTPRCPGERFAFLTHRMYHPGYTPLIGLRCSAGQPGLLHCEAVQWLDESVPPSLCVSKIRIRAYRWELHSGQL

SEQ ID NO: 1429 - DNA, 910 bp, Homo sapiens
  source
  (1)..(910)
  CDS (201)..(710)
tccccagccataagcaaacgggggatgtttccacacggggcccagtgttagtcacattatttctgcctccatataacttaagggtacaactaagaactgcaactcttgattaaaatgacacacattccagacttctgagaagctttcctacagaagaattcctgcatggcatatgggaaattggatttgaggtcatctaaatgattcctttcctacatggagagtctattgttttattactcaggcagcgagcttcttcagaactccttgtcataggaattcaagaatacctatgtgggtatcaacagcactctttggagaagcagacacagaaagatatgcacaacataggaatgactcttttttttttttttttttttttttttttttccagagagagagtgagtctggctctgttgcccaggctggagtgcagtggtgtgatcatagctcactgcagtctcaacttcatgggctcaagcaatcctcccacctcagcctcccaagtagctgggagtacaggtgcacaccgccatgcttggctaattttttacattttgttttgttttgttttttgtttttgtttttgttttaagatggagtctcactctgttgcccaggctggagtgcagtggcgcaatctcggctcactgcaacttctgcctcccgggttcaggcgattctcctgcctcagccccccaagtagctagacctggctatttttttttttttttttttgtatttttagtagagacagggtttcactatgttggccaggttggtctcgaactcctgacctcaagtgatcctcctacctcagcctcccaaagtgctgggattacaggcatgagacaccacgcccggcctaatttttcaatttttagcagggacagagcttttgctatgttgc

SEQ ID NO: 1430 - protein, 169 aa, Homo sapiens [sequence omitted]

SEQ ID NO: 1431 - DNA, 871 bp, Homo sapiens
  source
  (1)..(871)
  CDS (201)..(671)
tttagctgcattagacttcaaagcgtttagaccagtttctccatcttacggagcggtgaacgggctcaggaatgtggagcgtttcctggcgtcaagcaggtcaaagtcagcgctgctttttttacagacactgcttttcttacagtcttcggttagttcagattgtatacctctcctgaagatgtcacccaaaacctcctatgggattctgccgtgatcatctctccactcatcccacaccaacgccaaagagatcttttaaaatgaacttccatcaggtcacttcccagggcccatcattgcgtgttcttttcctgattcattcgaatgcacccgtcctcctgatcaatttttattccacagggtgttgttttgttttgttttgttttgtttttttgagacggagtcttgctctgtcgcccaggctggagtgcaatggcgggatctcggctcactgcaagctccgcctcccaggttcacgccattctcctgcctcagcctccccagcagctgggactacaggcgcacaccgccacacccggctattttttttttttttgagacgcagtctcgctctgtcgcccaggctggagtgcagtggcgcgatctctgctcactgcaagtccgcctcccgggttcacgccattctcccgcctcagcctcccgagtagctgggactacaggcgcctgccaccacgcccggctaattttttgtatttttagtagagacggggtttcaccgtgttagccaggatggtctcgatttcctgacttcctgatccgcacgcctaagcctccgacagtgctgggattacaggcgtgagccaccgcgcccggcctgttttgttgtttttttttttgacactcgctc

SEQ ID NO: 1432 - protein, 156 aa, Homo sapiens
MGFCRDHLSTHPTPTPKRSFKMNFHQVTSQGPSLRVLFLIHSNAPVLLINFYSTGCCFVLFCFVFLRRSLALSPRLECNGGISAHCKLRLPGSRHSPASASPAAGTTGAHRHTRLFFFFLRRSLALSPRLECSGAISAHCKSASRVHAILPPQPPE

SEQ ID NO: 1433 - DNA, 1036 bp, Homo sapiens
  source
  (1)..(1036)
  CDS (201)..(836)
agagatctgttttccaattatgaagccggtcggtttggtcagactcccgacacccacgtcccaggtacccggtgggaaagtggcagtgcgagggcgcagccattggtggttgcagggccccagagggctggggtgacctggcatcccggggctccccacgggctggatgacggggttggcactgtggcgtccaggaggagatgcctggttctgcccaaaataatccaaagagccgtttcctcctcgcccttcagtttttgcctgaggtgctgggtagcccatcctttcctctgtcccagattcaaatgaggagtaagagcccagacgagaggaaggcaggctggatctttgccttgagagctccgtgtcaccaggatggaagggggtgcctctcggaggagcctgtgtccacctccagtctcggctttccccggggggccaagcgcactgggctgccgtctgtccccagctcccgtggccacacagctatctggaggctttgcagggagtcgtgggttctcgcacctgctcagccctgtgtcggcttcctgtgtgctcacctaaagctgtggttttgctgtgttcacttcgatttttctggtctgtggagaaactgtgaattggagaaatggagctctgtggcttcccacccaaaccttctcagtccagctggaggctggagggagacacaggccccacccagcagactgaggggcagaggcacaggtgggagggcagcggagatcagcgtggacaggagcgatgcactttgtagatgctgtggctttgtgttgcgttttgtgtctctgttgcacagatctgttttttcacactgatccgtattcccctgggtgtgcacacagggcgggtgtggggcatttaggccatgctgtgctctacttcattgagtaaaatcgagtgagaggttccgggcagcaggatcgacgcccagtccagccggcagagggaacacacgggtccttcattgtcctgtaagggtgttgaagatgctccctggcggcccccaagcagacta

SEQ ID NO: 1434 - protein, 211 aa, Homo sapiens [sequence omitted]

SEQ ID NO: 1435 - DNA, 7513 bp, Homo sapiens
  source
  (1)..(7513)
  CDS (201)..(364)
  CDS (4230)..(4434)
  CDS (6642)..(7313)
catttctccaagttgggatgcaggcttcccatgccactccgaaggctgtgaaatgtctcttcaatgcattccttgacaccttggccagccggggtgaagggacagtgggcaaagggctccagccagggaccatggcccacgctgagatggggctgtcttgctcgccactgaggtcagcttagggatgcattgggactctgatggccgggactttagtggcggggtatggcctggcctttcagttgtctctcccaaggcacatatgtccctccctgtctggcctgcaggaactgggggtctattttggggagtgcagtgccgccttgggtcacaacatcctggagcctgtagtaaacctggccaggtaagtgctgcccgccccccgccgcccccacccaccccttgcagaatcctctgggacagctccggccccactcttgactcccaggtgggacaggaaggcccattctgaggaaatgggtcagggaagcacctagttaaagacctgggctcaccagtctgaggggagagagagccctgcactgagagtctcctgactccagctctgcccttcccgttcgctgaatcactccccacaggcacttaggctctctgagcctcagttttttcatttgcaaagagggctgagaaaaggagtgtctctcttctgctcccaaacttccagtagcttccattaaaatccaaatgctttgcaatggcctgcagcatctctagtgccatctcccccacccctacacacacacacattcactcacacccacacacactcacactcttacacacatacactcacactcacacacacacacttgccaagttccagccactcagagactccctccctgatcacccacctgccatcactattttggatcacagcccctgtttgtgtccttcatggcccttcttgacacgacacatattaatgatatatgcatttatctgttttcttgttgtccaggaaggcagggccatgtctgttttgttcagcccctctccccatacctgggacctaggtgctccataaatgaataaaatgagtaaggcatgaggggagctagatcagatgagcaccatctggcacacagtaaatatatcacgaagaaatgaatggacttcttttgcttccccagcctccaagctctctcggcactgagccgcgccatagccctctgcttgggatgcacctcccccaccctttctgctggcataccttgtccatggctcagttcggtcaccatctccttcctccccagatccctccaggacctggtgtgaagtccctgtgtgcctccccatcattcccgggctgcagtcaccccttttcctgtctgtctctctcactactcaagggagggaatggtggcttctttgtcatagtcagagtcctgcacagtgcctggcacatagtaggccagaaagagaaggtcaaagtctcagtgactcaattcttcgggtctcatgtggaatgcagggcaggggcagagctgttgtgggggttgtgggtgcggcctcccaccccccagctgcacccatgggcccatccgtgctgcccgtaggaggtgagagagaggcctgatgcctggcactgtcacataggtcactcaggatgcaagaagaaggcctgaaggactcgctggtgaaggtggcccccaagaggccgcccaagagattcggctgttgctcctgatcacctgtcctgtcctgggtaggatggacacccatggggtttcctgtccctcagctcctgtcctttgttcctggacagcaacgacacagaggaccagcttggaggttcaggaaaacccttctcaactcaggactcggatcccagagcagggccgcatcacctctgcctttcacactccaaaggagggctttgctgagtgaacaaggcttgaggggcaggggtatggcaaaactctccaaacaaagaaagtctagaaaaacgacttaaggaaaatacaccaaaatattggccgcacatctgtgggtgtaaaattttagggagaatgtggggggggtggggtgttactttccattttacacatatttgtattttcagattttcaacaataacagtattcaatacataatcagaaaaaagagatgtggaggaggaggagagaaacttcccaaggagctcccttgggtgctgctggctcctaattagtgtaacctgttaatcacatgttgctcggtgttagagcggtccctctgtgctctgcctggcagggcgctgttggcctggtctccctcactatttctatttgcaagcatgggctttctttccagcagaatctggttcctgggaagagtaatgttccaaaggcctctgatatgcctcgatgccctcctgtcttccagagccccaacctcactccctttccccaccatacaaaacacacctcccaggggtcacatttgggggtcccgccccctgctccaatgccatggtgtccccaagcacagggctttggcctgagttgtcagtctctggatgcatttgaggggcagctagggtgtggctggggggtccaagcagctggggagccgagactcagaatcattcacacacttctatttggagcttttgtggaagtttccagaattccataatattcacctcctgaatggtggctgccccttatcagccagggctggggtttccagtgccctcggagagcttgctttagagtcttggagagacggccatggtctgcgtttgtatgtctgtcacatcttaccatcatcacaaattgaatatacaacatgtgccaggcactgaatttgtttgtttgttttttgagacaggatctctctctgttgcacaggctggagtacattggcatgatcgccactcacaacagcctcaactgtctgggctcaagtgattcccccacctcagcctcccaagtagctgggaccatgggcacatgccaccacatccggctaattttttagctatttgcaaacacaaggtcttgcaatgttgcttaggctggtctcaaactcctgggctcaagtgatcctcccaatgtgctgggatgacaggcgtgagccaccgcccccagcctgggtttggtattttgtaatccttcaggtactggggaatttcctggctgaatcaatggaaaccccagtttcatagggggacaagcaaagacagttcaaggaacagagttacagagagagagaacgaaggagaaagagggagcaacagagggctgttgcatcacacagtcttagaccctggccccaacccctcttctcagttctgaaaggaacgtctcagcagcagtgagccttccatcaccagaggcgcacaagaagacaggtaatgcttggcaaaggtgaggtagagaagatcccagcatctgaagctgccaaagttggattagattcccttaatggaccccattcaacctccagactccatgtggatgattcccatggtccagctgattctttgtgtgtttttgttttgttttgttttgttttgtttttttgagacggagtctcactcagtcgctaggctggagcacaggggcgcaatctcggctcactgcaacctccacctcccgggttcacgccattctcctgcctcagcctcccaagtagctgggcctacaggcgcccgccacctcacccagctaattttttgtatttttagtagagacggggtttcaccatgttggtcaggatggtctcgatctcttgacctcgtaatccacccgcctcggcctcccagagtgctgggattacaggcatgagccaccacgcccggccctccagctgattcttttactgggcccttcactgatcctttttaccccaacgtcttctcccatctcaggtcccctcccgcagcccacaagcctgcccctgaactgagcagtttctcagtgtgctcagagagagagagagagagagagagagagagagagagagagagagagagaggtgtgggctgcagtgagtgatgctggccctggataaggatgggaaacaggtcctatagttgctaatggctctttctctggggcccagggacctggcaggcaccaacatctctgtcctgtgggccagggagttaatgaggcaggtaggcagggtgtgattcctgggagaggcagtagagcagacagcccctgtcgtttgggggcccggtacgggagtggcccccaagcctccccgtctcagctcagctctgttctggcctcaggcaactcaggttcgcaggaggtggagttctgggaggaactccacactgcccagcaccctcttttggctttcttgggccggatccacctgctgggcagggcacagctgtgcaaggaccaccagcctttcctgctgtcaaagggctcacaagccagggaacaggacccaggaacctcagagcagcacaaagtaggcaacgacagcagcaggagaaacttgaggtagacttcagagtgaacttccaggcaagtggtgagttcttggggcatgtcagccaaggaggctctgatttaggcttagccagagtctgattaagaaaaggagggtgggactgggctgatgggactcaggctgtggagtgagaagggagggcatggggagagaaggaaggctgggcaggagctctaagagaagagggcttttgggaactgagggtgagcaggggcagaatgacatccctcctttacccagtgcctaccgtatgccaggcactgttctgagcacctagctcgtgttaattcatttagccctcacaccatcaggcgtgctcccccatcttacggaaaaggaaagtactgcatagggaggctgagtaacttccccgtagtcacgtagcaagtaagtgctggagccagtgttaaacgcaaacgccgatacccatagacttaactctgaagttctgcaactgcttacaggaagatgcggatgcttcggggaaggaggggccaggtccctgaagcctcgtattgctccctgccaattcctctccagtaatagtccatgtcattggtgggtgtggaccaggaaaaagagacgaaaaggcagtgataaatgccaggaaagtggctggatgacagccttcatccaggacaggtccttcatttcccctcctcctgccgtctctgaagctggtgggacccgggaaggtggccgacatcagaattcacagaggccccctctccagtctcccctcagctgccctcaggcacgttgctgccctggggccccagagacgaagccaagttccccaggctggggctctgcaggagggactcagagactccttcaaacctggctttgagcccgcaggagaagagtgtctccagcccccaccccggtgtggtagaaaaggggagggcaactccagtaaggactcctctgctatgtcttgtttgctgctggattccgggaacctggtccagagcaaatgctcaggaaatatgtactgagttagcaggcaagcctccagctaaagctcccgggccctggcctggcctgcagggcggccaatggtgacatcagccactgggctggctctaggatgtctacatcccatcttgtagccagagtcctcccaatcggggactccccctgcccttgacatgtgggacagagtgggggtgagaagaaaggtctgaccactgggtgcagactcccccactctgccaggggcctgcacagcataacctagagggcaatgattcccaggctggtctgcccttagaattatttgggatctttcaaaaatgctaaagcccagaccaactatgtcatgtctctgggggtgggacccaggcttctgtatttgtgaaactcctcaggtgatcccaaagtgcagagaagcttgggaaccactggaaggggcttcacaccttctcaaagccctttcagacccacttttccatttgaacctcaaattaaacctgcttgtttcacagggcagggtttttgttttgtcaaaaaatagatacatatgtgtgtgtgtatgtatgcacatatatatttatcagattatgaaaacagtgtgtactccctgcagaaattttagaaataaattttaaagaagaaaatgaaaattaccctagtcttaccacttatgatagttactattgacatctgttttattttatttccttgctttcttacagctgaggaaactgaggtagagaaacattaagtaactctcccaggggccaggtgcggtggcgcctgtaatcccagcactttgggaggccgaggcatgagaatcgcttgaacctaggaggcggaggttgcagtgagtcaagatctcactccagcctgggtgatagagtgagattctgtttctaaaaaaataaataaataaataaatcccagggtactggagctagcaagcagcagaggcaggatttgaacccagggtactaatggagtccatcccatggggttgtcatgaggtctgcaggggctaatgtgtgccaaggacaggccttatctgggcccactacatgcagggggtctgtgaaaaaaggaggcttagcaggaatggggaaggcggcctttggggctggctggtttctactttgtccttgtgtgtttgaaacagaatggagcccaatgctacgttcaccacgcagctcacggccacacctgagcgactgctccgactcatctctgctggggtctgtggcctcatcctgctggtggggctgtcagctaatgggctcatgctgctggtggtgggccggggcccgggctccccccacccgctccactccctgacccacagcctcatgatgaacatcacgccatctgacctgctcttcctggcctgcgtggtgcctgtgctgctgctgagcttcctgcagcacaactggtggctgggccctgccatctgcaccattagccaggccaccaacacagccaccacgttctgcatcttctatagcatggtggccacagctctcctgcgccatgtggctgtggcccggcctgacctggccttcccagccggctggggcaccctcttgctgctctgtggggccatgtgggccctgggccttacagaatccctgcccaactggctgttccagagggtggcagtggaggaggagacagcgggggctcccaagacccaggcctgcctcttgctcctgagccctgctgggacctcctgctacatcagcctgctgggagccctggccttcctgccatgcacgctggggctgggctgctctttcagccacgtgggctggctcctgtggacccagccccaaggtcccatgggagagagcatccaggagcattaagagaacatagggctcagccttgtggtgctggtggtttttgtgctgatgtgggggccctgctccatgctgggttatgtggcagccatgggctacctgcctgccacaccggctgcttttgtggcctccagcctctgcaccatcctggcctactccaattgcgctgtcagccctatcctctgcttctacctctcccgcccctt

SEQ ID NO: 1436 - protein, 346 aa, Homo sapiens
MAGTLVAGYGLAFQLSLPRHICPSLSGLQELGVYFGECSAALGHNILEPVVNLASSVLASGNSGSQEVEFWEELHTAQHPLLAFLGRIHLLGRAQLCKDHQPFLLSKGSQAREQDPGTSEQHKLTATPERLLRLISAGVCGLILLVGLSANGLMLLVVGRGPGSPHPLHSLTHSLMMNITPSDLLFLACVVPVLLLSFLQHNWWLGPAICTISQATNTATTFCIFYSMVATALLRHVAVARPDLAFPAGWGTLLLLCGAMWALGLTESLPNWLFQRVAVEEETAGAPKTQACLLLLSPAGTSCYISLLGALAFLPCTLGLGCSFSHVGWLLWTQPQGPMGESIQEH

SEQ ID NO: 1437 - DNA, 1390 bp, Homo sapiens
  source
  (1)..(1390)
  CDS (201)..(1190)
gatggtagtgatggtaataggggtgatagtggtgatgtggtaatgatggtggtggtggcagtggcggcggtggtggtgataatgatagtggtaacaatggtggtggtgatggtggtaatactggtgatggaggtggtcgtggtgatgatggtggcagtagtgatggtggtagtgatagtgacagggtggtggtggtggtgatggtgataggggtggatagtagtggtgaaggtggtggtgatgatgacagtggtggtgacagtggtggtggtgatgttagtgatagtggtgatggtgatgggggtggtagtggtgatggtggtagtagtagtggtggtggtggtgatggcagtgacgggggtggtggtgggggcagtggtattggtggtggtggtgaaggtggtggtggtgacggtgatgatgatggtagtgatagtggtgatggtggtggtgatgatggtgatggggtagtagtggtgttggtggtagtggtggtggtgatggcagtgatgggggtggtggtagtcgtggtggtggtgacagtggtagtagtgatggtggtagtgatgggggtggtagtgatggtggtgctggtggtagtgataggggtggtagtgatggtgatggtgatagtggtgatggcagtggtagtgatggtggtgatagtgatggtgatagcagtggtggcagtggtggtgatagtgatggtgatggtggtggtggtgatggtgatagtaatggtgatggcaatgaaggtgatggtgatggtgatggtgatagtgatggtgatggtggtggtggtgatggtgatagtaatggtgatggcaatgaaggtgatggtgatggtgatcagtgatggtggtgatggtgatggcagtggtggcagtggtggtggtggtgataatgatggtcatggtagtggtggtgatggtgatagtgatggtgatggcagtggtggcagtggtggtgatagtgatggtcatggcagtggtggtgatggtgatagtgatggtgatggcagtggtggcagtggtggtgatggtaatagtgatggtgatggcagtgatagtgatagtgatggtgatggcagtggtggtggtggtgatagtgatggtgatggcagtggtggtggtggtgatagtgatggtgatggcaatggtggtgatggtgatggtgatggtgatcagtgatggtggtggtgatggcaatggtggcagtggtggtgatggtgatagcgatggtgatggcagtggtggtgatagtgatagtgatggtcatggcagtggtggtgatggtgatagtgatggtcatggcagtggtggtgatggtgatagtgatggtcatggcagtggtggtgatggtgatagtgatggtcatggcagtggtggtg

SEQ ID NO: 1438 - protein, 329 aa, Homo sapiens
MVIGVDSSGEGGGDDDSGGDSGGGDVSDSGDGDGGGSGDGGSSSGGGGDGSDGGGGGGSGIGGGGEGGGGDGDDDGSDSGDGGGDDGDGVVVVLVVVVVVMAVMGVVVVVVVVTVVVVMVVVMGVVVMVVLVVVIGVVVMVMVIVVMAVVVMVVIVMVIAVVAVVVIVMVMVVVVMVIVMVMAMKVMVMVMVIVMVMVVVVMVIVMVMAMKVMVMVISDGGDGDGSGGSGGGGDNDGHGSGGDGDSDGDGSGGSGGDSDGHGSGGDGDSDGDGSGGSGGDGNSDGDGSDSDSDGDGSGGGGDSDGDGSGGGGDSDGDGNGGDGDGDGDQ

SEQ ID NO: 1439 - DNA, 1402 bp, Homo sapiens
  source
  (1)..(1402)
  CDS (201)..(1202)
aacaacatccctctaagtttcctgccagaactttttatgcgctcgctttgggatagatctaggcaaagagctggatgctttgtgaaggaaaggtcctggcttggaacgtacatttacctttctgcactgggtggcaaccaggtctttagattagccaactagagaagagaagtagaatagccaattagagaagtgacatcatgttgactctaactcgcatccgcactgtgtcctatgaagtcaggagtacatttctgttcatttcagtcctggagtttgcagtggggtttctgaccaatgccttcgttttcttggtgaatttttgggatgtagtgaagaggcaggcactgagcaacagtgattgtgtgctgctgtgtctcagcatcagccggcttttcctgcatggactgctgttcctgagtgctatccagcttacccacttccagaagttgagtgaaccactgaaccacagctaccaagccatcatcatgctatggatgattgcaaaccaagccaacctctggcttgctgcctgcctcagcctgctttactgctccaagctcatccgtttctctcacaccttcctgatctgcttggcaagctgggtctccaggaagatctcccagatgctcctgggtattattctttgctcctgcatctgcactgtcctctgtgtttggtgcttttttagcagacctcacttcacagtcacaactgtgctattcatgaataacaatacaaggctcaactggcagattaaagatctcaatttattttattcctttctcttctgctatctgtggtctgtgcctcctttcctattgtttctggtttcttctgggatgctgactgtctccctgggaaggcacatgaggacaatgaaggtctataccagaaactctcgtgaccccagcctggaggcccacattaaagccctcaagtctcttgtctcctttttctgcttctttgtgatatcatcctgtgctgccttcatctctgtgcccctactgattctgtggcgcgacaaaataggggtgatggtttgtgttgggataatggcagcttgtccctctgggcatgcagccatcctgatctcaggcaatgccaagttgaggagagctgtgatgaccattctgctctgggctcagagcagcctgaaggtaagagccgaccacaaggcagattcccggacactgtgctgagaatggacatgaaatgagctcttcattaatacgcctgtgagtcttcataaatatgcctctgattcttcaggaatacaactctgattcctcacaaagccttccaatttcttctataaaacacaattgaaagtctctccactttgtatcaatgaactcacttatagatgaataaaataattaagcactatacatggcctagg

SEQ ID NO: 1440 - protein, 333 aa, Homo sapiens
MLTLTRIRTVSYEVRSTFLFISVLEFAVGFLTNAFVFLVNFWDVVKRQALSNSDCVLLCLSISRLFLHGLLFLSAIQLTHFQKLSEPLNHSYQAIIMLWMIANQANLWLAACLSLLYCSKLIRFSHTFLICLASWVSRKISQMLLGIILCSCICTVLCVWCFFSRPHFTVTTVLFMNNNTRLNWQIKDLNLFYSFLFCYLWSVPPFLLFLVSSGMLTVSLGRHMRTMKVYTRNSRDPSLEAHIKALKSLVSFFCFFVISSCAAFISVPLLILWRDKIGVMVCVGIMAACPSGHAAILISGNAKLRRAVMTILLWAQSSLKVRADHKADSRTLC

SEQ ID NO: 1441 - DNA, 1324 bp, Homo sapiens
  source
  (1)..(1324)
  CDS (201)..(1124)
aatttgcatcctgtctgagccaagagcacacctctcctctttagcctgagcatcctcctctctaagtgagctctggttcagatgcagagcctgaccactctttagcactcctaggaaagattaaaaacaggactgtggctaggggcagggaggaggccagggaccaaggcactcaagtggggactgcaggaggggtcagaatgcaagcagcactgacggccttcttcgtgttgctctttagcctgctgagtcttctggggattgcagcgaatggcttcattgtgctggtgctgggcagggagtggctgcgatatggcaggttgctgcccttggatatgatcctcattagcttgggtgcctcccgcttctgcctgcagttggttgggacggtgcacaacttctactactctgcccagaaggtcgagtactctgggggtctcggccgacagttcttccatctacactggcacttcctgaactcagccaccttctggttttgcagctggctcagtgtcctgttctgtgtgaagattgctaacatcacacactccaccttcctgtggctgaagtggaggttcccagggtgggtgccctggctcctgttgggctctgtcctgatctccttcatcataaccctgctgtttttttgggtgaactaccctgtatatcaagaatttttaattagaaaattttctgggaacatgacctacaagtggaatacaaggatagaaacatactatttcccatccctgaaactggtcatctggtcaattcctttttctgtttttctggtctcaattatgctgttaattaattctctgaggaggcatactcagagaatgcagcacaacgggcacagcctgcaggaccccagcacccaggctcacaccagagctctgaagtccctcatctccttcctcattctttatgctctgtcctttctgtccctgatcattgatgccgcaaaatttatctccatgcagaacgacttttactggccatggcaaattgcagtctacctgtgcatatctgtccatcccttcatcctcatcttcagcaacctcaagcttcgaagcgtgttctcgcagctcctgttgttggcaaggggcttctgggtggcctagatggcatggtttccttatctagacccccggaaaagaaaggtgaggatggcagagctgtggcccactgacatggaggtgttttcataggtagatgaatactgggtactgttatggggctcctcctctgggaagcggaggagacaaggaaatctgggaactctctgagcatgcttcccttctttggaatgttataaagatgc

SEQ ID NO: 1442 - protein, 307 aa, Homo sapiens
MQAALTAFFVLLFSLLSLLGIAANGFIVLVLGREWLRYGRLLPLDMILISLGASRFCLQLVGTVHNFYYSAQKVEYSGGLGRQFFHLHWHFLNSATFWFCSWLSVLFCVKIANITHSTFLWLKWRFPGWVPWLLLGSVLISFIITLLFFWVNYPVYQEFLIRKFSGNMTYKWNTRIETYYFPSLKLVIWSIPFSVFLVSIMLLINSLRRHTQRMQHNGHSLQDPSTQAHTRALKSLISFLILYALSFLSLIIDAAKFISMQNDFYWPWQIAVYLCISVHPFILIFSNLKLRSVFSQLLLLARGFWVA

SEQ ID NO: 1443 - DNA, 1520 bp, Homo sapiens
  source
  (1)..(1520)
  CDS (201)..(673)
  CDS (855)..(1320)
gcagtgagtcgtgattgtgtcaccgccgtccagcctgggcaacagagtaagaccccgtctcccctaaataaaataaaatgagataagtcctcatttgctagagatacacagaatatggtgtagtagattttctctaactgactccaccctcaaccctggaaaacagggaggggtggcaggggagacggatggagtgaaacatgagccactgcagagtgatgggtggccatggccgatggcgtccgtgccgttatcttctctgcggagcaatggggggccgtggcgatggcatccgtgccgttatgttctctgcagagcgatggggggccatggccgatggcatccgtgccgttatgttctctgcagagcaatggggggccattgccgatggcgtccgtgccattatgttctctgcagagcgatggggggccgtggccgatggcgtccgtgctgttatgttctctgcagagcaatgggtggctgtggccaatggcgtccatgctgttatcttctctgcagagcgatgggtggctgtggctgatggcatccgtgccattatcttctctgtggagcaatggggggccgtggccgatggcatccgtgccgttacgttctctgcagagcgatggggggccattgccaatggcgtccgtgccattatgttctctgcagagtgatggggggctgtggctgatggcgtccatgctgttatcttctctgaagagtgatgggtggctgttgtcttctccgcagattgatggggggccgtgccgatggcgtccatgtcgttgtcttctctgcagagcgatggggggctgtggctgatggcgtccatgctgttatgttctctgcagagcaatgggtggccgtgccgatggcgtccatgccgttatcttctttgtagagcgatgggtggccatgccgatggcgtccatgctgttatgttctctgcagagcgatgggtggccgtgccgatggcgtccgtgccgttgtcttctctgcagagcgatgggtggccgtgccgatggcgtccgtgccgttgtcttctctgcagagcgatgggtggccgtgccgatggcgtccgtgccgttgtcttctctgcagagcgatgggtggccgtgccgatggcgtccgtgccgttgtcttctctgcagagcgatgggtggccgtggccgatggcgtccgtgccgttgtcttctctgcagagcgatgggtggccgtgccgatggcgtacgtgccgttgtcttctctgcagagcgatggttggccgtggccgatggcgtccgtgccgttatcttctctgctttcgtgtatgtttgaacatttctataataaaaacttaagtgaaaagcttactgtgctggctgcctggaggtgtggtgtttctgttcattttgtttttagggtgggaagtagtgggattgggggtccatgggggccatttcttgggttttcctgaagtgggttctgtgcttggcatcatgaagcaagtggagcgtgtgtttgctccatgcctgtgg

SEQ ID NO: 1444 - protein, 312 aa, Homo sapiens
MSHCRVMGGHGRWRPCRYLLCGAMGGRGDGIRAVMFSAERWGAMADGIRAVMFSAEQWGAIADGVRAIMFSAERWGAVADGVRAVMFSAEQWVAVANGVHAVIFSAERWVAVADGIRAIIFSVEQWGAVADGIRAVTFSAERWGAIANGVRAIMFSAEAMGGRADGVHAVIFFVERWVAMPMASMLLCSLQSDGWPCRWRPCRCLLCRAMGGRADGVRAVVFSAERWVAVPMASVPLSSLQSDGWPCRWRPCRCLLCRAMGGRGRWRPCRCLLCRAMGGRADGVRAVVFSAERWLAVADGVRAVIFSAFVYV

SEQ ID NO: 1445 - DNA, 1024 bp, Homo sapiens
  source
  (1)..(1024)
  CDS (201)..(824)
gcagtgagtcgtgattgtgtcaccgccgtccagcctgggcaacagagtaagaccccgtctcccctaaataaaataaaatgagataagtcctcatttgctagagatacacagaatatggtgtagtagattttctctaactgactccaccctcaaccctggaaaacagggaggggtggcaggggagacggatggagtgaaacatgagccactgcagagtgatgggtggccatggccgatggcgtccgtgccgttatcttctctgcggagcaatggggggccgtggcgatggcatccgtgccgttatgttctccgcagagcgatggggggccatggccgatggcatccgtgccgttatgttctctgcagagcaatggggggccattgccgatggcgtccgtgccattatgttctctgcagagcgatggggggccgtggcgatggcgtccgtgctgttatgttctctgcagagcaatgggtggctgtggccaatggcgtccatgctgttatcttctctgcagagcgatgggtggctgtggctgatggcatccgtgccattatcttctctgtggagcaatggggggccgtggccgatggcatccgtgccgttacgttctctgcagagcgatggggggccattgccaatggcgtccgtgccattatgttctctgcagagtgatggggggctgtggctgatggcgtccatgccgttatcttctctgaagagtgatgggtggctgttgtcttctccgcagattgatggggggccgtggcgatggcgtccatgtcgttgtcttctctgcagagcgatggggggctgtggctgatggcgtccatgctgttatgttctctgcagagcaatgggtggccgtggcgatggcgtccatgccgttatcttctttgtagagcgatgggtggccatggccaatggcgtccatgctgttatgttctctgcagagcaatgggtggccatggccgatggcatccgtgctgttatgttctctgcagagcaatgggtggccgtggc

SEQ ID NO: 1446 - protein, 207 aa, Homo sapiens
MSHCRVMGGHGRWRPCRYLLCGAMGGRGDGIRAVMFSAERWGAMADGIRAVMFSAEQWGAIADGVRAIMFSAERWGAVAMASVLLCSLQSNGWLWPMASMLLSSLQSDGWLWLMASVPLSSLWSNGGPWPMASVPLRSLQSDGGPLPMASVPLCSLQSDGGLWLMASMPLSSLKSDGWLLSSPQIDGGPWRWRPCRCLLCRAMGGCG

SEQ ID NO: 1447 - DNA, 1538 bp, Homo sapiens
  source
  (1)..(1538)
  CDS (201)..(399)
  CDS (450)..(1007)
  CDS (1301)..(1338)
tatgttctctgcagagtgatggggggctgtggctgatggcgtccatgccgttatcttctctgaagagtgatgggtggctgttgtcttctccgcagattgatggggggccgtggcgatggcgtccatgtcgttgtcttctctgcagagcgatggggggctgtggctgatggcgtccatgctgttatgttctctgcagagcaatgggtggccgtggcgatggcgtccatgccgttatcttctttgtagagcgatgggtggccatggccaatggcgtccatgctgttatgttctctgcagagcaatgggtggccatggccgatggcatccgtgctgttatgttctctgcagagcaatgggtggccgtggcgatggcatctgtgccgttatgttctctgcagagtaatgggtggccatggccgatggcgtccatgccgttgtcttctctgcagagcgatgggtggccatggccgatggcgtccatgccgttgtcttctctgcagagcgatgggtggccgtggccgatggcgtccgtgccgttgtcttctctgcagagcgatgggtggccgtggccgatggcgtccgtgccgttgtcttctctgcagagcgatgggtggccgtggcgatggcgtccgtgccgttgtcttctctgcagagcgatgggtggccgtggcgatggcgtccgtgccgttgtcttctctgcagagcgatgggtggccgtggcgatggcgtccgtgccgttgtcttctctgcagagcgatgggtggccgtggccgatggcgtccgtgccgttgtcttctctgcagagcgatgggtggccgtggcgatggcgtccgtgccgttgtcttctctgcagagcgatgggtggccgtgccgatggcgtccgtgccgttgtcttctctgcagagcgatgggtggccgtgccgatggcgtccgtgccgttgtcttctctgcagagcgatgggtggccgtgccgatggcgtccgtgccgttatcttctctgctttcgtgtatgtttgaacatttctataataaaaacttaagtgaaaagcttactgtgctggctgcctggaggtgtggtgtttctgttcattttgtttttagggtgggaagtagtgggattgggggtccatgggggccatttcttgggttttcctgaagtgggttctgtgcttggcatcatgaagcaagtggagcgtgtgtttgctccatgcctgtgggctgcgtggaggcagcctgacaaacacatttcgaggggccccggggggtcgctgaggctgtgtatgtctgttccatgcaacagccgtcatctctgtttttgaacacattgacagtgtgtagtctgcttggggggatgttcgaggtcaacagagtggccaaaagaggctctctcgtcattgcaatgatccacactccactctgctgtcactgaacctgcccccaagcctgcaccctcttcatctcttctttgtctatagcaaccatccccaatcctgacatcagtgattgtgtgtgttgtgtcttgtctgtcctccatagca

SEQ ID NO: 1448 - protein, 264 aa, Homo sapiens
MGGRGDGVHAVIFFVERWVAMANGVHAVMFSAEQWVAMADGIRAVMFSAEQWVAVAMASVPLCSLQKRWVAMADGVHAVVFSAERWVAVADGVRAVVFSAERWVAVADGVRAVVFSAERWVAVAMASVPLSSLQSDGWPWRWRPCRCLLCRAMGGRGDGVRAVVFSAERWVAVADGVRAVVFSAERWVAVAMASVPLSSLQSDGWPCRWRPCRCLLCRAMGGRADGVRAVVFSAERWVAVPMASVPLSSLLSSVISVFEHIDSV

SEQ ID NO: 1449 - DNA, 1063 bp, Homo sapiens
  source
  (1)..(1063)
  CDS (201)..(863)
  modified_base (214)..(214): a, t, c, g, unknown or other
ccttcctgggtttgctagcaaaagtccacgattgaagctccttggcatggccaggatcatgtgccgaaccctgagtgaatcaatatggcctggaaaacaaagatctggctggccaggtcagggtcccgtgtgcctgcctgcagcagtgggatagctgttcagaaggagcccttctagcctacctgtggctgtctacacacatgcacacacagcngtcacacagtgcactcaaaaacacaggcacatgcacacacgcacacacgcacacatatgcatgcacatgtacacacgaatgcacatacagccacacacaaaagcaagtacacatgcacacagacgtacatgtgaatgcaggcacatacacgaaccatgtaaacatgaacatgcacacacatgcacacaaatacactacacccacccaaacgcactcttgcacacgtacacaaatgttggcacatacatgtgtgcacatgcatccatgcacatgtgcacgcacacatgagtacacgtgcatacacacgcaaacacgtgggcgcacacacgaacacacgtgcacacacacgaacatgtgcacaagtgtaggcacatacacgcatgcacatgcatccatgcatgaacacacatgcacaaatgcacagatgaacatgtgcacacacaggcacatacacatgacaggacccagtgtgagaagtgagggtggttcaggcaggctggcaaggagcccccaacgtgctgtagatgtggggcaggagcacctgcatgttccagtaggggtcagtggtgtctcaggcagcatttccaaagctgctctagaatggagtttcaagtctctcttgtccaggtgcagtggcttaagtctgtaatcccagcactttgggaggcccaggcgggaggatcacttaagcttgggaggtcaaggctgcagtgagctatgattgtgccactatactccaacctgggcgatagtgtgagaccttgtcttgaaaaaaataatagttttagccgggcgcagtggctcacacctgtaatcccagcattttgggaggcccaggcaggaggatca

SEQ ID NO: 1450 - protein, 220 aa, Homo sapiens
  MOD_RES (5)..(5): Variable amino acid
MHTQXSHSALKNTGTCTHAHTHTYACTCTHECTYSHTQKQVHMHTDVHVNAGTYTNHVNMNMHTHAHKYTTPTQTHSCTRTQMLAHTCVHMHPCTCARTHEYTCIHTQTRGRTHEHTCTHTNMCTSVGTYTHAHASMHEHTCTNAQMNMCTHRHIHMTGPSVRSEGGSGRLARSPQRAVDVGQEHLHVPVGVSGVSGSISKAALEWSFKSLLSRCSGLSL

SEQ ID NO: 1451 - DNA, 43419 bp, Homo sapiens
  source
  (1)..(43419)
  CDS (201)..(278)
  CDS (8419)..(8609)
  CDS (10482)..(10594)
  CDS (19132)..(19408)
  CDS (41900)..(42106)
  CDS (42300)..(42393)
  CDS (43094)..(43219)
  modified_base (20434)..(20536): a, t, c, g, unknown or other
ctttttttttttttttttttgacagggtcttactttgtcacacaggctggagtacagtggtgtgatcacagctgactgcagcctccatctctgaggctcaagtgatcctcccgcctcagcctcccaagtagctcggaccgtaggcaggcatcaccatgcctggctaatctctgtatttttagtagagacagggtttcgccatgttgcccaggctggtctcaaacgcctgggctcaagggatccgcccgccttggcctctcaaattgctgggattacaggtgtgagccactgtgcccagccaactgccatttctttcagggcccagggaactgaggcagaatgctgtacatagccattgaagcaaatgccagttaattcatgctccttgaatgagggtcaaacacattagtgcacagagcctgcaagccagagcggaaccttgcctacctttccttccttagctgctctcactggcccccttggctgcctgtgggctggccatgttggccttttttgggtttccgtctctttgtgcaccttctctccggcttcagagactttgcataggctgttggtcttggaattccctactctcggcccacaggccacgcttagggagcccttcctttgatggcccagatgaggtcagcccttgcccatcttgtgctattataattccatgtgttataggcattatagggtctttctttattaatttctttgtttttgttttttttttagagatagggttatgctttgttgcccaggctggagtgcgatggcatcatacatagctcactttggccttgaattcctgggctcaaggggtcctcccacctcagcagcctgagtactggggactacaggtgtgtgccactgagcccagctaattttttaaatttttgtagagaccggattttgccatctttcccagactggtctcaaactgggtgcaagtgatccacctgcctcggcctcccagagtgccgggattataggtgtgaaccaccatgcctggccaataaggccctttcttcacagcatgggtcgtgagtaaatgcatttgtgattaggtgactagtgtcttcctcagacctcactggactgtaagcatcgtgagatctcctttgctccccatctaatacagggcctgggacacagtagatttttgttaaatacttgttgaatgaatgaaggaggcatcttaaaattcagaaaagcagaaatccacatttgctttctaaatcctgttattgcattgcatctcagttgtgatgtattcattcactcagcagatatttatgcatccttgcagtgtggcagatattggtgtaggctggggaattcagtggtaaatttatagacagaatctctggtgagggaaacaaacaataaacataaacaacaattactattaactagtgaaaagtggtgcggggaaggagatggacagtgactctactggggttgctgggagactgttaaagacagaccactgtacttccccctgtccctagcctgggacagtctcagtttatgtttgtttatatttgttgaagtatcttgatttgggcaataaattatatggtcactccagttacagacagaatatagacatggtgtcagggaggtctttctttttctctttttctcttttttttttttgagacagagtttcactcttgtcgcccaggctggagtgcaatggcgcgatctcagttcactgcaacctccgcctccccggttcaagcaattctcctgcctcagcctcctgagtagctgggattacaggcacccgccaccatgcctggctaattttttttgtatttttagtagagatggggttttaccatgttgtccaggctggtcttgaactcctgacctcagatgatccaccggcctcggcctcccaaagtgctgagccactgtgagccaccatgcccagcctgtcaaggaggtttttctaaagaggtgatatttgagcagaggctagcgtaaagagaagcaacgaattctgccccttcaattagaaggtctgcaggaagagcaagcattgcccagggagaagctcggagtgttgggaactagaagaaagtccagtgtggctggagtcaagtggttttccttaaggagtttggagggttttaagttgggagctgcatgttctgagaccaggaaaagccaagagccacaaagttgtattgaaccaatccaaggaatggatgggcccagaaacaaaacctttattattcccatgtaataatttcttaacagatttattgaggtggaatgtatatacaataaattttacatgtttaaaatgcatgctttaggcatggtagctcatgcctgtaaacccagaattttgggaggctgaggcgagaggatagcttgagctcaggagttcgagacctgcttgggcaccataatgagaccctcatctctataaaaagtagaaaaaattagttggacatggtggtgcaaatctgtagtcccagttactcaggaggctgaggtgggaggatcgcttgagtctgggagatcgagactgcagtgagccatgatcgtgccactgtactccagcctgggcaacagagtgagacctgtttcaaaaaataaataaaaaataaaatgcacactttgataggtttggcaaatgtgtgcattcattaagccatcaccacaatcaagattgtaaatacagccatcacccatttttttgtaatccacctttctctcttgcacctctctgtacccctactccctcccaaccctcccaggcaatggctggtctgccctctctctagattagtttatcgtttctgagattttatatatatgcagtcatacattatgttttttttttttttttactgactttttttacttgagtaattatttggaaattcatccatgttatatcatttatcagtaattattcctttttagtgctgagtagtgttccattgtatggttataccatggtctatccattcgcctgctgatgggcttttaggttttctttctttcttttcttttttttttttttttgacagggtctcattttctcacccaggctggaatgcagcaacttgatcgtggctcaccacagccttaacttccctgggctcaggtgatcctcccaccttaactgggactacagatgcataccaccaccacatctgactaatttttttttttttttgagatggagtctcactctgttgcccaggctggagagcagtggctcaatctgcgctcactgcaagctccgcctcctgggttcacaccattctcctgcctcagcctccctagtagctgggactacaggcgcccaccaccatgcccagctaattttttgtatttatagtagagacagggtttcaccatgttagccaggacggtctcgatctcctgactttgtgatccgcccacctcggactcccaaagtgctgggattataggcgtgagccactgtgcccagccaatttttttttttaatatagatatggggtcccattttgttgccggggctgatcttgaactcctgggctcaagcgatcttcctaccttggcctcccaaagtgctgagatgacaggcatgagccactgtacccagcctgtttccagtttttagctattacaaataaagctactatgaacattcatgtaaaagtctttgaatgaacatatgctttcatttccaccttaggagtggaatggactgggtcatatggtagacatgtgtttaactttttaaagaggctgcaaactgtttttcaaagtggttctgtcattttagatttccatcagagttgtatgagagtttcagtttctttacatcttcactaatacttggtaggatcagtctttttgacttgagccattccaaaatatatgtggtggtatctcctggttttcattgcatttcactaatgacttaatgttgagtatcttttcatgtgcttatttgccatctgtatatcttttttggggaagggtctattcaacctttgaacatgttttattgagtggttttcttactgtggcgttttgagagttgtttgttctccatataggcctttatgagatacatgatttgtagatatttcccccagtctgaggcttgtcttttcattctcttaataatatcttttgaagaacaaaagttttaaatgttgatggtgagtttatcaagttgttttcatgagttgtgcttttaatgtcatatccaagaaatatttgcctaataatccaaggtaacaaaagtgtcttctctattttcttgtagaagtattgtagtttttggttttatatttatttctattatctattttgagttaatttttatatatggtgagactatgggttgaggttcatttttttgtaaatggatattcattataccagcaccatatgttgaacaagattatctttgcttcaccaatacctttgttgaaaattagctgatcaaatgtggatctatttctggactctattctgtcccattgttctagttgcctatcttgacaccactatcacaccatcttgttatggtagctttataataattcttgaaataaggtagtattagtctaccaattttgttcttttctttttctttcttttttgagacaggatcttgttctctcacccaggctggagtgcagtggcgcaatctcagctcactgcaacctctgccttccgggttcaagcgattctcctgcctcagcctcccgagtagctggaattactggtgcccgccaccacactcggctaattgttgtatttttttaatagagaccgggtttcactgtagtggccaggctggtctcaaactcctgacctcaggtgatccacctgcctcagtctcccagagtgtgaggattacaggcgtgagccattgcacacagccggttcttttttcctaagtccgcttttccatgtgaattttggaatcttctacaaaaagatgagaactttgaaaacagtgtcaaacctttatctcccatcctttgtgtttccatatgaattttagaatcagtttgccaattttttacaataagatgagaacttcaaataaaaatgtcagacttttatgtgaattttaggtcccaaaccattttaaagattaaaacacatacattaagtcaagtgtgtttggcatgcaaaaaagtacaaagacataaagaaattgagacccaggccaggtgtggtggctcacgcctataatcccagcactttgggaggccgaggcaggcagatcacgaggtcaggagttgaagaccagcctggccaacatggcgaaaccccgtctctactaaaaatacaaaaattagccaggcgtggtggcaagtgcctataatgccagctattcgggaggctgaggcaggagaatcacttgaacctgggaggcagaggttgcagtgagccaatatcatgccattgcactccagcctgggcaacaagagcaagactccgtttcaaaaaataaaaaagaaagaaaatcaagacccaaagtctttaagagcttctggtaaaatgtacatcccgtacctcatggggctgttttaccaggagaatgcagttacataggattttcatgtggattctctcagagaagccaggccactgcattgcaagatacgtctcatcttcattcccgggttttgtatctaggaatgtactctatttcacctagcaaaaatgtatttcagcagttttttttttttagacggagtctcactctgtcaccaggctggagtgcagtggcgtgatctcgactcactgcaacctccgtcttccgggttcaagagattttcctgcctcagcctcctaagtagctgggattacaggtgcacgccaccacacctggctaatttttgtatttttagtagagacggggtttcaccatgttggccaggctgatctcgaactcctgaccttgtgatctgcccgcctcagcctcccaaagtgctgggattacaggcgtgagccagcgcgcccggcctattttagtagttgtaacacatgaactatgttcctctttgtctagcttgggacattttttgaccgcaatgctgtgaataggacatctattttatataaatgcttaccccttgcaggtgtccttgaacgtttataccttcctctcctctcccttgcctacaagagacattttttaataatatacttccattggttattttctgtatgtgtgggtcagaggacatagagaagttcaactcagttttgtgcagttctagcaaatataaatgtaaaaccaaaaactataacccttctagaagaaaatatagaagatgcttgttacttgggttaggcaaagatttcttgggtatgacaaaagcacaatccatgaaaaacaggttgacaagctcaaaatgtaatagtttatttccagattaggatggtatccatttattttcccagagaacactgaccttatggggtagtcatggaaagagaatagacaccgagcctggtggacactggtttctgcatgctgggtagcctaactgagcccctacatttccattttgaaggcaggaataatacatagaaatacagctctgagtgttggtggtgttaaagatgatggcacaggccgggcacagtggctcaagcctgtaatcccagcactttgggaggccaagatgggaagctcgtttgagaccaggagtttaagaccagcctaggcaacatagcgagactgtctctaccaaaaataaattagccagaaatggtggctaatgcctgtggtcccagctacttgggcggctgaggtgagaggatcgcttgagcctggaaggtcagggttacagtaagctgagtttgtgccactgcactccagcctgggtgacacagcaagaccctgtctccaaaaaaaaggaaggtgatgacagtcatcatttattgagtatttgtctcacatcagacatggtgctaagtgtctttttttttttgcggggaggcggggggaggcagagtctcgctctgtcccccaggctggaatgcagtggcgtgatctcggctcactgcaacctctggctcctgggttcaggcgattcttctacctcagcctcctgagcagctgggattacaggcgcttgccaccatgcccagctagtttttgtatttttagtagagacggggtttcaccttattggccaggctggtctcgaacttcctgacctcaggtgatccacccgccttggccttcccaagtgctgggattacaggcgtgagccaccgcgcccagcctatgctaagtatcttatatttgtatctcacttaaacctcatgactgcttaatgaggtagagattacttgtaaaacaagtgccaacatacatatttgcatcctgattatcaaacttgttttaaatttaatgtgtattatgaaaatttccaaacataaatgaaaataaaatcataaactaaatcctcatatagccatttctcagattcagaaataattaggattttgccacatttgctttatctgttttttctgggtcgggggcagcgggggagctgagtgttttaaagcaaacctcaggccttctttcatttcatccctacagatttcagtgtgcacttcagaaacgtgtggacttcttcttctgtgatttgctgccattgtcagacctaatagaattactaataattccttgacatgatcagatttccctgattaactcaaagacatctttttgcagcttgttcaaataagaatgcaaacaagggccacagcttgcattacgttgggtctcttttaatcagggtgcttaataaacatttgtcaaattagattgcgtgtgactttcagaaattattataattctgggtcagaattaaactttgctctcaaaaggcagttctagttgcattaattgttttcgtttgccaaagggggtttgtcatttagagaagacaggacgatgcaaactgtttgttgtggctgctattttgacttatttccttttaggaattttttttccttgttcaatacagaaatactgaaaatgataccaagtttataaaaactaactcggcctggcaagatggctcacacctgtaatcccagcactttgggagtctgaggtgggcagatcacttgaggtcaggagtttgtgagcagcctacccaacatggtgaaaccctgtctctactaaaagtacaaaaattagccgggagtgatggggcacaccttgtaatcccagctacttgggaggccgaggcaggaggatcacttgagcacgggaggtggaggttgtagtgagccaagagcatgtcactacactccagcctgggtgttgggagtgaaaccctgtctcaaaaaaaacaaaaaccaaaaaactaacttccctcctcccatatttatatttgtctttgaaagccagctaaagggaaaaaaggaaaaggccagggcaagtctcatgggaagaaacagaagaaaccagaagtggacattctcagccccgcggccatgctgaacctctactacatcgcccacaacgtcgctgactgcctgcatctgcgaggcttccattggccgggtgctcccaaaggaaagaaagggagaagcaagtgacagcatttcacaacacatctctgttacagacaacaggacctggggaagagaagtcaggataacacaactgttgccagcaacatagactttactccagacgacttgagatgcaaattaagtgtgcttttctgtgatggtggaagatcaggaaatgcaccttacttcctctgttatgccagatatggttagccactttggttttttaggagctataggatgggaaaagcctgagtaattcctacacagtgtgctgaaattaatagaactttcagaaattattataattctgggtcaggattaaactttgctctcagaaggcagttctagttgcattaattgttttcttttgccaaagagcgtttgtcatttagagaagacacggcaagaaacactgggtttccttaggaacattcctctcttgggcaccatttccttttttttttttaatggaaaataataaatactttgtttctataattttcttctcagcagtctgactctgtttgatttgaattagccacaggctccacggatgctaagatggtcacgaatgctctgaccctgccagtcttgcaagcagatggtgagaagtggctgacagtgtgaaatggctggatgcagggcaaagggggcaaatctgcccatccctttcttttttcttttaagacggagtctcactctgttgcccaggctggagtgcagtggcgaaatctcagttcactgcaacctctgcctcccggtttcaagcgattctcctgcctcaggctcccaagtagctgggattataggcgcacgccaccagcccaggctaatttttttatttttagtagagatggggtttcaccgtgttggccaggctggtcttaaactcctgacctcaggtgatctgcccgcctcggtctcccaaagtgatgggattataggcgtgagccactgcacccgcctcagtctcccaaagtgctgggattacaggcatgagccactgcacctgcctcagcctcctaaagtgttttattacaggtgaaagccatcgcacctggccatccctcttttttccatatttcacctgactcttctccctccttccctccacactctatttcgtcccaccttctgcctactttgttaaaacttggctggccccgagttatagaattggtgccaggcacttacttgccctgggcattcggctgatattctagatctccctagccctgtaaggagacgcctaagaggtgaaactatagttctttctcctcggcccagaggcctaaattctccagatgtgaaagccagcgttttgcaagtgcggacgccgtctttgactccctgagcactccatccttgcctcctgctctgtcttcctggctcttcctgcccctcctcagcccctgcaccgttgtctccattcatggttctgagcccaaagctgacacactgtaggcagcacctccggggatgttctagtttgttggaattataattatgctccaggtggccttgtgaggatcgcaaggattcatgaggtttgctaagggaagctgcaactcaggactcaggatttcatacacatcagagaaaaaaaggaagctccatgaatctctgtgctagagaagtggggtgcccatgacccacgtgagcctgttgggaacaatactgtttacctgcaccatctgtgcagtttccatagaagcccttggccagttgccagaggagccctcacttgggtgaatctgaagggaggtctcctctgctgtgttttctggttttggagacggggagcaccttcccaccctgttaaggactgctgaactcactaactccagttcagcagttctcacacttgagtgtgcctctcggtcacctagaacacttggccaagtgcagattgctgggccctaccctcgcaggaaggatggggctcagggatttgcgtttctggtacgctggcaggttatgctggtgctgcccagccacacaggtagagagctgccgctccagttaatgctgcctacccagaagctaaaaggcttagtggaatccgaacctgtgggatgtgtaatgtcctttcctgcctcacctgggttcaggagcgtgtatttgagtagctggttattggaagtttggggagaaggcagctgcaaagcttccttttgatccctgactgcccgcacctgcaaggcttccattggccgggtgctcccaagggaaagggagaagcaagtgacagcatttcacaacacgtctctgttacagagaacagggcttggggaagaaaagtcaggataacacagctattgccagcagcacagactttactccagacgacttgaaatgctgctcatctgtagcacagatacaggcatttacaggctaacaaggtctgaaagtggtcatgctcttttcttttgagatgatgaaatgatgagccaggactgtgagtgctgggatgggggaagcactggtctgattggccggggcaccgtgactcaaggctcaccccagtttagcagactgcctgaggctgtctcagtattgtgctcactggacccctggggttctgagagaagccataagaaattttgggttctaatagccatgctctagtgttaccacatatacataaagtcataaacattacacacacgctatataaaggttatgatgcattttactttttgagaattttttttttattttggtgaaacgctaaaaacttttttcaacaaaagctatttcaatacattaattgagcatctactgtgcttggcacaaagacagcaagacagaatccctactgataagatttggctgtgtccccggccaaatctcatattgaattgtagctcctgtaatttccacgtgttgtgggagggttttgtgggagataattgaatcacggcggcagttttccccatactgttctcatggtagtgaataagtctcacgagatctgatggttttataaggggtttcccctttcacttggctctcattctgttttgtctgctgctgtggccgtgtgagatgtgcctttcaccttccactgtgattgtgaggcctccccagccacgtggaactgtgagtctgttaaacctctttttctttataagttacctagtcttgggtgtgtctttatcagcagcatgagaacagacaaatacacttaccctcaaggagcttccagtctggtcaagaaggctactacccagattaacagagggcaactaagtttctatttcaactttgataaagtacattcatgatgcaatttatgaaggtgattaagaggagggtgggattaagacctctggaggacatccggaggatatctgatgataaaatatatacttgaaccctgctgtttttacttcccctaaactcaaattggcaagaatcctgattcttgctgcttttaaagattcaaagaggagcttgtgaaaggcacagtgtattaggtcattttgcattgctataaagaaatacctgaggttggccgggagcggtggctcacgcctgtaatcccagcactttgggaggccaaggcgggcgggtcacaaggtcaggaggtagagaccatcctggctaacatggtgaaaccccgtctctactaaaaatacaaaaattagccgggcatggtggtgggcgcctgtaatcccagctacttgggaggctgaggcaggagaatggcgtgaacctgggaggcagagcatgcagtgagccaagatggcgccactgcactccagccttggtgacagagcgagagtctatctcaaaaaaaaaaaaaaaaaaaaaaaaaaaatacctgaggccaaggcaggcggatcacttgaagccaggagtttgagaccagcctggccaacttggtgaaaccccatctctaccaaaaatacaaaaattagccaggcatggtggtgtgtgtctgtagtcccagctactcaagaggctgagtcaggagaatcgcttgaaccagggagggagaggttgcagtgagatgagatcgcaccactgcactccagcctgggcaacagagtaagactctgtctcaaaaacaaaacaaaacaaaaaacaacctgagcctgggtaattgataaagaaaagaggtttaattggctcacagttctgcaggctgtacaagcatgacaccagcatctgctgggcttctggggaggccttcaggagcttttacttttggcaaaagggtgcaggcacaccacatgcctagagcaggagcaaaagagagaggagtgtggggaggtgccacatactttttttttttttttttttttgagaggaagtctcactctgtcgcccaggctggagtgcagtggcgccatctcggctcactgcaagctctgcctcccgggttcacgccattctcctgcctcagcctcccgagtagctgggactacaggcgcccgccaccacgcccggctaatgtttttgcatttttagtagagacggggtttcaccgtgttagccaggatggtctcgatctcctgacctcgtgatccgcccacctcagcctcccaaagtgctgcgattacaggcgtgagccaccgcgcccagccagtgccacatacttttaaacaactagatctggaaagaactcactatctcgagaacagcaccaatccatgcaggatccatccccatgacccaaacacctccaccatgccgcacctccaacactggggattacaattccacatgagatttgggcagggacaagtataagcagtgataggtacgtccacatacaggtcatgagggctacctggaggaggcaacagctgaagtgaaggccttgctgtgaagctatgggggctttttatgaggaaggctctatgcaagggtgaggatggatatggggcttgatggttagaaagtgggagagaaggccaggtgcagtggctcacacctgtattcccagcactttgggaggccgaggtgggtggatcacctgaagtcaggagttccagaccagcctggctaacatggtgaaaccccatctctactaaaaataaaaaaattagccaggcatggtggcgtacacctgtaatcccagctactcaggaggccgaggcagaagaattgcttgtacctgggaggtagatgttgcagtgagccaagattgtgccattgcactccagcctgggcgacaggaggagactccgtctcaaaaaaaaaaaaaaaaaaaaaaagaaagtgggagagaagggaacggtgactgcaggaatagaaaaaatgtccacagaggaggaaggaggacatggcagtcacatgtggatggggaattttccattacaaatctgatgatagaatccaaagagacagtgacaagtgtcagcgagggtgggaaaaattgcaaccctcatgcgttgctggtggggatataaaatggagccgctgtggaagacagtttggcagccactcagaacgtaagtagagttaccatacagctcagcaattctactcccaggtacacgcccagagaactgaacacacggtcacacaacatcttgtacataagccaagtacagcggtgctcgcctatagtcccagctactcaggaggctgaggccagagggtatcttgaacccaggagttcgaggccagcctgaataacacagcaagaccctgtctcaaagataccaaaaaaacaaagcaaaacttacatacaaatgtttattacagcattcttcataatagccaaaaagtgaaaacaacccaaatgcccatcaacaacagataaaatggggtctctccatacaatggaatattatttaaacataaaaaggaatgaaatggtgatatgtgctacaccgcatagatgaaccttgaaaacaccgtgctaagtgaaagacgccagatacagaggccacatattgtgtgattccatttagatgaaatactcacacagacaaagccctagagacaggacgtggattagtgagtgccagggggaaatgagaagtagtggctgctaatgggtctttaacctttgggtccttttttgcgtggtaaacatgttctggaattcaatagtagtgacggttgcataaccttgtgactctactaaaaaccactaagctgtacatttaaaagggtgaatttgatggtatgtgaatcatgtctcaagctgatgacaactagaaaaggtccaacaagactgagagagaaagaggaggcaagtcccagataccagagcaggtggccccaacagagacgaggccacggaagagggaacagggcccggtcagacccctgcagccagatcctgggacagagaaacttgggagctgtggcaggagggaccacagacccaaggtgtctgcagacctgagggaggactgacgatgttcctgccagggctgaactcatcttaaaagaaaaaaaaaaaaaaggccgggcacggtggctcacacctgtaatctcagcactttgggggactgaggtgggcaaatcacttgaggtcaggagtttgagtccagcctagccaacgtggtgaaaccccatctctactaaaaatacaaaaatgatccaagtgtggtggtgggcgtctgtaatcctagctgctcgagaggctgagacaggagaattgcttgaacccggaaggtagaggttgtggtgagctgggatcatgccactgcactccagcctgggtgaccgagtgagactccatctcaaaaaaaaaaaggactacaataaattccatctctaacaacttttttttgagtcaaggtatcactctgtcacccaggctggaatgcagtggtgtgatcatggctcactgtagccttgacctcccaggctcaagcagacttcccacttcagcctctgagtagctgggactataggcatgtaccaccacgcctggctaattttgtttattattattttttttagagagacgagctctcactatgatgcccaggctggtcttgaactcctgggcttgagcgatcctcctgcctcaggctcccaaaatgctgggatcataggcatgagctaccacacccaggcctccaacaacttcttatattttgttttattcttttagtttatcccttatttatttatttaattcattagtaataaagccaatcaaactttttaaaatgtgccattttatcctggaatacatcagtatccttgatgatgatgatgatgattattattattattattagttttgagacagggtctcgctctgtcacccaggctgcagtccaggggcgtgatctcagctcaccacaacctctgcctcccaggttcaggcgattctcctgcctcagcctcctgagtaactgggaccacaggcgcgtgccaccatgcccggctaattttttgtatttttagcacagacgggatttcaccatgttagccaggatggtcttgatctcctgacctcatgatctgcccccttcggcctcccaaagtgctaggattacaggtgtgagccactgcacctggcctctttgatattttaaacaggtagctttgcactctaactccaggcatgttcctgctgtgatttgtgttactctgtggctgtctgtcaagggcccaccttgctgggagagatgtggtttccactcttgctacacccttctcctctcccccaataccctccagcgacctctgttttgacaaatctgggcatggccctgtctcccacctccattctgctcccattctgtcctctctttttgttctcgttttccttgtttgccatattccctgaatacaaaatcaccagggcttcactggcttcatggtaaatccctctgcaggtctcaactccaaggtcacttcctcggcaacatcttctcatggtcaggcccactgtcttagtcccttcccgctgctatgacataatacctgggcctggataacggatcaaaacagaaatttacttctcacagttctggcagctgtgaagcccaaggtcaaggtgccagcaggttcagtatctggtgagggctgctctctgctttcaagatgtcaccttattgctgcattctttggagtggagaaatgctatgtcctcatatggaggaaggtagaagggcaagtggccaaatgctacatgaagcctcttttttttttttttttttttttttttttttgagacagagtctcactctgtgcccaggctggagtgcagtggtgtgaaatcggctcactgcaaactccacctcccagctttatgaaattctctgcctcagcctcccgaatagctggtattacaggtgcgtgccaccacgcctgctaattttttgtatttttagtagagacgaggtttcagcatcttggccaagctggtcttgaactcctgacctcgtgatccacccgccttgtcctcgcaaagtgctgggattacaggtgtgagccaccatgccccgccacatgaagcctcttttataaggaccttaatccatcccgtgggaggaaccctcaagttctaatcacctcttaaaggccccacatcttaatactatcacattggcaatgccaggtttttggaggggacacattcaaaccatagcacctgccttccccaaaccaccccaaatcccttggtatctgtgcttctattccttcacttcaccaaaacttttctcaagtcaccagtgacttcctggttttcggtccagtgggcttttctccatccttttaattctttgctttatccttcaacttacgtgttctcagcacctcccatctggcaggtgctgggctgagggttagaagagagagacggctctggtccctggccacttatccagcctgatgcttcccctcctcttcctcttcacagggaaattggaggctctcaggactgaataggtcccctccactctgcctgcttccaccctcacatggtctccaggaagactctgtttttgaactgacttccacttggctttggaatcctttctccctcatttcaggatgtagagcctacttccctgattagccctttaaaaatatacacaggagctggggcacagtggctctcgcctgtaatcccagcactttggggggccaaggtgggcagatcagctgaggtcaggagttcgagaccagcctgaccaacatggtaaaacaccgtctctactaaaaatacaaaaattagctgggcgtggtggtgcatgcctgtaatcccagctacttgggaggctgaggcaggagaatcacttgaacccaggaggtggaagttgcaatgagctgagactgcaccactgcactccagcctgggtgacagactgagaccgtgtctcaagaaaaagaaaaatgccaggcatggtggctcacacctgtaatcccagcactttgggaggccgaggcaggcggatcacgaggtcaggagatcgagaccagcctggccaacatggtgaaaccccgtctttactaaaaatacaaaaattagccaggcatggtggcacacacctgcaatcctagctactcaggaggctgaggaaggagaattgcttgaactcaggaggcagaggttgcagtgagctgagatcacactactgcactccagcctgggtgacagagcaagactccatctcaggaaaaaaaaaaaaaaagtacacagggaacacttgggaaaaacaagaaccacaaataagacaattagaatcaccccaagtcccgcccatctacagctaagttctgtcagccatttgtcacatttggtgtatactcaggctgttttctacgtgctggtatgagtgtatctccatgtacacgagggtacacatttttattctagggcaagtctgtcttctgcattttcgagctcttcctccctgccagctccttcctcatagcctggaaaagagagactcttttccccactttttaatgcaagaatctggggctcattgaagttaggagtgagggtggtccaaagacctgtggaccagtaagaattgcacattcattaaatgagtgtttatcaagggcctgtgtgtgccaggtactgggcgacagacatgaggccaagagacatatggtcctgttctcctgaggctgcagtctacgcggagctgaaggtgagtaggtatcagttggtgctgcttggtgtaccagcactgtccaggagaatcatctctgataatggagatgttctatgttgcacggtccatcacaggctcgaacacgtggggctgctgagcatgacatgtggtcagtgcgactgaagatctgaatgtctcatatggtttaattgtaattcattcaaatttaagtagccgcatgtggctagcggctattgtatcagacagcgcagagctacctgcggaaatgctctgacacagttggggagggggagagaggcaggaagatgttactgaggaagggatgttggagttgagagctggagagggatttaccatgaagccagcaaagccgtggccgttttgtgtcatgctgttgtgttctttttcttaaagaaagtccccaagctctaggccccacaaaacctggctctgcccctggactaagttagacagggccagagcacgtgcaaaggcacgaagaagggagcgtggcagagcgaagggactgaacagagcagtgactgggggagggggcgacgagaaccttgtggaatcccagtggaccccttcaggccagcctggtggctccaggatcccagccggcaccaaggacagcagcagcagcgtggtgactcctcgttcctgagctgctgtagtgagagggcagactccgcgagcagcggctacctggtcctcttggctctgcaccgctttctccccctgtgagttctgccttctgtcggtttcagcgtctctaccaccacagcttgttgtgatcctccgggatcccctgtgactcctgctttactttctggtctctgtctttgcttgcgttgagctccagcttcctctcctaaatgccttattctcagggtttgacaggagcaagagtctgattgaccacccttgtctttcggggccaggctgtgtcgtggcagccactgaatgagctgtgggggtccggggcttcccacccccatcagctatgcctgagggtggcaacggtcaggacctgcaaaatacccacccaggaatctgccttggggttggggcatggggaccacagattgcatgagggtttgcttctgtctctttgtcactccctcaggctgaagtctatccctttagagtcaagatcctgggaagaacttgcttactctttggtctttttcctttacttcctcacctttctgtcacacatttttttcctctcacttttttttggttgccacctttgtattttatttatttattttgagacagagtcttgctctgtcacccaggctggagtgcagtggcacaatcttggctcactgcaacctcagcctcctgggttcaagtgattctcccaccttagcctcctgagtagctggggctacaggggcgcgccaccacacttggctgatttttgtatttttagtaaagacggggtttcaccatgttggccaggctggtctcaaagtcctgacttcgagtggaagtcagtgggtgatccgcccaccttggcctcccaaagtgctgggattacaggtgtgagccaacgtgcccggccccaactttgtatttaaaaaaattaaaaattggccgggtccagtggcacatgccttgtagtcccagctactcgggaggctgaggcaggagaatcgcttgaacccaggaggcagaggttgcagtgagccaagatcacaccattgcactccagcctgggcgacagagagactctgtctcaaaaaaattaaataaaatannnnnnnnnnnnnnnnnnnnnnnnnnnnnnnnnnnnnnnnnnnnnnnnnnnnnnnnnnnnnnnnnnnnnnnnnnnnnnnnnnnnnnnnnnnnnnnnnnnnagaaaagaaaagaaaagaaaaggaagtcagctgggcgcagtggctcatgcctgtaatcctagcactttgggaggccaaggcaggcggatcacctgaggtcaggagttcaagaccagcctggccaacaatggtgaaaccctgtctgtactaaaaatacaaaaattaaccaggtgtggtagcacacgcctgtaatcccagctactctggagtctgaggcaggagaattgcttgaacccggggggcagcagctgcagtgagctgagattgtgccacttcactccagtctgggtgaaagagcaaaactccatctcaaaaaaagaaaaaaaaaaacaacaagtcaggaggcagcctcaagtaggtgcagatgagagtgttctagatacaaggagagagagagggatcaaaggtgacaagttcctagcgtgggtacctagatggctgctgaggccatcatccaaaacagaaggagatacacattggctaagagaagtgtttgattttattgatttagaggcagggtcttgctctgtcgcccaggctggaatgcagtggtgcaatcactgttcactgcaatcttgactccctgggctcaagcgatcttcccgcctcagcctcccaagtagccagaaccacaaatgcgtgccaccatgcccggtaaattttgtatttttttttttttttttttttgcatagatggggtttcaccatgttgcccaggctggtcttgaactcctgagttcaagcgatccacctgcctcagcctcccaaagtgctagtattgcaggtgtgagccaccgcgcccagccatgtttgattttagatgcggtagggtaaggttcctgagttgaagtttcaaaatcaactttatcaagctataattcatatattgtaaactgcactcatttgaagtatataatttaattaattctgacaaatgtatatacctgtgcagggccaggttcatgggctgtttgaccccccagtggtcacacagagtcctactcctttttttttttttttttttttttgggtttttttttgagaaggagtcttgctcttgttgcccaggctggagtgcatagacgcaatctctgctcactgcaacctccgcctctcgggttcaagcgactcttctgcctcaggctcccgagtagctgggattacaggtgcccaccaccatgcctggctaatttttctatctttagtagagatggggtttcatcatattggtcaggctggtctcaaactcctgacctcaggtgatccgcccgcctcagcctcccaaagtgctggtattacaggcttgagtcaccacacctggccggggaaaaattgtttttaaatgtttctttcctatttagtccaaattgctcattgatggcagttatcaagaacttgaatagatcatcattcaaaaatcttcactggtgattatttatagccatttcaagcatatgaaaaaagaatgtttaaaaaagcccgtgtctgtgctacctttgccatcctcgctgcagagcagtgcctcctatcaggcagcccctggccacatgtggccgcagagcatttgaaatgtggctactccaaattggaaagtgctgggtatgtaaaacgcacaccagatttcgaagacgtagtaagaaagcaagaatgtaaaatagctcattcataattttatattgatgacaggttgaagtcataatagtgtggatatattagtttaaataaaatccattataaaaaaatttttaagttatgttcatagaagcaagctcaggtttctcattaaaattttgaaaatattttatttggaaaatttcatacaaattcagtatgtaatatgttctctaattacattattttcatttttataattctttactctaaagaaaacataatcactttttccatcaagctccacatagacgtccccaggtccctcccccaacccctccagtttacttaagtgtgtcattaaaaaatggacatttcttatgagtgtgatgacatgaaatagtttccagaaaggtatttttgagcatctttatgatttggaaaggcatttttgagcatctattcatcctgggtgacctgctggattgtgggaatacagagttgtatatattgtatattgtgttgtatgtgtatcaataattatgcagacaggtgtggtggctcatgcctgtaatcccagcactttgggaggctgaggtgggcggatcacttgaggtcaggagtttgagacgagcctggccaacatggtgaaaccccatctctacctaaaaatacaaaaattagctgggggtcgtggcatacgcctgtaatctcagctactcaggaggctgaggcaggagaattgcttgaacctgggaggcagaagtgcagtgagttgagatcccgccactgcactccagcctaggtgacaaagcgagactccatctcgaaaatatatatatgcaagggaactcttggttgttccactaaggagctcccagcaacctgctctgtgcgctgcagaatttgtgggtatccctgggaggcctggaccagccacagagcagcagcaggccaggaggtgtcagtcttaacagagtgacttctaggagaggcagggccctttgctttttttgagattgtatttaagtagggcccttttctggctccttattgaatgtttccactctactggattttctctctattgtcccgtaaactcccgaaggccttgctcagctaccaacatctgtttcgggtttcctataatccatatgcctgaggcaaggcgtgtccagaaagcagaggctgtgctacccgggtgcttgtaaactcgattattgtttatatgtatgactttggcaacccatttagtcctcgttacgggcaagcctaaggccaagactgactttctgtttccaacttcacacttctgggctgaatcctgcacactccataaacagcctctgcacatgggaagccacctgcgtgtgcccctccttcacataattcaagagttgctggcattttttcagctcttctggaatcaggaactcagtcttgtggagcccaggagactgtccatttggaaaatcatcagggagctctgaaggggacagatgtcaacatcaggtcccaggctatgggatcactttctggacatgcaaatacacgatatgaaatctgttcaggccaggcgtagtggctcatgcctgtaatcccagcattttgggaggccaaggcaggcaaatcacttgaggccaattcgagaccagcctaggcaacgtggtgaaatcctgtctctactaaaaatacaaaaattagttgggtgtggtggcgtgtgcctgtaatcccagctacttggaaggctgaggtgggagaattgcttgaacccgggaggtagaggttgcagggagcggagatcacaccattgcactctagcctgggtgacagagcaagactctgtctcaaaaagacaaacaaacaaacaaaaaaccaaaaaaaacaaaaaaaaatgtgatctgttcagattaatattgttttttcaaattctgtgtggatttgggcctgctctgtgatgtaattttgtgatgtaattattcatctttgcccaaaaatacctacataattgtgcctgaagcaaccggtatacaagggtaaatggaatacattgctataaaaactatgtttatgtgtgagctgggcacagtggtgaatgtctgtagtcccagctactctggagtctgagactgggggatcctttgagtccaggagttcgaggtcagcctgggcaacatagcaagaccctgtctcaaaaaaatctccaaactgtgtctgtgtgtggatgtacagtggaaggattgtacttagttacgaaaagtattgtattgagatgacagaggtcatgagtgttatttactgttgagttgtttaaatattaaatattcaaaccttaaaaactgttcagttatttaaaatgtatgcttaaaatgtttaaagggataaactgacaaagtcctttgaagaaagcctgttaaaagaatttctgccattaaaatgtccaacaatagcggccaggcgtgatggttcatgcctataatcccagcattttgggaggccgaagcatgtggatcacttgagctcaggagttcaagaccagcctgggcaacctagtgaaaccccatctctaccaaaaatacaaaattagccgggcgtgggggtgcacatctgtgggcccaactactcaggaggctgaggtgggaggatcacttgagctggggaggtggaggttgcagcaagctgagatcatgctactgcattccagcctgggtgacagagtgagactccatctcaaaaaaaataaaataaaataaaagtccaacaataggagaatgacgaagtagattacattattaatgcattatcatttattgtacacttactctgtactaggtacaggctaactactaggctaagtgttttgttttgttttttttttttgagaccgagtctcgctctgtggcccaagctggagtgcagtggcgcgatctcggctcactgcaacctctgcctcctgggttcaagcaattctcctgtcttgccctcccgagtagctgggactacaggcacgtgccaccacacccagctgctattttttatttttagtagagacggggtttcaccatgttagccaggacggtcccgatctcctgaccttgtgatccgcctgcctcggcctcccaaagtgttgggattacaggtgtgagccatggcgcccggcagtgttttgttttttaattttttttttttttttttgagacagggtctcgttctgtcacccaggctggaatgcagtggcataatcacagctcactgcagccaccacctcctggactcaagcaatcctcccacctcagcctcccaagtagctgggactacaggcacgtgtcaccacacccagctaatttttgtatttttttgtagagatggggtttcaccatgttgcccaggctggtcttgaactcctgggctcaagcaatatgcctgccttggccttccaaactgctcagattacaggcatgagccaccgcgcctggccagtctacgtatcttatatgcattatttcatttttttaatgttcaaaataaccccaaagaatataactattgtcattatcattttcattttattgatatgaaaactagggcatagagacattaagtaactcagtaaagacctcatagctagctagtggcagagatgggatttgaacccaagattatttgggtcctacacccaagtgttaaccactaggttaccaagccacacactaccacacagccacgggaggttttcatagccatgaacactatcggtggagctatgatggttagaactttaaaaggaaggcgatttgcacacaattaaaaatgcacatacaaggctaggcacggtggctcagcacttttggagtctgaggtggaaggatcacttgagcccaggagtttatgaccaccctggacaacatagtgagacatcatctctatctttataaaaaataaacaaaattagtcaagtgtggtggtgcacacctgtagtctcagctacttgggagtctgaggtgggaggatcacttgagcctaggaagttgaggctgcagtaagctgagattaagccactgcactccagcctgggcaacagagtgagaccctgtctcaaaaaataaataaaatgcacataccaattatcacacaagttcacttctaggacactgtgatggttaatttcatgtgttaatttgactgggctaagggatgtccagctagctggttaaacgtgacttctgagtgtgtctttgagggcgtttccacaagagatgagcatttgattcaatggcctaactaaagaagatccaccgtcaccaatgtggatgggcatcatccaatccacccgagggcccagaggaaacaaaaaggtggagggagagtgaattcattctggttcctggtgctgggacatccatcttctcttgcccttggacatcagaacacctggttcttgggccatcagactctgggacttacaccaatggggcctcttccacttcttgctcagggctttggccgtggactgggagtttcaccattagttcccctggttttcaggctcccacactgagactgagctatgccacctgctttcctgggtctccagctgcagacagcagatggtgggactccttggcctccataatcaagtgagccaattcccatcacacatctcctcttttatctatatctgtagctcctatcggttctccttctgtggagaaccctaactaatacaggcactatccaagagaaatgactctatagatgcaatatttggcagctctttctcttttttttttttttctcactctgtcacacaagctggagcccagtggcccgatcttggttcactgcagctgaagcgatccacccacctcaacatcccgagtagctgggattacaggtgtgcgccaccacaccaagctaatttttttttcttttttttttttttatagagacagggtctcatcctgttgcccaggctggtctcaaactcctgacctcaagtgatccgcctgccttagcctcccaaagtgctaggattacaggtgtgagccccgcacccggccttggcaggtttcttaaagtgcagtggatccctatgtactgataagaaaattgctccaagatatacggaaaagctagttgtagaactttttttttatttttttttgagacggagccttactctgtcgccaaggctagagtgcagtggtgtgatctcgacatctctgctcactgcaacctccgcctccctggttcaagtgattctcctgcctcagtctcccgagtagctgggattacaggcgccggccatcacgcccagctaatttttgtatttttagtagagacggggtttcgccagtttggccagcctgttctcaaattcctgacttcaggtgatccacccacctcggcctcccaaagtgctgggattacaggtgtgagtcaccgtgcctggccagaaccatttttaaaagctgttttgtatgagtatagagaaaggtctgcggccaggcacagtggcttatgcctgtaatcccaacactttgggaggcctaggcggggggatcagttgaggtcaggagtttgagaccggcctggccgccatgacgaaaccctgtctctactaaaaatataaaaattagcctgacattgtggtgcacacctgtaataccagctactcaggaggttgaggcaggagaattgcttgaacccgggaggcggaggttgtagtgagctgagatccggccactgcactgtagcctgagcgagggagcgatatttcatctcaaaaaaaaaaaaaaaaaaaaaaagatctgcaaggataaaaactaaactgttcaaagaactgttaaaagtggttctccctgaggcatgaggggaaaaagaattaaagtgaaaaattttccttttttctttacatatttctgaatttttttagtagtaagtatgtattacttttataataaaaaaggaatatggaaaacaatgttttcaaccaattttaatgatatgggcaagtactctaacaggtgaaaaaaattagagcatgaaataatgtgtacagtatgagctcagctacagaaaaatgcatttaaaatccaggtaggaaatatatcaaaatgttaatagggattgcctctgggtggcaggattataggtgggttttttttctgcttttacttttctatactttctaaatgtgccttattatttgtataattaggaaaaaattaagttgatctgccaaaggttcatggcaggttgtaaaacacaggcagctgaggccagtttcaactgcaggtcattgctccccacaccgggggacgtgacggcccaatattgttaaccagcaaaggaaaatttcctaattgcaattttcctaattgcaggtgaggagaaaacatggtttgtctccattttgcttttctgattagattgcaagagaagacaggggagagagatgccaagggaacaaagttctcctggtaaagaggagcagaatcaggagtctctgggctaagggacgtccagatgtactctcctatctatttttttttttttttttttgagatggagtctggctctgttgcccaggctggagtgcagtggcgcaatctcagctcactgcaacctccacctcctgggttcaagcaattctcctacctcagcctcctgagtagctgggattataggcacccaccaccacgcctggctaatttttgtatttttagtagagtcagggtttcaccatctcggctggctggtcttgaactcctggcctcatgatccacccatcttggtctcccaaagtgttgggattacaggcatgagccaccacgcctggcctctcctaggtattttgaaatatatgatacactattattggcaatagtcagtctactgtgcaacagatctcaaaaattattcctcttgtcaaattgaaacatataagtgaaatcatgcagtagtggtctttctgtgcctggtttatttcactttgcgtgctgtcctccaggattcatccatattgtcacaaatgacaggatttccttctttttttagggctgaatgatgttccattgcatatacactctagcatcctttaatagcttagaggcagttgtcctctgcagcaccaccactaagaaagaggcataacactaagtggaactctatggttcttagcggcaacataatttcacatttacgtacactgttttgacacatttgttgagcagggaaaccagctatccggtggtggggtgactaactcctttattatggtatctagaattgtcatgcttgagaatttacttatttaaatacattttatctttattttaaacaaattattcgtttcccctttattatgcagttaggaatagagatagagagatggataaatagatcttaaaatttatgtatgtagttaggatgttttacctctgaatttcattcagagtagtaaaggggatattacaaaatatttgttttacaaagaggctttggggtgggaatagaaatcctggaccagaagtggatgtggcactaatgagactccaggttacttccctttgcaggtaatgcatacactttctgtttgtttgttttgttgttgttgttggtttttttttgagctggagtctcgctctgtcacccaggctggagtgcaatggtgcgatctcggctcactgcaacctttgcctcccaggttcaagtgattcccctgcctcagcctcccaagtagctggaattacaggcatgcgccaccatgcctggctaatttttgtgtttttagtagagatggggtttcacatgttggccaggctggtctcgaactcctgacctcaggtgattagcttacctcagcctcccaaagtgctgggattacaggtgtgagccaccatgcccagcccacttctgattatacaaaggattatatctttgtatcagcgacaacattttcatttttgaagtatgaaaatggggagaatttttttcattgccaagcagccggagatgtgggctctggtgagcatctgtcattcttctcattactcagctcctgaacaccccatatctggctcctgggcattccttgcctcatgagtctcaggacaggcagagactgccttcccagaagctagaaggtccagacgctgccttcccagcctcccgggagctgggtgtggactcctgtcctgggcacacgcagagaagatgctcctgccctggactttgagtgaggatctgattgacttccactggtaaggggggatctccttactgagcaggtgatatttcagctgagctttgaaggagaagtagatactccaagttgggaggttggagtgagcagtaggtgggttaggaggttgggtcggtgggcaggtattccaggtgtggcaaaggaataagtataaatatattttaaagtaggcaaaatgctattaattttactcatggatattggggtctaaggaccctgaaaaaggatcagatttaggttctttgtatgaccttgggcaagtttctcaacctctgggcttagtttccttacctgtaaaaaggaactactcccagtgatgtgccaacctcacaaagtttttgtgggatcaaatgaaaatgaaagtaaaaatactttttttttttttttttgagatggagtctcactctgtcacccaggctggagtgcaacggcgcgatcttggctcaccgcaagcttcgcctaatgggttcacgccattctcctgcctcagcctcctgagtagctgggactacaggcacccatcaccacacctggctaattttttctatttttagtagagacggggtttcactgtgttagccaggatggtctcgatctcctgacctcaagatccaccagcctcagcctcccaaagtgctgggattacaggcgtgagccactgtgcctggccaaaagtaaaaatacttttaaatgaaaaagcctattagccgggcatggtgtgtgcctgtaatcccaggtactcaggaggctgagataggaggatggcttgaacccagcaggttgagactgcagtgagccaagactgtgccactgcactccaacctgggtgacagagtgagacccccatctcaaaaaaaaaaaaaaaaaaaagaaagaaaaaagaaaaaagaaacagcctgaacaaaaatcaataactatgaataattggcatggggttgtgagagcaaaaacaaaatagagggcgcaaagtccaggctgagagaggttggaagagaattaagagtttgggaaggaatttgtcagataaaaaaactacttttctggaaagcagaaagtatgggccccagagggtcagggtaggttgggggaggtggtcaggaagcttttcacacctagccagccggcaggtgtcagaaggagcagagagatgcagctagagaagggaggtgcctgggctgggcacggtagctcatgcctgtaatcccagcactttgggaagctgaggcgggcggatggtctgagctcaggagtttgagatgagcctggacgacatggcaaaaccccgtccctactaaaaatacaaaaaaaatcagctgggcgtggtggtgcgtgcctggtagtcccagccactcgggaggctgaggcaggagaattgcttgaacccaggaggtgaaggttgcaatgagccgagattgcaccaccgcactccagcctgggtgacagagcaagactgtctcgaaattttaaaaaattaaaaattaagagggaagagcctcatgcttcctctctcctgaggcaggattcatcctacatgtccccacagttcttgtgcagtcaccccaactgctttgtgggtggtcctaacctttcagtcagtcttggtacaaatgccttttgttattagtaaactctatctagccaatgtcttctctcacatttgagtctaaattttcatctcagaaagtaattctaacttcatctgggggagctctgccaactctcccatgcagaatgtgacatatggccgtaaatgacctgtcagccttgtgcagacaaggagcttaatgcagctcctgcaaatattgtcacttaggtgctcctcaggaccctcaaggtcaacaggtccaaagagaagtcatcacttttgttcattaacactccgcctttgtctctctgtcttgggcgccatcttcctacttacctgggctcaaaatcagaactcatatttgacaccaccttcctgtttgtgtcccaacccaaacttgtgactgcgagtaatttgaaagtctttgccctcaggcatttggggtactgcagaggcctggcaggaacgtgtgcttcaggcatccaggttgctgacagggaaatgaatcgtttagcaagggagcgtcgaccgcccgcagcaccttcagcccaatgggtgatgctcttaaagccggggattcctgaaggtctgcaaaagtgctcctcatggatgacaaggacccattccattgcttctacaatgtctctggggctcctgtgctgtttgctccccaggcccgttggcgtgctcatcttcacttgggctctggcagtgatttccccatttcttcctgtccccataaatatggcctccatcatgaaggtcctctctcacacacacacctggccacgcccttctcagacctttgggagggactgcatcccacagaatcagggttgagcccttcacctgaccctccaagccatcacagccaggccacagccctttctccagtattcccttccatccagcttttcttcttcattgctgccgctcctgctgcaaccaaattcacctgtgcggctactctgcgatgaaagaaccagcccatgtcacatgctctgtcaatttgatcagtgttgtcattgtcctgggtcatcatactgttactctcactaccattccaaactataaatagtctgctaagaagagcaagaccaggccaggcatggtagctcatgcctgtaatcccaacactttgggaggctgaggcaggtagatcacttgacgtcagaagttcaagaccagcctggccaacatggtgaaaccccgtctctactaaaaatacagaaattagctgggcgtggtggcagacgcctgtaatcccagctactccagaggctgaggcacgagaattgcttgaacttgagaggcagaggttgcagccaagattgtgccattgcactccagcctgggtgacaagagcgaaactccatctcaaaaagaaaagaatagcaagcccgtaaatgctgaaaacagagctgatgattcaagttgcataaattaattgtataagtgagagaaaggtcagggacctggtgacagcatgtggccctgggctgaaagacggcctgctcatcccaggagggcccggggagctgggaagatgtgggtaacggcacgcccctgccatgctcctgggccttgtccccagccaagccaccccactgaggctgccagatccacaatgtgaggagacacaacttcacatggagttttcacaccttgtggctggaaaaagttctggatgcaaatacattctccccagagctctggtggatttgagcaggcactgatgtgagaggacgggaaatggaggaaactaaataggtcacagccttgatctcgtcccaggcctggcctctccgtgaacccaggcttagcctttgggctttaggggaaagggtagaagaggcaggagcttggccgggtgcggtggctcatgcctgtaatcccagcactttgagaggccaaggcgggtggatcacaaggtcaggagatcgagagcatcctggataacacggtgaaaccccatctctactaaaaatacaaaaaattagccgggcatggtggtgggtgcctgtagtcccagctactcgggaggctgaggcaggagaatggcgtgaacccaggaggcggagcttgcagtgagccaagatcatgccactgcactccagcctgggcgacagagccagactccgtctcaaaaaaaaaaaaaaaaaaaaaagaagaggcaggagctagagaaagggggagaaaaggccactcaccctaatgtaagaggcagacaggtgacgcacaggacgccccctgtaaatgggagaggggacagcttcaatgagagtggcccactttggccctcctcatccctctctcctatggcttaaaatgaagctggggctttgtttttcaaagagagcaacagcgcaggggataactgcctttgaaaaagtagtttgttactcacagttcccatgaggaaggggcacaccacaccacacaggctcacacagggcagcaccagggttggtcaggaggcagaggcggtaagaggggaacatgggctggagcatttatgggctgaagggtttatggggtggaaacacgggccggagttttgtgggaaatcatgcacaaggtggggtatgcaagctgagcaggctctggatgagatagtttgaataattttggtgggctccaggggtggtccctagttgtctgctacctggtcttggggtgattcagaccaggggataatgtgctggactgcaggagccagtcctgatcaaaggacacagatcaagagtgtagactcagaaggagctggtctgggccgggctcagtggctcacacctggaatcccaacattttgggaggccaaggcaggaggattgcttgagcccaggagtttgagaccagcctgggtaacatagcaagaccttatctctactaaaaattttaaaaattagccaagcatggtggtgtacacctgcagtcccagctactcaggaggctgaggtgggaaggtggcttgagcccaagcagccaagcctgtagtgagccatgatcgtggcactgccactcgagcctgcgtgacagggtgaagaggtggctggtttgcatatgaaagtcaggcttctaggtgagttgtctgctatttctaggcattaactagccctggcataagagcagtctctctccaggttcacaaggcccccaagatgtcaagcatcacaaaatacagaagataaaaaacatgagtaatatctgccagaatatggcaaagcatcagtgaatctctgcaggatctgcaacttctctgtaagccccacccaatgatgtagggcccaagagccaaaatggcaaagtcacagcaagatgctccaggttccctcaactctaatgtcagctggtggaaacttacactgtcaccctctcccaggcttcaatttcacttatcagtgaccttggactcctctgtgaccttggacaggttacttcttccctagggttattgggagaattaaagaaatctgtgtacagaagcttctctacccaggcttcttgctctgagctgcataactcctgcctgagatccctctggagctgactaggaaggtcctgactctaccagagaccttcatatgacctgtgcctgggccacattcaattaactgtggttacatcgtgaggccaagagaagtgactttttttttttttttttttttgggacagagtcttgctctgttgcccaggctggagtgcagtggtgcaatctcagctcacttcaacctccacctctctggttcaaggattcttgagcttcagcctcctgagtagctggggctacaggtgcacgccaccaggcccagctaatttttctttttttgcttttttgagacagggtcttgctctgtcacccaggttggagtgcaatggcaccatctcggctcactgcaacctctgcctcctaagtttaagcgattctcatgccttagcctcccaagtagctgggtctacaggtatgcaccaccatgccaggctaatttttgtattttgaatagagacgggattttgccatgctagccaggctggtctcgaactcctggcctcaagtgatctgcccaccttggcctgccaaagtgctgggattacaggcgagagccaccatgtctggcccttaatttttatttttttatttttagtcgagatggggtttcgccatgttagccagactggtcttgaactcctggcctcaactgatccacccgcctcagcctcccaaagtactgggatttcaggggtgaaccactgtgcccggccagaagtgactgccttaaggagacatttcagagaagaacaggcagatacgggggcaatgtcaaatcaccccaaacaggtgaaaatgaacaccattaactgggagggctggctgggctaggcagtcatcacgaaggactggaagggggctctgagggcctaggacacagagctcaccccggagtgtgaggtttttccggtgccacatgcagaaggctggcatccctcagctggtccacagatctgctgtagccctaatactgaaattaggcatatacagtaaacataacaacaaagacaacatttttagctctgttaggcccaggatgagaaataaattcacaacctcaaaggaaaatggaaatgtcacatccttttcaagttcctggtagtacctgtacattccaaactggagaacagactattcatttactttgaaaatggacttttttttttttttttttttttttttcctgagatggagtcttgctctgtcgcccaggctggagtgcagtggcttgaccttggctcactgcaacctccacctcccaggttcaagcgattctcctgcctcagcctcccgagtagctggaattacaggcgcccgctaccacgcctgactaatttttatattttagagacggggtttcgccatattggccaggatggtcttgatctcctgacctcatgatccgactgtcttggcgtcccaaagtgctgggattacaggtatgagccactgtgcccggcagagaatgggccttttaaattttttttatatttttatttacatttttgagacaaagtctcactctgttgcccaaactggggtgcagtggtgtgatctctgctcactgcaacctccacctcccgggttcaagcgattctcctgcctcagcctcctgagtagctgggactacaggcgtgtgccaccatgcccggctaatttttttatttttagtagagacggggtttcactatgttggccaggctggtcttgaactcctgacctcaggtgatccactgcctcggcctcccaaagtgctggaattacaggcgtgagccaccgcacctggcctgaatggacctttttaaatgtaagattgtttctcctagtcttcttgtatttacaaattccatgaagactaaaatttagagttcatctccgcaaatactcctcaatcccacctcctctcaacacaaagatctctctatataattcctgataagagagcaacctttcgctgaagagatttcacagaattctgtagccaacactctttgtcatcccatgtcccagccagcactgtgactgtggaaccacccagaccttagaccccagggtacccccgtacccctgttttctaaaatgcctgactcatcctgcccaggctttcatgaagaaagcgaagtgaaagcctcccacacgcctttaaaaatgtctcctctaaattccagttgtcgtagtaacatcttcacgctgccttggtgcctttatatattttggtgctgatggaccctccgttaccatgagaacagaagtagatttaaacaaagagaattttgtggcacttatcttaatgtcttatggaaaacaaaacccatgcccacggcgaccgcctcagaagagttcagagggtttaacaatggaatggcaagaagtcctgagttcctgggacctagaacgccactggagttccatttcatttgttcttcgaattttattttgaggaaaatgtgcatcgttgttgtttttaagattctgttgcaccattgccattctgaagtgagcagatctgttgtaaacgcatattcttaccttcagctttgaggacaaacttatcactcctaccacaaaattgtaaccatttcctgagctgtgcttcactctacccccacaccccagccccacagccccttgtgacagggcagtgccagctgaactgatgttccctgctatttcagactcaaggtctgtgcatctattctttctttcaaagctaaatgtttgaaaaatggaaggtctttgagctcaaggacattaacacacacttcttcagcactctctgcatagtcctaattgtcagtttgttcgactttttttttttttttttttttttttgagacgttgttttgctcttgttgcccaggctggagtccaatggcacaatctcggctcactgcaacattcacctcccgggttcaagcaattctcctgcttcagcctcccaagtagctggaatttcaggcatctgcccccacaaccggctaatttttgtatttttagtagagatggggtttcaccatgttgaccaggctggtctcaaactcctgacctcgggtgatccacctgcctcagcctcccaaagtgctgggattacaggtgtgagccaccatgcctggctttgactttaaactttccattctgatgtacagaattaagtttctgttgagaattttaaatagttaacttcacaggatttgtatgtgggaacaaacttgaaggtaggaagaaagcaaacccacagtctgaatagcaggctgtgtcagtgacacattccttaattagtccttgagaacactaacatgtattgtgtatttaccacatgctaggcactatgctaaccacatagcctgttgtcttcatctgttttctgtagctataacaaaatccatatactggataatttataaagataagaaactatttcttacagttttggaggctgggagtctgagtgcatggcgccggcatgtttcaagggccttcttgctgctttgtaacactgtgaagggcatcgcatggtgaaagggcaagagactgtgtcaagttaggtctctcttccttgtttttttttttttttttttttttttgagacggaacttgctctgttgcccagactggagtgcaatggtgcaatctcggctcactgcaaccctccgcctcccagattcaagcaattcttctgcctcagcctcctgagtagctgggactacaggcccgcgccatcatgcctaatttttgtatttttttttttttttagtagagacagggtttcaccatattggccaggctggtctcgaactcctgacactgtgatccgcccgccttggccccccgaagtgctgggattacaagtgtgagccaccgcgcctggccagaggagggagatttcattccgaggcctcctctcttggcttgtaggtggccgccattttgctgtgttcacgtgaccccttctttgtgtgtacacgtggagagagagggcaagctctctggtgcctgttcttaaagggactgtgaggcctctgagcccaagctaagccatcatatcccctgtgacctgcacgtatacatccagatggcctgaagtaactgaagaatcatagaagaagtgaaaatggcctgttcttggccaggcgtggtggctcatgcctgtactcctagcactttgggaggccgaggcgggcagatcacaaggtcaggagatcgagaccatcctggttaacacagtgaagtgaaaccctgtctctactaaaaatacaaaaaaactagccgggcgtggtggcgggcgtctgcagttccagctactcagaaggctgaggcaggagaatggtgtgaacccgggatgcggagcttgtagtgagccgaggttgcgccactgcactccagcctgggcgacagagcgagactccgtctgggggtgggcgggggagaaaggcctgttcctgccttaactgatgacattccaccacaaaagaagtgaaaatggccagtccctgccttaactgatgacattaccttgtgaaattccttctcctggctcatcgtggctcaaaagctcccccactgagcccttgtgacccctgcccctgcctgccagagaacaaccccctttgactgtaattttccactacccacccaaatcttacaaaacggcccccacccctatctcccttcactgactctcctttttcggactcagcccgcctgcacccaggtgaaataaacagccttgttgctcacacaaagcctgtttggtggtctctttacgcaagtgaaagggacactaatcccatcatggggattccacacttgcgttagggttctccagggagacagaaccaataagatacatgtatatacgaaagggagtttattagggagaactggctcacacgattacatggccaagtcccacgataggctgtctgaaagctagggaaagagagaagccggtagtggctcagttcgagtctgaaagcctcaaaaccagggaagccgtcagtgcaccctccagtctgcagctgaaggcctgagagcccctgggaagtcactggtacaagtcccagagtccaaaggccaaagaacctggagtctgctgtccgagggcaggaggtggggaagcaagcatccagcactagaaggaaaaatagagccagaagactcagccagcaaagctatccctcttcttccgcctgctttgttctagctgccctggcagccgactggatggtgcccacccacaatgatggtgcgtcttcctctcccagtcctcaactccaatatcaatctcctctggcgacatcttcacagacacacccaggagggtactttaccagccatctaggcattcctcaatgcagtcacccaatattcaccgtcacaaccctcgtgacctcatctaaccctaattacctcccaaaggccccgcctccaaataccattacatttggagttaggggttcaacaaatgaactgaagagggaaggaacaaaaacattcagctcttaacaggcggttcttgcccccatcttctgtacatggtggcagctggagacattctgggtggactggctgcaggagccatggtggccgcccaaggtggagctggagaaggcactcgaccttccttgtccgtccgtggagcctacagagggctgaggtcaacttaccggcactggggagacagagactgcagtagagcccatgaatggagggctctgggtaatatgcaaagatctggggtacaggggcagatgcctctgactgggcaccgtggtgagccagacttgtcattcaagggaaggacctgtcagcaggctgctgcattttgaccagaggcctatattacgagcacgtcagctgacccatccatcaaagcaaagctgggccaagggattctctccaccacagcaacctaggggcccatccctcccacaccctgcgccgccctttcatcgcctctcaagatcaacattagccacaccttcaaactcttctgtcctccatctgagctcacttggtggtggtgtgcacacacacaacacacacacacacagtgtacacaagcactcagagtgtgcacgcacgcacacagacacacgcacacatgcatatggacatacacagagtgtacgcatgcacacagtgtgcacgcatgcacacgggcacacgcacatgcatgcacacagacacacacacacaagcacacggatgcacgcacatggacacacacacagagtgtgcacacacgcacacacagcctggctgtacggcggcctcaagccgcggcgttgccatatgggctcttggaggctgaatttagcagggcggatggagctcaaccacgtccccgaacagaagccctcaggctgcacacacccggcaccacactgtcaaagaggtcaagggtgaaggacacagagagaagcggtcaagtggtgctgacgattcaactccaaggtcaaggcgtgggccctattgggtggacactgctgtttatagctccccttgtgaagcgtttttggcaaatacgatgacagtccgcatgacagtgactggggacacgtgagtgagcccctgagctcgcagccgcagtttgcatggcctccccgagtctgcactctgaggctctgcctccagcctgacgtctcatcacagcttctctacctcctagtctatatcctaccttctatatcctagtcagggagagaacacacaaaattgaaataactgcagacggctgttcaccgcatgacagatccaaggtgcgaataaggaaatgtagattccagctgggtgtgtcaggagcggtgaagggcgagcaggcaggtgtggactgttttctgtgggaggtgggttcgaggcctcagagggtaaaggagtggggtgggccaggtgactagtagcccaggtgtggccttgagactggggggcaaggtgtgcaggggcagagggaggattggcttctctgcgccgcgaggggagagaaggcttcgagcaaaggactggggtggtggccggtccttctgagaaagcctctcccttctatctgccacccaccccaccctgcccccacgcagagagaaagcctcggggcatgggggcctctgccctgcatctgctgtccctctgccgccacctctctcagagacctggaacaaaaagggagaagccttgattttattttgtattttgtattgttgtaaaatatacataaaatttaccattttaaccatgcttaagtgtataaattagcagcattaagacccttcacaatgttgtgtaacaatcactgacatgcatttagaaccttttcatcatcccaaacaaatgctctaaacaataacttcccagccaggtgtggtgacacaccctgcagtcccagtcccagctacttgggaggctgaggcctgaggattacttgagccttgggaggtggaggtttcagtgaggcacgattgtgccactgcattccagcctgggtgacagagcgagactctgtctcaaaaaaaaacaaaaacaaaaacaaacaataatgagtttccattccagcccctcctcagcaacacccccctcccacacaccaccaccaccaccaccaccaccaccaccaccaccaccaccagcactattctacattgtgtcaatgaactcacctattctaaattactcatctaggtgagtcatagaatatttgtccttttgggtctggcttatttcactcagcagaatgttttcaaggttcatcactgttgtagcatgtgtcaggatttccttcctctttagggctgaatattgagtgaacgcatcacatctgtttatccatttgtctgctcatggacgcttggtttgattccaccttttggtcattgtgaata

SEQ ID NO: 1452 - protein, 361 aa, Homo sapiens
MLPRLVSNAWAQGIRPPWPLKLLGLQPAKGKKGKGQGKSHGKKQKKPEVDILSPAAMLNLYYIAHNVADCLHLRGFHWPGAPKGKKGRSKTLGQVQIAGPYPRRKDGAQGFAFLVRWQVMLVLPSHTVRQGQSTCKGTKKGAWQSEGTEQSSDWGRGRREPCGIPVDPFRPAWWLQDPSRHQGQQQQRGDSSFLSCCSERADSASSGYLVLLALHRFLPLSPQAAHTRHHTVKEVKGEGHREKRSSGADDSTPRSRRGPYWVDTAVYSSPCEAFLANTMTVRMTVTGDTSKVRIRKCRFQLGVSGAVKGEQAGVDCFLWEPLLSNTPLPHTTTTTTTTTTTTTTSTILHCVNELTYSKLLI

SEQ ID NO: 1453 - DNA, 889 bp, Homo sapiens
  source
  (1)..(889)
  CDS (201)..(689)
gtctatgatcctaacctgtacaatattggatatatttgtaccagacctgtttattttcttcctgagtaaccaaagcatatattttatacagaatgaggtattttctaactttgatttgttattaattagtatttcttaagtgatttccagagcactgtgctaatagttttgagaccacagacacttacatattatataggatgatacagtgtgttgctaaactcatggattttatactacagtataaggtacatcaatgtaaaacaaggatatccaatttatttatttatttacttatttatttatttttgagacagggtctcactctgtcgcccaggctggagtgcagcggcacaagctcagctgactgcaacctctgtctcctgagttcaagtgattcttctgcctcagcctcccaagtagctgggattacaggcatgcaccgccacacctgtctaatttttgtatttttagtagaggcagggtttcacctgtctctgcaggtggctagctggtttcaaactcctgacctcaagtggtctgctctcctcacatcccatagtgctgggattgcaggcatgagctactgtgcctggccaagaatatccaatttaaatcagaaaagaaacaaacaaatggttagatacgttctgggaagtcacgtgggtgctttgaatgacccattgtgaggaaggtcacgtcagattgaagttacatgagtatggggcacaaacatcatcacagcagaaatgctgatgccaatatttgtcaagcggaatgtaccctccctcttaactggtaatatgttcaggccttattctaagcactttataatattttaactcaatcttggctttatgtctattttacagatgagatagctgaagca

SEQ ID NO: 1454 - protein, 162 aa, Homo sapiens [sequence omitted]

SEQ ID NO: 1455 - DNA, 1237 bp, Homo sapiens
  source
  (1)..(1237)
  CDS (201)..(1037)
ctattaaacctctttcctttaaaaattacccagtctcaggtattttttcatagcagtgtgagaacagactaatatagtaaattgataccacagagagtggagtgctgctataaagatatgtgaaaatgtggaagcaactttagaactgggtaacaagcacagattggaacagtttggaggactcagaagaagacaggaaaatgtgggaaagtttggaacttcctagagacttggagggctcagatgacaggaagatgtgggaagatttggagcttcctagagacttgttgaatggctttgaccaaaatgctgacagcaatatggacaatgaagtccaggctgaggtgatcacagatggagatgaggaactttttggcaactgcagtaaaggtcacccttgctatgcaaagagaatggtggcattttgcttctgccctagagatctgtggaactttgaacttgaaagagatgatctagagtatttggtggaagaaatttctaagtggcaaagtgttcaagagaaagcagagcataaaagtttgaaaaatatccaacctgaccatgcaatagaaaatagaaactcattttctggggagaaattccagcctgccacagaaatttgcataagtaatgaggaatggaatgttaatcaccaagacaatggggaaaaggtcagagaccttcatggcagcccttcccatcacaggccaggaggcctaggcgggaaaaatggtttcaggggcccagcccaaggccactctgctctgtgcagcctcaggacatggtgccctgtgtcccagctgcttcagctccagccctggctaaaaagggtcagcatacagctcaggccattgcttcagagagtgcaaactccaagccttggcagcttacacatggtgttgggcctgtgtgtgcacagaagtcaagaattgaggtttgggaacttccacctagatttcagaggatctagggaaatgcctggatgtccagacagaagtttcctgcaggggcagagccctcatggagagcctctgtgagggcagtgcagaagggaaacgtgaggttggtgaccccacacagagtccccatgcgggcactgcctagaggagctatgagaaaaaggccactgttctccagaccccagaatggtagatcaaccaacagcttgcaccatgcacctggaaaagccacagacacttaatgccagcagtgaaagcagccaggatgggttgtatcc

SEQ ID NO: 1456 - protein, 278 aa, Homo sapiens [sequence omitted]

SEQ ID NO: 1457 - DNA, 886 bp, Homo sapiens
  source
  (1)..(886)
  CDS (201)..(686)
gatgtagggtcatagctgtgagcacatctgtgctctcatgaaacttccattttagtggttggaataagtaaaaacaccagggtactttcattttcttttccaaattatgaatcctaaaatgaccaacttcacagcagttgcagaagttaaggtgcactttgtacaaagaaagtttccagcatattctgctgcttagtgctatgctaacaaaacaaaacaggctcaccaggtgtgaattcattctgatcactgtccccttcagagaggtgcttacttcaaaaagccaagtattacctttcaaagtcctgaggtgggaggagttcacacacggtttccctttggttcccttacttcttcccattactttccctcagacatatactactttatataatatagttatatatgtatatatgtgtatacatatatgtgtgtatatgtgtatacatatatatgtatacatatatgtatgcatatgtgtatacataggtgtgcatatatgtgtatacatgggtgtgcatatatgtatacataggtgtgcatatatgtgcatacatatgtgtgcatatatgtgtgtgcatatgtgtgtgcatatatgtgtgcgtatatgtgtgtgcatatatgtgtgcatatatgtatatgatgtacatatgtatgtgtgtatttttattatttatttattttagagttggggccttgctctgttgtccaggctggagtgtagtagcaccatcatagctcactgcagccttggactcctgagctcaagcaatcctcccacccttagcctcctgagtagctgggactacaggcgtgcaccaccacgcccagctatgtgtgtatattaaagtctgtttcttttcactgcattcatagtggttctagg

SEQ ID NO: 1458 - protein, 161 aa, Homo sapiens
MLTKQNRLTRCEFILITVPFREVLTSKSQVLPFKVLRWEEFTHGFPLVPLLLPITFPQTYTTLYNIVIYVYMCIHICVYMCIHIYVYIYVCICVYIGVHICVYMGVHICIHRCAYMCIHMCAYMCVHMCVHICVRICVCIYVCIYVYDVHMYVCIFIIYLF

SEQ ID NO: 1459 - DNA, 7862 bp, Homo sapiens
  source
  (1)..(7862)
  CDS (201)..(433)
  CDS (3414)..(3766)
  CDS (3873)..(4084)
  CDS (6727)..(7008)
  CDS (7360)..(7662)
gctcaaatcagtctccccgagcgtttggggatcagagattttaaggataatatggcatggtctcaggaagtggggagtgctgattggtcaggttggagatggaatcacagggggatcaaagtgaggttttcttgctaccttctgttcctgggtgggatggcagaactggttgagccacattactggtttgggtggtgttgatggcagcggcccatctggagaggctgctgccaagatgccggctgcagcaggggaggcgccgcagggccgcgcgctttgtggagccggcgggagctgagaacaggaaggaaagagccctgccggcttctgagctggtggggaggggaccctgcagtcccaggcgcaagggcagctgcccagccatggcttcagacccgggcatccgtgtcctctccggcgggggttgggggcggtggcggggggttgggggagggcacgggaagcctatattagaccaaatatcatgttatattttgtgtattcattttttaacccataacaatccaaactagattttcttactgatttattttgcttgtttattaatctcattatgtagaatatattttggaagttgccttaatagtttttagaggaaaacaggataaaaataaataaatatgtaaaagatgccagttttccttatatgtatatgtaatggtgtaaaaaagcactaaataaaataatccgtgtagtggctagggaaataattaaagttaggtttttggtccaggcgaggtggctcacgcctgtaatcccaacactgtgggaggctgtggctggtgatcacttgaggtcacgagttcgagaccagcctggccaacatagtgaaaccctgtctctactaaaagtaccagaattatccaggtgtgatggcgggcgcctgcaatcccagctactctggaggctgaggcaggagaatctcttgaacctgggaggcagaggttgcagtgaggagagatggcaccattgcactccagcctgggtgacagaacgagactgtgtctcaaatacaataaataaataaataaataaataaataaataaataaataatcaggtttttgaaggaatcgagattataaaagtatatttcagaaaagggtgcagcaaatatcttttgaaaattcaagggcagaggtatttctggcagaagtaatgatatgagacatttactacaatattgtttctacttatgcttctgtagtttactaaagacaattattgtttcattggaaatgtaattaatgaacgtgaccctcagtaccatagattgggagccacaaggctggccctgggctgactgtggttggactcactcaggaaccggcttggctggtctcctttaaataactgctgccagctactgccaggagttgcaggatgggaggaagggaagctgactggcccagctgatccataaacagccctttaatagcactgcagttgcttgtgatgagtgcctgggattctaggtttgttttaatagcactgcagttgcttgtgaggcgcgtgcctgggattctagatttgttttaatctttcttttgtgaggggtttccatctcaccctcaactctgttctttgcatcgttcgggctacacatcccaatgtgttcccatctcctcctgccctctagggtgctgaaggttttgcatcctgttctcagcatggacacatatcttctcttttgtccatcacatggtcatttcaataggatgttggtagaataggaagaagatgcacgtgtgtttaactaatcatttttaattagaaagccagaggttgaattgaaaaacaactcatattgaaactgcatttgcaataattataacagtgaggaaattatggcagtggggaagatctaatatagccaacttccctcttatattttaccttcatgttgccttaattattactgggcttaggatgggctagctttgggagacatgtagtttacagtttaaataataatagtccttctccaaaacccaaccacctttataaagctaatgagagaccaccaggctgggaggagaggagcctgaattctgcaaaggtgtagacataaaagactgccagccattattccagaggtcacgagatatgcacacctgtaagtcaccagtcagcaggagctatagtcttggaaggccagagctataaccagacatgtgctcaggagaaaggggactgcagcagggtgaagagtgggcagcaggaaaaatgtatctccacctcccaggttcaagcgattctcctgcttcagcctcccaagtagctgggattacaggagttcaaggaggtcaggagttcaagaccagcctggccaacatgatgaaaccccacctctactaaaaatacaggcttaagatttaaaataaaataaataaaataaaatagtaaacatccctgccagcctgctgaattgaccttagagagtagggtgtgtagtgggtgtgactctcactgtcaccattgctaagtgcttactgacatctttcagtcttggggacccatcctctgctaaactctgccataagaaggtcatacatccccactgcctgtgatgtctcagttttgttttctcgtttcctcttacctttatgcaatcagtttctaggaagatgttgtttttttcttttttatgattgaaagaatttggttagtttgaccccataccatttcactttcagcacgtgctctctacggttaatgtcatccttgggaagcccgtcttgaacacctggaaggttttacaacagcaacggaccaagcagagttcacagctactacattcagtgggaaggttttcccaagcactacaattaggagatagccctcctttgtccttctcccaaactaatgtgcagatgagcagcatggtaatcatgtccagccacccaaaaacctatcaacagaggtttgttttcccatactttgacctctggggcaatgtggtcattgacaagagctatctagaaaacttgccatcagattcacctattgtcaccatggctttcccaactctccaagccatccttgcccagggtatccaggaaaataattttgcagagagcttagtgatgacgaccactgtcagccataatgtgactatgccattcagcatttcaatgacttttaagaacaacagcccttcaggcggcgaaacaacatgtgtcttctggaacttcaggctttccaacaacacggggggtgggacagcagtgggtgctatgttgaagaaggtgatggggacaatgtcacctgtatctgtgactacctaacatcattctccattctcaagtcccctgactccccagatcctggttctctcctgggaatactactggatattatttcttatgttggggtgggcttttccatcttcagcttggcggcctgtctagttgtggaaactgtggtgtggaaatcagtgaccaagaaccagacttcctatatgcgccacatctgcatagtgaatgttgctgcctcccttctggtcgccaacacctggttcattgtggtcgctgccatccaggacaatcactacatactctgcaagacagcctgtgtggctgccaccttcttcatccacttcttctacctcagcatcttcttctggatgctgacactgggcctcatgttgttctatcgcctggttttcattctgcacgaaacaagcaggtccactcagaaagccattgccttctgtcttggctacggctgccctacctgccatcttggtcatcatgctgggagccacccagccctgggaagtctatatgaggaagaatgtctgttggctcaactgggaggacaccaaggccctgctggcttttgccatcccagcactgatcattgtggtggtgaacataaccatcactattgtggtcatcaccaagatcctgaggccttccattggagacaagccatgcaagcaggagaagagcagcctgtttcagatcagcaagagcactggggtcctcacgccactctggggcctcacttggggttttgatctcaccactgtagtgaccaagagagatggagagaacgatggtgtaagacagtatataaggacagtaagccactgtatttgtggaaccactgcatgtcaaaactccttaacactctaacaaggcatttttggtcttttaagattaaggacagtccttacataagggactcagtttcaaactaaagtacatcaaaaagcaaattatacttcacaaacaactttaaagaggtagccacaaacccagttgttttagattggccttctaaatgaagtcagcacatggatccatgtgtgagtgtcatggacgtcagtgattatgtaactgtcactgaaagaaaaaggcacagctctgcagacacccaagagaagctggcatgtttaatgtggatgtagaagggataatgtccatggcaaatgattggaacacaactgtcagcagcctcaacacaggctaagactgggttaagccccaggagatgcagagaatgactgaggaagctgaggtctaagggcacagtacagaaggtagcttggagtgtgctgtgtttcctagagccttttaagttgggtggttgagtaaaggagggtggaggcaggctgttctacttccaatccatggataaatctcattttctcaatgtaatacagaggctgttcttctatgattggcaaacactatttgttcttatcatggaaacagcatactgctatcaagaaatagggaaaagacagtaaaaaaaatgtgtggaaagaatatggaataccatgcagccataaaaaatgatgagctcatgtcctttgtagggacgtggatgaagctggaaaccatcattctcagcaaactattgcaaggacaaaaaaccaaacgccgcatgttctcactcataggtgggaattgaacaatgagaacacttggacacaggaaggcgaacatcacacaccagggcctgctgtgtggtggggggaggggggagggatagcattaggagatatacctaatggaaaagacgagttagtgggtgcagcaaaccaacatggcacatgtatacatatgcaacaaacctgcacattgtgcacatgtaccctagaactttaagtataataaaaaagtgtggaaagaataatatgggtttctaactgaatgcttgcttttgaagagcccaaaaacaaacgaacaaaaaattctaagagcagcaaacatctacgtctgttatattactgaattactcatttttaaaatccttatttcataggagagatatttacaattttgaattacaacgtttgaaaaactttgaaaataacctgaaaggggaaagttgacctaagccattttattctcttaaaaaaaccccagacttttgtataatagtaatccctgaactgagtatttttgaaggtttttcagataatctgatgtgcaaagttagtttgttttactatttagttgtttggaatagtagagcattatatgaggctcttactggaggcttaatggtattaagagattaaaagctttcacattgttttttacatctataaataaaacaagttgttatcattttgtaatatttagcttatatacatttttgtgagagttttgtgggacttggaaagtgtatggactagcatcagacacaaattatttttccatctttctcacttggaatttcagatagcagcattttaatcatctcttccattaaaccaagattacacaaaagcgtttgaggacactgaggactgggacttctaattttgcttcagaaaccagtactcaaaatgtctggtttggaggtcagttacactgctgtctttgtataatcagccattaaagaatattttggggacatttctcagaagtctcatccccatatttttgttcttaacacatctcaccacaaactctaccacacctatggtttgcaaactttgggaagtgtcagtatatgtcattatcatggttattagtactattatttgttaaaagccctttgaaggcaatttatgcgacttatatatagttagtattttaatttggacattctccagttatatgcaaagattaaaactcggcagcttcattttatagaattggcatcttttatatggctatggggactgcttggtgtctataaattattatgtatatttgttggactgaaatcaaacttaaaatcttccacatttcaagtgtttttattctgagcagtatgtacaaaaaataacgccatagttgtgttaattctgtatagttcaggcaccctccacaggctgtcaatctctgatttgatctacttttaccagatttaacagatccttgaatttactttactgtctatacttcctttttgctcacattgggaatcagactaaacatgcgtctacttcattgaggaactccagattgagacatgctgggattgactccatggttagggaagatggatgaaatggaaacaaaacaggaaacatttgcttggcatctaatagcagttgctgagggccattctgctcttgtagttgtgcctggatcatttgtataaaggccactgttacctgttcttcaaattcattcaggggaggctaaaggtttaaaattttgacaatctgctgggtgctgagagaggcacacagggagcagatggcctctgcatcctcctgggttttcttctttaattgcaggagctgggctgcttggatcagaggttccatggtctgaactactccactctggtgaaggtttcttccccaaagccactcctcaagctgacttatattgtacctgagttgcatgcctgtgctccaagagcagacgtccttccgcaggagcaggtcattaagagtcactgcgttgatcatgtagaagagctgtttgaatacctgcaggatgatctcagggtccaagccctggtcacacatgactgtatgaaaggcattcatctggcggatgatagcttccaggcggtatgagttatccccatctgccatgctggaggagtgcttctgggagccagtgggcttcacaccagatagaccctgaatgctgtcattttccaacatggcagaaactatcatcggctgtaacacaccctcggcaattttaaagagctgctggtagatctgaatggaaaggtcgctcagtacctgacggtattcggtgaggtcaaagttcttaaggcagtgttcgttgtgctttgctgtattctgagtcatgaagccctcatccccgctgtaccgcttcagacagtgaagaaggtggcaggtgttggataacaggaatgacgtcatctcaaagtcatcactgtgcttcttcaggactttcttaatgccgttggtggtggaggtcatcagggagtgcaccttgagatcatcgttggtttggtccgcgagccgaatgcacatgtagaggatgtaggcggagagacagggcactgtgtccaacagcatctggggcttcaagtctgtcaccaggttgaggatgaggagggcctcgccctctttgcggcactccaacatgccctggaaatccttttctttccactgaactgggacctgcctgttgaactcatggcgcttcctctcactctgggccaacgcctgggcagcttcttcatgtaaatcttcagttgcttttagagcttcctctcattcttttcctcttactttatttttcaccacagagcttcctatcaactagtatgttgaatattttgcttattaactttgtttattgtcttctccctcgattagaatattagctacttgagtacaaggatttgagcctgttacattcactgctgaattttaggctcctggaa

SEQ ID NO: 1460 - protein, 460 aa, Homo sapiens
MAAAHLERLLPRCRLQQGRRRRAARFVEPAGAENRKERALPASELVGRGPCSPRRKGSCPAMASDPGIRVLSGGGWGRLAACLVVETVVWKSVTKNQTSYMRHICIVNVAASLLVANTWFIVVAAIQDNHYILCKTACVAATFFIHFFYLSIFFWMLTLGLMLFYRLVFILHETSRSTQKAIAFCLGYGCPTCHLALIIVVVNITITIVVITKILRPSIGDKPCKQEKSSLFQISKSTGVLTPLWGLTWGFDLTTVVTKRDGENDGELGCLDQRFHGLNYSTLVKVSSPKPLLKLTYIVPELHACAPRADVLPQEQVIKSHCVDHVEELFEYLQDDLRVQALVTHDCMKGIHLADDSFQADFLNAVGGGGHQGVHLEIIVGLVREPNAHVEDVGGETGHCVQQHLGLQVCHQVEDEEGLALFAALQHALEILFFPLNWDLPVELMALPLTLGQRLGSFFM

SEQ ID NO: 1461 - DNA, 853 bp, Homo sapiens
  source
  (1)..(853)
  CDS (201)..(653)
acaccctaaatgaagtcttttatttagtaatgtattccaaatacagagattgacccagattcaggaagtaatttattttggggtttctcaagttttgaacttaatacagcctgatcctcagttcctatctccagacccttatatccaactgcatatgtttctccaaacagatccctcctctgtggcatctcaaattctaaatgaacaaaattgaattcattatttccatctccaaatgtgcaccttcatcttcccaagtcaccagccagaaaccctggaggtattttaggctcttccctcctttcacttcttggtgtccaatcagtcaacacgtattatggcttctatttctttcttttttttttttttttttggagacagagtcttgctgtgtcgcccaggctggaccctgggttcaagcaattctcctgcctcactcagcctcccaagtagctgggactacaggcacacaccgccacacttggctagttttttgtatttttagtagagatgaggtttcaccgtgtgcccagtctggtcttgaactcctgagttcaggcaatcctcttgccttggcctcccaaagtgctaggattacaggcagctttcatttcttaaatgtctcaaacttgcctccctactccatcttctagtagtacatttactagcagaggttaagcatccctaatctgaaaatttgaaatctgaaatactccaaaatcttaaactttttgagcgccaacatggccacaagtggaaaatttacacataaatacttaacacaactttgtttaatgcatatcatttaaaatattgtataaaattatgttcaggctatgtgtataaaacgtat

SEQ ID NO: 1462 - protein, 150 aa, Homo sapiens [sequence omitted]

SEQ ID NO: 1463 - DNA, 418550 bp, Homo sapiens
  source
  (1)..(418550)
  CDS (201)..(521)
  CDS (130865)..(131002)
  CDS (166894)..(167064)
  CDS (212423)..(212524)
  CDS (227940)..(228005)
  CDS (235591)..(235791)
  CDS (254720)..(254956)
  CDS (302793)..(302853)
  CDS (314679)..(314759)
  CDS (319930)..(320080)
  CDS (323162)..(323294)
  CDS (337363)..(337470)
  CDS (346097)..(346219)
  CDS (397729)..(397839)
  CDS (402589)..(402813)
  CDS (405511)..(405693)
  CDS (409581)..(409710)
  CDS (415032)..(415149)
  CDS (418185)..(418350)
ttgatccgtcacgggcgccgccgctgccgccgccgccgccgcggccgttctgagccgagccggaaccctagcccgagacggagccggggcccgggccggcgccattgcgcgggcgccgcgggaagaccttggcgcggggcggcgggccgggccaggccatgcgggccgagtgagccggcgcccgcagcccgcggcgcggcatggcttccccgcggagctccgggcagcccgggccgccgccgccgccgccaccgccgcccgcgcgcctgctactgctactgctgctgccgctgctgctgcctctggcgcccggggcctggggctgggcgcggggcgccccccggccgccgcccagcagcccgccgctctccatcatgggcctcatgccgctcaccaaggaggtggccaagggcagcatcgggcgcggtgtgctccccgccgtggaactggccatcgagcagatccgcaacgagtcactcctgcgcccctacttcctcgacctgcggctctatgacacggaggtgagtgtccggctgcccctgccgtcggggcttcggggggcattggggtgggtggtttggacacaggcaacctccggcctttggtcagatccccgattgaccggcccgcgcctgccgagggcagagagggctggtgcccagtgttcacccccgcggtcctgctgggcttggctggcacagctggtaacatttgccaagcaccccctcctctggtcttatgtgtgtatgtgtgtgtggggaggggtgggggtgggatagaagactggggtctcttttgaccagagaaaaaggagtggagaaggtgggggctggacccccaaaggcctacattgattgtccctgtccaggtcccgctcatggggctgcgaggtaccgagtgggaggaacaggcgcattgactgcaaactgggccacccagggccggaggggccgcgggcctgctcacaggcccccagggaagccgagccgcgctttgaggtccggaaggctccggaacccaaggggcttgagcgtgcagcgtggctgggcgcctggtgcgcgccagcagctctgagcccgctccgcgcgggcaagtgtggggccaccggctctgcagcgcttctgcctggacgtgcccggcgctgcctgtggccagagcgatttcaggagacccctgcctcgggttagttgctcagaaagtgccctggcagttctcgtcccggacgtgcagtggtgtccggccgcgccgctgctgttggccgggcggctgcaggcagtttctcacggctcaggcttgaagcatccgacctagcagccggagcacagacttggagagcagtccggagcggagccagagagccaagggctttccatcccaagacccctccccacgccctcggtttgggttctgcctgaagccccagagcggaccttcaccgccaggccggggctggagcgcgcggagcgggtctggaggagcgatcgctggccgcgcaaggtcgggtttgcgagtttttccggaccgagcgagcccctgtgctccgaccgcagcgtctgagacgcggcctgaagggggcagtgatttcctgtgcagtacgctcggttggcgcctcttccatcgcgcggaacggggccgaggcgctgggcttgatcctggcttcctgggactctccgggcgcttctgctggagtccaggtgcagaacccttttgggaggagggtcgcgctactgctctggtggtgcaatctgggcttcccctcctccttggtcggaccctctttatgtccccagagaaagagcagaatctagattgtatcttattccctgcctcccccgcttcaccggtgaaccagcttgctctgcgctgtaaataaaaggtgaaggaaccggtggcagttggcagcggtacgcgcaggctgctgcaggcggagaggcgtcctctgccccagaggatgcaagctggctggctgtgcagggctaacccggtgtgaaatcatttccgaatgacattcctatcgccctcgtctttgcctgagcatctcaagttctgtgggggtacttgtctggcacacataaatggagacagcaatgcagttacacggaggcatatcttcttgacagtttctctgttgctactgcacatattcttctggaggggtcactgcaaagccggtcttttggggacaaacacatttttagatagggcagccctgcttgcatcatcaccaagtattgtcagctgcataatgttttcatcatcagtttcttccctttagaaagcttccctgaaagagatttcatactggcctgtttgtggcagcaaagagatgggtgcttcgtttcagggtgtgggttgaagcctttacattttatttttcgagtgtgtcttgatgactttctgagtgaaaggacccaaagtcaagaggatgagacagtcagaagactcttcaattcgtgggaatatttagaaaacagtgggaaggaagacagaagataattttagcttcgtgcaaacagagaagtgtctctagccttttgaaggggcccagagccagggctttggggtaggtggggcctgggttttagtgagaaactggttactttccaccctggatgaccttgagctgggtatttaatctctctaagcctaggtgggaatattatgtgtactctgcaggtgacacacagcttaaggaagataacaggccagggtagaagatgccctgagctggcaggctcagcggccagtgctctggcatgctgtaagcactaaataaatgtgtcctgctgcctcccctcctcctcctccttctttttttttttttttttgttttttttgttttgttttgtttttgtttttttgagatagagttttgctcttgttgcccaggctggagtgcattggcgtgatcttggctcaccgcaacctccacctcccagggtcaagtgattctcctgcctcagcctcccgtgtagctgggattacaggcatgtgccaccatgcccagctaattttgtatttttagtagagatggggtttctccatgttggtcgggctggtcttgaactcccgacctcaggtgatctgcccacctctgcctcccaaagtgctgggattacaggcatgagccaccgtgcccagctcccttccttcatttttatttcctgtgaattcacaagtggccttatctttaaagtagaggtgctttctccctgagccagagtgaaggaaggatcagtctaggtaatttgcagcaaaatctagagcgatctaaagaatgtttgtggctagtgttagagtgtttagggtctagtttattcagattggctgtctttgtggacactgcctaattatttgcaggctgtgtcacattgtttgtagactttaacacagggtggatgtggtgaacagattttggctggatttgctgacatttgctgtcaatcagtggcctcaatggccagtgactatgggcaccagtatggacctttatccatatgatctgcagagagatggagatttagcaaggaatgggttaatctggtccctggggacaatctgtctcaataaaggagcctcctacaaccagattgactctcttctgtaagtagaatagtggtagattttcaaaacctcactcaatgccatgtgttggtaaaaatgaaacagcctaacagaatacctgtctatcagaacctctgcttctctggtgtaacaccaaatggcttcagcaaatactcgtttatatattccaatgaggatttgaacaagcaagacaactgaaaatacagataaaagaaagcatcagaaactatgtagaagcatagaagttactataccaagaacctgggctaaaatttattgcattgagtattatattttagctctgagcttcctggcagtcaaggtaaaaaggtaaatgtaccatattacttaatgtttgatctaaaaaatctgagagacaatgacttttttttttttttttgaaagagttgggggtctcattctcttgctcaagccagactgcagtggtacatcatagctcactgcagccttgaactcctgggctcaagtgatcttcctgtcttcagaaatgttctccatgtgattgtttcttattctagccacactaataaaataaaataatagccaaggaatgagttaaagatattttttttcaatttgattaatgttcattgtggaaaagctgaaaattacagagaagcataaagaaaaataattgcccataatccatctacacaaaaataataacatctaataattagcatcattcccttccagttgtcattttttactattttatgtacttgagatcatactccatgtgctcttttatgtttttttccttcagttaacattgtatcatgggtttttccccatgtcctcaaatcctccttgtaaagatgatttttggtggctgtatactattctatcctgtgggtgaaccatacgtatttaatcattcccctattgttggacctatatgttttctcatgtgttactatcttaaatcattcaataataaacttagagaaagttcagggagccaaggagcccagtctaggggtacaactgtcagaaagaccaccctgatgccaagatccaatgtagaaatcccagtgattgttgagcatgtcttttttcttgagtggctttgccaaatatcttttcccttattcactatgctttaaaaaggatttaaaggactgttgaattgaggctgtgcttcctaaaaaggtctgagtacagctcagcaggtgtttactgagcacctactggagctgttgatgctgcagaaaggtgtaaaacatagccccgggtttgagagaggcagctggtgaacagagaacagggcaagaacgtattcatcatttctaatgcaaggtagagaatgatagtggagatggttgcataattctgtgaatgtactaaaaaccatggaattatacactttatatatatatatataaatcactcttttaaagtgtataagttaattaaatctcagtacagatttaactgtattaaatctcaatacagttaactaaatctcaatacaataaaatataaatttttaattttattaaaaaataaatttatttttatttaaaaataaaaagatagactgagtgtggtggctcatgcctgtaatctcagcattttgggggtgctgaggtgagaggattgcttgaggccaaggagttcaagaccagcctgagcaacatagggagaccctgtctctacataaaataaaaaattagcctgacatggtggtatgtgcctgtggtcccagccactagggaggttgaggcaggaggattgctagagcctaggaggtaaaggctacagtaagctgtgattgtgctgctgcactctagcctgggcaacagagcaagactctgtctcaaaaataaaacgaaataaaatttaaaaattttaaaaagaacgtgagctctttcaggttcaggtttacatcttctttgcagctgcacccccactgcccagcatgctgcctggcccttagtaagtgtgttgtttagtactcttgatgcaaatgacagaaagccaactttaacaggttcatataactgaaaaaacctaaggtgtgctgtatgcaggcatggtcaaatccaggggctcaaatgatatctttaaaaatatcttcctctctgcctcttggctttgatttcttctgtgttggcttcactctcaggcaggctctccccatgtggtggcacagatggcctctagaagctgcaggtttacacacttccagtttagaaactccagtaagaagagtgtttctttcccaactgtttcagcgaaagtctcaagtttatatctcattggcttgaattgggtcatgtgtttatccacgaacaagtcacatgaccctgatgggacaggcctagaacttctgccctcctttcatgatgagagagggaggtgaggtcagcttcacccaaccacctgaacacagagttggggagaggtgattcctccaaggaaatcagaggccattaagggttggtatgccagtgggtctgatcacaaatagccacaaaggcaggcagttgaggagtgctaaattgaagaaagaaacaatagaagccaggggcattaagagaaagggaagatcatataggaccagagagacctcctggagaagataagcctggaagagtgaatataaagttgacagagagaggcagaggctctgggaaatggacattggataccaggaagggtctccagatcaaagatgaagcaaaaaagtgtgcagtgtgtttggaaatgcagggtttgtagagggaaaaggtagctggtgctgggcgtggacggccttgaatgctgtgtccggaaggtgggactttaatctggagctgcaaggagccgtgcgatgtctttgaacatgggtgtgatcctatcaaggctggtgagcatgtagaggctggactggagacagaatgagcctggagtcggaggggctgggaagctactttaacagttgaagggagcggtgatggggcctgaatggagacagggaggcaggagagggtgttgtgaagaacgggcagcactgagacccgacagggcaggaggggcaacagagagggaaccaatgtctggggagggggtgtgtcattggcagaacagtcactggaattagatgcaccctagggggacaaggagagagggtccctgcaggggtgaggccacgtgctcacctcacacctgtccaataagccctggccctagggtcaggagacctgggtttgtatcctcatttgggcaccactcacctgcttggtgaccttggggaggtctgtttgcctcggtttcttcatcgatgaaatggggctgatacactaactgccttatcaggtgcataagggacaaatgagatgatccaggtgacataatccaatcaatgatcggcacactgcgagtgctcaggaaatatcgctgctctgttgttcccattgttattatttccgtacaatctggggatcattgtgctgacctcacagggctgttataaggaataagtctaatgggtggggcagctcaaagcctaaagtaaatacaaagcagtgtgacgggtcccttgttttctggtgctgtgttgcagagaaggcctgctggcagaagagggtgcagacactgtggcctttattcatgtgtgtctcccggcgtgtctttccttctgccggtatcatagttgtttgtcactttctcccctgctggctggcagctcttgagggtagggtcagtctcatccctcagggccttatggagcttaatgagcagcctgcatgagtaaatggtgaggagctgaactggaggtgcatcgattcgagtctgctttctgagttagcaccctctgggatggttggtcttgtcccttccccagggtcttcctccctcatttaaggactgaggtggcactacatatcagggctaagcaaactgctgagctgtagctgccctctgcatgtgcctaccagcaccaaaccccgagctccccaatatgagggcaatatgagcgccccagaaattcctcacacctagccaggcacccacggacataacttctctgtccccaaattcctttttaaagactgagttggggtggtgggtggaactaatacactaagggcctgtttaatgtttgatattgggctaagaatgttagcatactcactttatctttaaagggaccttctttgtgtatttgactttccttccctgtgggcagagtaacatcaacttcttcatacagaggtctgagatgtcagcagggaaattagcaagctggaagcacaagataacgatccaacaggggtactaaatggatagtatctaggatatatgtcttttgttagttagggtgggtgaggctatgctgcactaacaaacaaatcctgaaatctcaattgcttaacacagtaagattatttattgcccacacaaagtccagtgtgtcagaggtcgtcctgggtggctctcctccaggtggtaacgcgaggagccaggccacttttgtattgtgagtctcccatcttaaggcttcaggaagatggggatagggaagaatccagagggaaggcacactggacttttaaccaccttcacttgcaagtgacacatattatttctacccatattccactggccagaaatagtcaatggccagcctaactacagaggaggctgggaaacataaggagcatatggatgccatggacacttgtcaattggggtccttcaggaaggagatgccaagatagacttgtaagcataagagatcttggaagccatccctgtgaaagataaaagaataggtagggaaatgctctgtccatgatgctgttctgacacctgtggaaggagacggggaaggaaggagagtcgggtaggaagagctccagagccaagattatccattacatgagtttcctatcagacccaatgagccaggctctagaatccccacccaactcagtgattggctgaggtctgccttgggagattttgctcttagcttgaaggctgtggcaggtcttaaaggtgttgcagctgatgaccattagctgattgcatctcctcctgtaggttctctctttaaaggagggtggggcctacttggttggctgccacagacactgcctgtttcttctacaatgccctactacttactacacctggccctattctaggctctgggatacagagctggatgaaacacagatcctgcccttgaggagctcactgtccaacaggtgatcaagatagacaaaaacaattacacgtggtatagcccagccacaggaggggttagcagaggatgtgggggaagggaaggcattccccttctccaggcacctggttggtcatcctccatgttgtttgggagtaaaatgtaagtgacttcttatctctaacttttttgttacttattttggttttaggaaggtgaggaaattaaatggcatagtttgcccagtaagcagctgcattctattactttcttttcttcttcttctctagcgttatgtaacagtgcacagtgaggctggtgaaatgccttcctgtctgtacctggctttctagggatgcacagaggagccaggctgaaaccgtgagtgtatgagccccagatagggtcagcatctgggtttggtgctgggttagttgctgagaccacagggaagtctttgctgttctctgtgaattgcagcactaatcgaggatccccactccactgttagcaccaaaagggcaggcactgggtgtgtctggctcctctgtggtccccctaggcactatctcagggccaggcacagagcaggagctcaataaatatttatcgaacaaatagatctaaaagcctggattccagctctccagttctaagaggattaatgggcagagttttaacaaatggagtaagtgctttgtatgccaagccatgtgagggtgagctttctgcttgctctttattcattctttcgggttcttattatttagtgcttttgggggctctgtagttgtggtgtaaaaggggaaagggtgcttgggtgttccaatagaagatttggtgcaaagctgatgtcattttcttcgtctctgacaaatatatgcaccatcctccaaggtacatcaaaacctaggaaataaatactttccggcttctgagaagcattatggttttaggaggtcagtttattggagcaatacgctaaccagtggacggaggacttaggaaacatgttctgatatctcactctcgcctccagagagcacgagagccaaaggaggctagattgggctctggtcctggcagaaattgtgggaatgaagccagttcatcagccttggtgagtcaggtggtccagtgcagatctgggcatagtgagaaaatatgttccctggaatcccctaatagcaaggcttcttccaggctccctgctcctgggtcagaagcttctgctctttattcttctatggccaggactaactcaggaactgggtatgctcagcttgaaagggaccgtctccctgatggtgacagaataggtctggaccccaaactagataaccaagattgtgagtaaaggctgggtgcagtggctcatgcctgtaatcccagcactttgggaggccgaagcgggtggatcacgaggtcaggagttcgagaccagcctgaccaacatggtgaaaccccgtctctactaaaaatacaaaaattagctgggtgtggtggcacgcacctgtaatcccagctactcaggaggctgaggcaggaaaatcgcttgaacctgggaggtggaggttgcagtgagctgagatcacaccactgctctccagcctgggtgacagaatgagactccatctcaaaaaaaaaaaaaagaattgtgcataaagtaagagtacattggttatgagctggagtttaagagtctgaaaattcttgcctgtgtgaatgaatattgaacacttttttgggctgatgggggcattcttttgccgattttctacctttctgatttttttagagtagtctgcattgctggaaggatgaagtgtcattgtcatctagaaaattagtggtagatccaaagtattgagtgcgtggactcatctgtcttcatcaatgcccgtgttccacagctgctggcggaagcagacccccttctcctgccatttggcaaggacatcatcagtcactgttcagataaaatctagccaaagaaggactttgtggagtgatgcattattgctgctctcatggtacagggtcaggaggtggcacagagaaaaatgatatttttcacactcttcttatgatccacttgactttgttcagagaaaactgattttgaaagcaacagccatacttataataatcatcactgtattatccaaatcgtcttgtttctagaactaccattcactgaagcctttctgaaaaatgcccagagttgtttcagggatgtaagtggcagatggggacccgcatgcccactctggggcagatgaccagagcccatgcgaatgcccccgcccagtccagctgagagtgccttggctttgatggaagggagagttggcttggttgtcactccacaaagcatcctctggagcccaagtaacccttcagaggtccttcctggactctgggaattctagaaactttgggaagcccttggagagcttctaaatgtcatggtcataatcaaaggaaaaggaaataggaacatttagttgcaggtgggtagatgaagaaaaagaaactagaacaacagtagctcacctttatccagtgcttactatatgtcggcacctatgtcagtgctttgcagcattcattcatttcgtcttcactacagtcctatgaagtccttactcttttttttttttttgagacggagtgtcgctctgtcgcccaggctggagtgcagtggcgccatctccgctcactgcaaactccgcctcccgtgttcacgccattctcctgcctccgccttccgagtagctgggactacaggcgcccgccaccacgcccggctaattttttgtagttttagtagagacgaggtttcaccgtgttagccaggatggtctccatctcctgacctcgtgatctgcttgcctcggcctcccaaagtgctaggattacaggcgtaagccaccgcgcccggcggtccttgctcttattgtctgcattttacagatgaggcttagagagcttatgtgacgtatttaacatcacaaccaaccaagtgtcgagctgggatttgaagtctggatggtctgactttgatctctgcagcttacgctctgagtaaaccaccatcttcatatagttattttcctcccataaaagcaagcggcaagttttttttctccgataaaaacaagcggcaatgctttttttgcttgcaaatttcacccccaactgcttgcctctccctcggattcaaccccaccctctcccatttctctgtccacccactcagtcatatacagccaaccctgcactttctactcactttaaatgtctgtccacacacctgactcacacagatctgctctctatcccctggcacctggagaacttgtcgcttgcagaacttgtcaccttcggttgtgtttactcaggatggcagtgtttatgtctgagtgtgtctcctgatagactcggatcatctcaagggtaatagtggtgcttcctttatgaatttaggctatacttgctaagcacctacttggtgccaggctctgggtttgttacacagtgtagggagataactccaaaatagctgtgctttcaaaggcacgtgggggaggaggcccagggatcgttaccatgcagcatgaggagtgtgatggtgtggatgggcacccccaggtacagaagacaattaagaccactgacccagcaaaccagtccagcggcctcccagcttgataccctgcagggactcaccattgttcttggggtgggaacacagcttctcccacagctttgcaagccctctggagtctgccctgcccactcccagcattgctgctgagcactctccctctcttcttcaggcccagccacatggtcctctctgtgtcttggatgagtgtgctcctccctgcacagggcctttgcacaagctgttactgtggcctggaatgttcttgccacctttcttcatcttttaaatcctagatcaagtgtgcattctctgtcctccccgattaggcaaaatccactatcacgttttctctaagaaccatgaactttcctttctactgcttatcacagccgcaagttaacttttgttggattatttgatccctattggtctccctcctgcttcacaaggggactgtgaactccatgagtgcaagaactggtttgttttggctcaccataatgtccagcacactttctagcacatagtaggtgctcagtaactatttggagactgagtgaaggctggaggattctgaggccaatcttgatgtttataaatggcatgctagtttgtttttcagtgcctgtggggtgtgggggagacagctggacactgtagaaagacactgggcatcggtcaacctgtgtgtgcatgctgacactgcctgtcccctgagccccagagtccttgtccgtgagatggggatgatactctgtgagagagttattttgagggttgacctggaacattcatgtaaagcattgagcacagggatccacactgactagattttatactaagttttactgttatcattttattataatgcatatgaaaatgtgaaatgctgtgtagcagcataaaaactcgttcttatttcagtgggggactgtgtgtttgaggccaatgaagaagttgtgatctgtgtctgagcttcactgaatgggatttttaagttaaggggtgtttttaagccccatccatttctggaaggatttgaggtgcgctgagagctcagtggtgaaccatccactggcccttggggctggtgtctccagtgaagtctttataactctgctttataatcactactggttattgttcactgccccgccaggctatgagctgggccagtccatgaggacaggcacagcatctgtttggtgtctgccatgccccaaagcccaggacagagcctgcaggtactccagaatatttgtgagtgaatgaaggtctctgtgtctggagcacccagcacagcccctggtgccttgcaaatgtgtttcgcatgagtgatgctaaacacaaggtaaaacagaacaattttggataaaaatcagaactgggcccctaagtggaacagagaagatgttatcaggcatctgtgaggaatggattgttccagttgaacactggatttgaaggcaagagagagatgctctgatgttcctgtgtgatgaggacacatttccttttaggctccagagacaaatcttttaggttagaggcagggcagttcagtggaaagagctctggattctacatgggtgacccaatgctgatgctctctaatggatgaccttgagctagtcatttaacttctctgcaccttagttttatcacctataaaatgagaatagtaatgtctgctctgctttttcatagagttattatagagatcggagaaagagagagaggaagggagagaaataagattaatgtgaaagggctttaagaagctgtaaagtggtgcagatataaaatacgcccgaaactaaacacaaagagtaattaattctgggccattctctcaggaccattggatatttccaataacatctttatagaagacatagcgatgtcattcatgtgagtgatcatttaaccccctaataaaggaggacacagtattagattataacactctgaaagcagttcttcagggaactgaggttctgtgaccctagcaggctgtcttaccgaagaatctagaacaagaggtagttaacgtgtttcctctcaactgtcaaatgtcttcaaaaaccaatcatctgtctttggcaggtgtcaggcccaaggccatccactgccaggctattgatcaggggtctcagggcagaaacttgggagcatgaaagttagtgagggctgtcttctgtaagcatcaatttgggatcctggccatcagcggggcctagacctcaaatcatggggggttgctagttgggtggctgggggagagcctagcccaccagcttaaaatatgaaatacccagactgggccagtccactgcagcccaggagtgggcggctggaatgcctgtgtgctgggcgttttcattttctccagaaagagctttgacttctccaaggagatatacaagtatttggtggagatctcagggttctgggccaggcagtgtggaaatgatgaatctggcttgagagtttgggggcaacagttgctagctggctacctcctcctcaaaaggagagcagccaggctcctttggacactgggtttttaaccatcagatgggctttgacctggctgctcagaattctctgcatgctgtggcctggaaggccctaattccaaccttgtgtccacaatggagaaaacaaaatgacagggacaggtccttattgaatccctactatgtgctgggcactgcatggctgctttcatatgtgcacctggatagtggcaaggtgtagtagaaagagcttaaaacttgtgagatggagaggcccagggtcagctctgagctctggtctggctccgtattcagatgacattctaaagcccctccccttaggaagctttcaagtcattgaggatcaatggccatgttgtctaaagaacagtgggtcctctgggagggaaaggaatgagagtgactcccagcctctggggttgaaactgttaggatgtagtggggcctgctggcaggaaaggcaaaatgatctgcaagggagaccttgctttgagtgggggccagagcatgggctgctgagggcaaggctagtttagagatatagctgatactggagccccctgctaccacctgaggacatggaggggcccgggaatggcatctgtgtagatcagtgcacatggaaactgctcaatgcccgggactgaaaccctcactttctgttttggccctgagtgggtggccctggagaatgggggcctctgtcccaagattgacctcatcagggggcaggacctcatcctggtttcagaggagacctcaggcttctgatgaggccatggtagcaaggcagagctgaagggagctgagggtggcagctaagcctggcttagaggctgggattgaggaacctcgaggtgtccgggtgaggaacactcgctgatctatcaacataggccacgccgggggtcgagggagaactgggccaagtattgccaagagaaagcccagactgccctacccccatctcttctttgagcattccaaggaatatgtcatttgtatcgacccggttaagtctgaagggcagttggtgtctcatttagttcttataaaatggttcctctgttaccagggtgttactgaatgaggcatttggaagaaatagtcaactctagcactgcacagcatttgtaattctcattgtttagttgttggtattattttaacaactaaacaactaaagaagaattcttgcccttagtcccattcatacctggagaaactgtggatctgcatggtgagctggggtgtgaggcagcgagtctaagttggcccgactctgagcccagtgcccttggcaccacccacagcggccaggcatgctacagtccagccagatggggtctgtggtcctgctgtttggggtcccaggatccagccagactcccgggagtcacctatcatggctgttcccgaaggcccttaggccaagccccggagagagtagaaggttatagatggtgagctgtatgtgtagacactgttggcttcatggacgagaatgcactttctatttcatcctcctaagcacttcaagaaagactaaaggtggcccagggaggcgctcagagtggctggatgttgggtggactaatatccatactgctggccaccacagcttgccacacaggggaggtgacctcatgctggacactgagttccattcaggagcaagcttggagcacctgcctcctgccacgccctgggccatccaaacttgactcgggtgtgacctctgcccttagggagctcacaggacaatgtaggccactcacatgcaagcaagtgaccctggtaagagcacttactagctgtgttagttttgggcaagccactttatctccctgtgcctcagtgttcttctctgtacaatggggtgataataatagtacctgcttcacaggacggctaccaaaactgatagttatcagtgactgctgaagacttcagccactgcctgatacatagtaagtgtcataatagtgtcaaatacaaaaatgctgtgagggagatttgaagatcctcttagcagaggctccagtaagaactccagcagcacaaagaggaggtggtgaattgaattctcacagggtggaacctggaagggcctttcactgcaagcaacctttgagctggccttgaaggacaggaggtagaagatgtgggaagtaccctgtgggaggagggaattgtgcaagcaaagcttggaaggtaggactttgaggggataatgctgagccattcagatgtggccagcacataggtgactgaccgcaagagacactgtggacagagagctgaacggcctgggaaacagtcacctttgggcccgcagtgtctgaaagcacatttcttaatcaatcagtgctcaccaagggcctccgcaaagtcctggcttctagccttgctgtcggcaaagagtttcctattggccaaggctggagaacacaaccccccagtcaacggagagctgggcaaggtcacctccagggacattgcaaagactaggacacagggcaagaaaggtggattaggctgacttggagttaaaccctggctttgtcacttcctaggggtgacaagccctgtaactcatcgagcctgtcattccccctgtgcaacagggagatgagtttacctgccttgcagggtttgtccgtgaggctaggatgagagtatgtattctcaaacaccccagctggagctaggcactccacggatgcctgataacactgaatgggaatgggacccatccttgtttgacatcacttagatttgggagtgagtctgccctcagatcattctaattttaacaatcaaaaaatgactcagggtcttgaagagggcccaggagggattttaaagcttactctaagttgagtctgtaggtggacataatagatgcaatcaactttatgtttctcttaatggctttcttgatgaagggaagcagtgagtagcagtgatctgtgctgatataactgttgtggaactcagcagtgagaggccaggttggcaggcctggctgtgcagtcacagggcagaaggctggtgctgacttccccaggctgtccctctggctgatgggcagccagtctggctgcagaggaagttgcccttttgatgcaggtgcacacacagttggtccctaggacctgtctctctcagagtgtggcagggtatctggtctgggttgggtttctcctttattccctgatgggctaagtcctgggtttggacagcagcactccgggggccactgtcattctggattctagggattaatcagcccctcttgagaggatcatggtcttggttcccagctgagatgcagaatggctttccttctgagacctgccaggttccagccccttgctacctgccaaacatgacttcttctttgggcagagaagggcgggctattccttctctacacatttggatgaaagagattctgaacagagcaatacagtggttttctcacaatcactgataaagaagctgatgtataaagatgaaattggatttataccaaaaataaatcagttttaggtgtttagcaaaagagagctgtaatggctttgggggagccctggggaaaggaaggatgtgttcagaatacggggttggatcttggaaggcttggtcctggttcctgaaatttgggttctctgagactcagtttcttcacctgtaaaatggggaaaggcacctgctccaacctctctcagggtgattttatgcttaaattagataatgacactggaaagtccttgaccaaagttaagaaaggcatatctgggattgctgagtgtttccatgagagccctgctgtgataggtgtctgaacgtgtgaaggaggaaatcatggaagctgcagaagaagcagtgttgcaacgataatggggactaaagtaggtctcatttcagttttaggaggaaatagggcagtagatggaaagattgagctatctatttttgtttttaagtcactttgcagggaagaaattgggcagttggactctttcattctctatagtcagaagtcagaagtcagaatgtcagagtagatttaaggcccacatgaaaaaacagataaatatatcctgaaaagagtttcttgtgtggtttggatgtgtataagaaaccaatttaaaagcgttcagatctttgtatggtatatgtaatgataactgacataatagcgttaggaagaacataaccgtgccataaaccctgtcattttgactcttttgaagaaaagctggtcagagacgtcggggatagaggacgatcctggcttttttacttgctgcaaaagctgctttctgcagtccagctcctcttgtttggagctgtacaagatccttcagaaacctggaatgtgggaatcctgggttattgtctacatgcactaggcacaggcatgagcttgtctaagtgaaaatgcagtatatcctactattagcaccgccagcattgtcaaagcaaacacattccccagtcttagcctcttctaaggactttataggtagtaaatcatctacttctcaccaaggtcctaggaggtaagcattgttattgcccccatttttcagatgagaaaactgaggcacagagagtttcaataacctgcctaaagttacatgtctagtaagctgggattcaaactgaggcagtctggttccagggcccacatccctaaacgttatacaccactgtcttgtgtctggcttccaaagggacctcaagaaatcaactggtgcagttacctgccttcccatagataatctgatcattatctctattttacacatgagaaaactgaggcccagagaaggagagaggcttgacttgctaaagccatacaataggatggcatagggctgggactagaaccggagtcttcatgatagtggtgacctcctccagaagtttgcccttgcctttggcttatctgtcctgaacgtgctttccttttctgagacagttgggcaacatcaatatctggctcagatcgggctctttcttatctccatcacgctttgcactctcctgttctagaaccagcagatgctccttgtgttgcctggctcacctggccaggacccttccctggaacgcccctcccagctgtccacagaggcctgcacaagtgtgatatggaggttagtgggaactataactagctatgattccaatgtggatgctcagagggtgctttgaacaattaagagaggaagtgatgatcactggggtcaccctgggttcatttagagcaaggccttcaggactgaccactctttctttgttgagaaaattactaggctgattagatcagggagctaggtcctagcaaatgtgaattctttgaagatatttgacaaaatctaatgatttttcaatgagataaagatggtctatttaggcacatctgttaattgttgaaactccaaacccaaaagatattcatctgcaagtaatctgtggtggttgtccatgggactctgttctttgcctggagattttatatatatatatatatgaaaccacatattatttcttaaattagtgatttggataggtcataaaagtcatactgatcaaattttgctgatgatgccgagataggaggattagcaaatatttgaggtggcagagccaaaaaacaaatttcctgttgttacattcaccccattgctccaggattccaagattcttttttcaggattcactgcatcattggacacttggtttcaaaaaaccaactgcttaaggacaagacaaagtcaatgagccttagagggagtagatgtgaaaagaggcagaggctcttgttgactgtgactcattatgatctctggagggcaggggagctgaggtctgctgctcagtgtgtgtgttcctgtaaattcagactaccctggcaggctggagcccccaggtctgctgagaaggggtgtcctttggggcatgtgctggggaaggtgatcccagtgagaccatcgaacatgcccagagatgagagaaaacacttccattggtggctttggattcatcttagatccctccccttcaccctccttcctacagatgtttattacaagacctctgtgtgccaggcactgtgttgggcattggtaggtggtcccaagcattgcccctgtcctgtggagccagtaagctttctacattgtgtgtgggtggtgccaaggacctgtggaatggtgccagaccgggttgtaggaaatccagtcattgcaaggtgggcagcctcagagtcaggagctggagaacacagcgggggctgggggatggggtagcagatcccagagcaggcaggaaacagcagatcccagagcaggcctctggcctcaacagagtctctccttgaccaaactttagtcaggctcctctgatcctcttctcaaccaggccctgacctttgggcttctgtgtccatctttgcatcacccaattttagcaagaatcctgctaagtcagtggagtgagaattccccaccctgaatatctgatcacccctgatatctgatcaaattcctcgtccttcacaagcctcaggtgatgtctgatctccctggcctgacttcagcaagaatcctgtccggttggttcagccagaattcccccttacacctgacatttcctcatagtaatgttccgtccgtgacctcccaccctgccccttggctgtaaatccccacatgcccttattctgcttggaactgagcccatgtctagactgaggtctcttgcccccagttgcagtaacatcctgaataaaatttgttttcactgctttaactagtgtctagatctggcttctttgacagccctcagcaggagagggccaagaggacaaggaagtctgtgggttgaggcagggcaggaaacctggttaaagtgcaggggaaggtcagagtatgtcgagggaggatctttgtcttgtttgtttagaagcactgactctgctgagggagggtggtctgggctctgctggaagtacagggctggggagaggcagagcttggagggctgttgtggacacccttgtgtttggttgatgggttgtgggggtgacagggaggaagcaaggagccaaagctctgtggatggtggacccttcactgactgagctgggagtcctggacaaggggcagggtttgtggctgttaaagaaaaccggagccagacagaagttaaaaaggtaaaaatagattttaggcccagtgcagtggctcaggcctgtaatcccagcactttgggaggccgagatgggtgaaccactggaggtcaggagtttgagaccagcatggccaacatggtgaaaccccatctctaccaaaaatacaaaatttagctgggtgtggtggtgcatgcctataatcccagctactcgagaggctgaggcaggagaatcacttgaactgggaggcgaaggttgcagtgagccaagatcaccccactgcattctagcctgggtgacagagaaagactccatctcaaaaacaaaacaaaacaaaaaaaacagattttattcggggactattgcaatagaggaaaagagaccccagtgcagatagaactgggctcagttccaaatacagcgtggaccagtggcgagccataccccaagagcaggttgggagggatgggaaattattatgaggaaatgtcaggggtaagggacgattctggctgaaccaactagacagggttcttggtgaaggcaggccagctggggagatatcagacatcacctggagctggcgggggatgaggatttgatcagatatcaagggtgaaggtttctagctaagacagcttcacacgggtcttggtaaaattggatgatgcaaagacatggaagcccaaaggtcaaggcctagttgggaagaggatcagaggagcctgactaaagtttagtcaaggctaggtgcagtggctcatacctgtaatcccgatactttgtgaggccaaggcgggaggattgcttgaggccaggagtttgagaacagcttgagcaacagagtgagagctcatctcttaaaaaaaaattagctggggatgatggtgtgtgtgtgtgtagtcccagctacttgggaggctgacgtaggaggatctcttgagattgggactttgagagtacagtaagctatgatggtgccattgcactccagcctgggcaacagagtgagatcctgtctttaaaaataaaataagtaaaatcaaaaactatagtttaatcaaggagacactgtttgtcatgggacgaagagatccaagaatgcagaaacagaagacctgcccatttggagctgatattctagtggggagatagacatctgaaagaaataattcataatttaaatcagaaggtgtgcactgagggcttgaagcatcattcatgcccttattcattcaacaagtatattagaattctctagggaactctagagggttcaggactaataggatagatgtatatatgaaggggggtttattaaggactattgactcacatgatcacaaggtgaagtcccacaataggccgtctgcaagctgaggagcaaggaagctagtctgtgtccccaaacctcaaaagtagggaaaccaacagtgcagctttcagtctgtggccgaaggcctgagagcccctgccaaaccactggtgtagttcccaaagtccaaaagctgaaaaacttgggagtctgatgttctagggcaggaatcatccggcacgggagacagatggaggccagaagactcagccagtctagtccttccattttcctctgcctgcttttatcccagctgtgctggcagctgattagatggtgcccacccagattgagggtgaatctgcatctcctagttcactgactcaaatgttaatctcctttggcaacaccctcacagacacacccaggaatgatactttgcatcctttaatccaatcaagttgacactcaatattaaccatcacatcaatgcctcattctaccttgatcagggcagttttgggaggaggtggtgatgcagcagctggccttgaggaaagcccagaattccatccttgaggcagggaattcaagcagagtccattgcgctgacgaaatacagatccgtaataagagaagctttggacggggtaaagtttgtctctaccatagatgttgctttcactctgcttttgggaaatgttacagtagagtatcacacaatatttggttttgatgttttaggatagatacattatcttggaatcacaagccccctttccagaatataccaaggaattgatagatatcattgggtatcatgagcagtttcggttggactttggattatagccaatatcatgccaatggaatccgtcaccactgatggttggacctttcccagctgggaagggaaatgcatacttacaaggacatttgcatcttctgaaaaatcatcctaacaataaactcctattttcatatttggagagtttgcattttaaaaaagataactagtagtgtttttatcttattatagaagtaatttatgttttttgtagaaaatttggaaaatgcaaataaagagaggaaaattcaaatcacttataacctgactatctaacacaatcactgttgataccatggtgatttcatcagacttaaaaaaaatagacttcagatcatctgctgctgttacttgagtcccaccccccacaaccaatttttttttttttttttttttttttaccgtggtaaaatgcattcttcttttttccttttactgtatatcttgaagagctttctggctctgccagagtctctacttcatatttttaagtggcttcccaaaattccactaggccataatttatttagatttttttttttttttttttttttttttttttgagatggagtctcgctctgtcgcccaggctggagttcagtggcgagatctcggctcactgcaagctccgcctcctgggttcatgtcattctcctgcctcagcctcccgagtagctgggactacaggcgcccgccaccacgcccggctaattttttgtagttttagtagagacgggtttcaccgtgttagccagcatggtctcaatctcctgaccttgtgatctgcccatctcggcctcccaaagtgctaggattacaggcgtgagccaccgcacccggcctggattaattttctgttgtcgaacatgcaggttgtttctagttgttggttttttttttctcttctaaacaagggtgccgcattcagcccggaaacaaaatagatgcgcatctccatgattagtttcttagaatctagcattggctgggccagaggggatgcaaaatttaagtattttaacacgtagtcatctcggacatttgtagagagcttactatgggcttttacatgcatgatctcgtttaattttcatagcgtaggtaggagctgttattattcctccttcaagataaaacatcagaggctcagagaagtttagtaacttgggccgggcgcaatggctcacagctgtaatcccagcactttgggaggccgaggtgggcagatcatttgaggtcaggagtttgagaccagcctgaccagcctgaccaacatggtgaaacccggtctctactaaaaatagaaaaattagctggacatggcggcccatgcctgtaatctcaggtacttgggaggttgagacaggagaatcgattgaatctgggaggtggaggtttcagtgagctgagatcgcgccattgcactctagcctaggcgatagagcaagactccgtctcgggggaggtggaggggggaaagagagaggtttagtaacttccccaagacctcagagctgggcagtggcatagaggggatgaagccccctgagcccaccgcaggacctgcactggaatctgacactgtacttcctgccaagctgtccttggacagcagtgggtgtgtagaccctttcccagagcacaggactgagaattatttctgaaacaaacaaacaaacaaaacaaaatcaaaagctctgtcaattgggcagttgataaactttcactttgcatttctttgtttatcagaaaggttgaatgtatttaaatgtttaatgagcctttcatttttagtgaattgacttgtatctcttgcttattttttaaaatatgagtagctctttcttgctgatttgtgaaactgctttatgtattaagattggtaaaatcaggccaggtgcagtggtggctcacgcctgttatcccagcactttgggaggctgaggtgggtggatcacctgaggtcaggagttcaagaccagcctcttcaacatggcaaaaccatgtctctactaaaaatataaaaattagctgggcgtggtggctggcgcctgtagtcccagctacttgggaggctgaggcacgagaattgcttgaatccaggaggcagaagttgcagtgagctgtgatcatgccactgtagtctagcctgggccacaaagcaaaactctatctcaaaaaaaaaaaaaaaaaaaaaaaaaaagatggtaaaatccatctcctatctcgtgtgtggtaaatattttttcctgttttttcacttgcctttaattttacattatttttcaatatacggttttttgtttgttttgggtttttttttgttttgttttttttttctgagatgaagtcttatcctgtcttgcccaggctggagtgcagtggcgcaatctcagcttattgcagcctccacctcccgggttcaagtgattctcctgcctcagccttccgagtagctgggactacaggtgcgggccaccatgcctggctgatttttagtagagatgagttttcaccatattggccaggctggtcttgaactcctgaagtcaagtgatccgcctgtctccaccccccaaagtgggattacaaagtgctgggattacaggcataagccatcgcatctggcccaatgtaggggttttaaacatcttcacatagctggatttatatctttgtggtttctgcttttggtgtcatgcttagaaagtcctgcaagtactccatggctttataaataacccacttatatctccttttggttacagtaatggtttgatttttaaatatttaactcttttttttattgttttcttgaatttatttgatcaaaaagaggaattggtgacataaggagatggaaaaatatgagctgattttataaaaaataatttttaggttgtaattattcatttagttgtcatggtaaaatattttatagtagtcttaattatgtcttcacaaatatctttttaaatttttttttattatactttaagttttagggtacatgtgcacattgtgcaggttagttacatatgtatacatgtgccatgctggtacgctgcaccaactcgtcatctagcattagttatatctcccaatgctatccctccccctccccccaccccaccacagtccccagagtgtgatattccccttcctgtgtccatgtgatctcattgttcaattcccacctatgagtgagaatatgcggtgtttggttgttcttgcgatagtttactgagaatgatgatttccaatttcatccatgtccctacaaaggacatgaactcatcattttttatggctgcatagtattccatggtgtatatgtgccacattttcttaatccagtctatcgttgttggacatttgggttggttccaagtctttgctattgtgaataatgccgcaataaacatacgtgtgcatgtgtctttatagcagcatgatttatagtcctttgggtatatacccagtaatgggatggctgggtcaaatggtatttctagttctagatccctgaggagtcgccacactgacttccacaatggttgaactagtttacagtcccaccaacagtaatatttaactctttactatgttaatctattttttataaagtaaacttctaatgatacatatttctccaaatggttaatccagtgctccaataccatttgttgaatgactcatttctctgcttacttgaaatgacacattatacatagttagtctgtttctgaacttctattccataggtatgtctgatgctttctgggtcagtgtcccggtatttaagtcaccttacgtttatattatactttaatatctcataagggaagtctcctccatgatgaaccttctctttgcaaggattgtcttaactgttctcacctgtttattcttatgctagaactttagaaccattttgttgagttctaaaaataataatagaggccgggcatggtggctcatgcctgtaatcctagcactttgggaggccgaggtgggcggatcatgaggtcaggagatcgagaccatcatggctaacacggtgaaaccccgtctctactaaaaaaatacaaagaaaattagccgggcatagtggcgggcgcctgtagtcccagctactcgtgaggctgaggcaggaaaatggcgtgaacctgggaggcggagcttgcagtgagccgagatcgtgccactgcactccagcctggatgacagagcgagactctgtctcaaaaaaataaataaataaataaataaaatgataataatagaattagtattttggttggaatttggtgaacttagaaattgattaaaggagaataattttttttttgcagtattgagtcttcacattcagaagtaaggtacatcttttcttttattcttacctgtttcatatgcctctggaagaaaatcgtagttgttcatttgcaggacaagaaaagatgttttttccctcactcattgctaggttcatggcttaggcccctataacaaaagatagattaaagagaaaagaggaaatatacaaaggtatttaatataagttttacatgacacaggagccttcataaggaaacaaaggcccaaagatgcaggtaaacttgtgtatttttatgcttaggtttgatgaaaaagtggatagttgtggagatagttgattggacaaagagagtgtgatctaatggtaataaactgggaggaatttgccaaggcctgtttgttcagattcccctctgtgctcctgtgtcttcagagataaggatgttcctttccccttggtatacagagggcacctctccatgagggtcttctgacttgcttcaagagaaaagggcgggagaagctcaaagagtgacttccctaggttttatgacctgctccaggggagaagggtgtgaggaaggtgagaatggccttcctggtactgctgttttctcaaatgccaaggtgccagatttggggatagtgtgtcctgaaggctatcccatccattcaacaaatattcttgagcagctccaatcattacagcccttttcatagaaattctacttgtttcattaagttaattactcagtgttttaatctttgtcactattgtgagtgatattcttttgctattatagtggcttctcttctccacaggtattttctaattaactattgctggtgtggagaaaacttggatttgtgaatatcactttcctagtcagctgccttatagagcattctcattggtcctgtggtttctcacaggtttccttgagtttttccaggaagacagtcatattgtatgcaagtagcaatacttctgccttgtcctttccaatattttaatcttgcctctttgtccatggattgaattgtcgtcatctttggggactggactgggcagaagtcatgagcatccacattcttgtctacatcctgagtttgatggaatgattgctgtttgcctactgcttggggtactggctatttgcagcagactttgtcatgtcctggaggtatcctctttcccatttgctaagagggctttgttcaaaatcagaaatgagggctgaattttattaaatgctttttcagcctcttccatacaaatgatttgcatttcagaattatttctgcaggcaggtggaccataaacaccttgaagtcaagaactgtccttaagaccatcatagacagtcattcattcccaactgtatagaaaccttacatagaaacaaccataggaaattatcagtcttccctgcagtaggtactcagtcaacatgtattggagcccatgggtgcaggctcagtcactggcatgaattttaggaggatgtgaaagagaaagcactctgaaaatttggaggtgggatggctggggagcttcacctccccgtatgcactaattaggaggccataaatgtgaggagacatttcatttcatcccgttttccagatgaggttagtatcatgtttgcctcaactaggaactgaattacaatgccatagacatttaaattgcgggacataaagtgcttgtcaagtgctaattacagccttgctggtctcctgtattaccaacctcaagattctgccagctgccagcaggggcaggctttccagcgaagcacctcgcaggaaaggtgccaccgcgttggggcgcattctatatgtttgggaaattagacttgctttctaagtaaataagcggttagggtgccagtggttagagctggcagtggttggtagtgtccccaggatagttctagttgttttggctgaaaacaaattgttctaaagcaggatgaaaacaatatgatcaaggtgaaaattaggtccaaaataatgagttggcaaaaagaaaaatcagtactccccagtactggatttccatgtattggtaattctggtgcactcttcatttagtcaacaaatattaaccatttattataggttgtagacagtgggggttgagggagggtacatcaatgaacaaaacgagagttccgtccagagagcttgcgtgctgataaaggagacagacaatgcaaaaataaatacatcttagatagctagctaggtaggtaacatgttaagtggtgatggcactaggaaaaaaaacaaaaacaaaggacagtcaggccctaatatttacgggtgagtgatttctgtttgaaactggtgtccagagaaggcctctctgagatggtgctggagcagagattggatgggaggagagagagagagccctgtgaaggtcgaggctggagggagagccactgcaggccctgaggctagtgtacttgaggagtttgagaacaataagagggcccgtaggactggagcagagtgatggagtggggcagggtcaagtgtgagacagagaagggatgatcccatagggatttctggccatgggacatttgaggactttgagcagggaaatgacatgatttgacttatctaagggccattttccaaactctgctcttaggtatttttggttcatttctcaaaagttttttggcagagcaggcacaattggctgaaaatgaacaagatctaaagagagaatacatagccaataaccaccatgaggaccagaaaaaaaattctgaaaaatcagcaaaactgcttgaatgcctataagatgttgtaaacctgtctcaggtatcctccagttattaatatgtgaaaagccaatgaccagggctcttcgcttttgacttgattgctgtctggatcaagccttcagctgtctgggggctggccagtgtgcagtttgccagacacctccctttggtcaagagcctgggtctggaggcgtgcaagtggcccagacctatcttcttgagctgaaaataactgctgcagatggtaagacttgggcaacggtagtgcagttgggctccaaatagtgcagtagtcttcttggctatgtgaaaagattatttcatctttagtgctaccactgttgttttatgggcctgtaaggcaggggaagttgaggctgagggcatagcttgagtggatggccatctgaggtcccaggtcccaatctggaattctttcagttgcatcacaagagacttctgtgcccacagagcaccttgcccatctctgtatcaaagcattcatcctataatagtgtaaagatctgtttctgtgtttgtccagctaaattgggacttcctttagtcagtatgtttgggttacatgtaagctgctgtaaaaaagaggctcaaaaatacagcggcttcagtaagttgaacacttatttctccctcagtcaacattatggctggtccagacatctctgctccacaaggtcattcagggatctgagttccttaactcttgttgtcccatcgtgctataggatttgccctcattgaagtagttgcaatagggtccctgccacatttgtgttttagctcaccagaaggggaaaagagggaaaaaaattgcagaaatccagagcaagcaacttgtcctaaagctgaagatggcctagaagttgtacatgtcacttcttttcaatcccatttcagaaatttgtcacatagtcatacctagctgcaaaggaagctggttacatttaatctctagctagataatggtgtggcatattagttttctattggtgctataaaaatttaccacaaacttatagcttaaaactacacaaatttattatcttatagttctggaggtctggagtccaaaatgagtcttgctaaggtcaaaagcttgtcaggactgattccttctggaggctctgaagggagaattcatttccttgcttttttcaacttctcgaggtcacctgcattccttggcacatggccccttccttgcatcactcaagcttcttgattctgttgtcacatctcttgctattcactctgatttctagcctcccacgtataagaacccttgtgattacatcaaacctatctgggtctaggataatctccccatctcaaaattcttagtcacatatgcagaatcccttttgccatgcaaggtaacatatccacaggtttctggcattaggacatggatatatttgggggggtgtgctttgttctatctattacaggtgagaagaggttttattactaaaagaaggaaagggagaaaggatgtcagaggagtgtcttcttaatgcctgccacacagatgctctggaaatgttgaatacagcaacatttggtggagtattgcctgccttcctccataccaccctgaacttcattggttcaaccaatatctctttatacaaagcaaaaggtggcggatatccagtgctgatctttaagtgcatagactctcaatctggggcaagggaaatgaagaggaggcccctagtgcagattagctgtccacacttgttactgttaatttcacatccttcctggattccactcacccactcccaccttcagaatagacacatagccctacacagctaaaactgagcccattatctgaggctgcaaatgtggcttgttctcctagttttccagaactgtcctcatgctgatcacacaagctgagggctttggcgtcatctctaaccactccttttccttggccctcccctgtgtccgctgactcccttcatgtttccagatctcatggtgttcactcctagcctttcttcatagcctcactgctcatggaactggcccaggacttgtcactgtggttagggcacctgccacagccgttcacctggcctgccttcctctggttcctcctccttcaagcctcttccatccatggtggctcctgctttggccactgaccaaagcaccattgccatcctgccgtgcttgctgggaagtcaccacttggttcccacttcatggcaggtgaaaacatatctgcgttcactctccatgtgtttgacctggtgtgggaactagaaaaggcccttccctctgagtcagagctcccaggttccatcctcttccctagaccctctaagaggcctggggaagacacatgcttcctgtgaacctcagtttccagcttcgtgagaagggagagcctggccagctgaactttcactttaagatttggggattccttccaaactagtccttgggactcctgccactgaagcctagggaggcagaaagagaagagggtgtagagagaaatgaagcttccacactgtcccctccacaatgcccctgtggatggctcacatgcacagcctcttccatggccttgaaccctccagtctcagggtctcccttatcctccttgagccctgttcatagcaggagtactgacatctcttcagctctgagacccagctaagggctggcagtttggccccaccatgctgggccgccaccttgtagcctctcttcttgtctcatctgtcatggactctcctgtgtgggcatctcacctctttcatccatcacacccgagtcctgtactgtaggtgtgtgagatccaggtgccgccctgccctctgctacactggactcctgcagtgcctggaacacaaaaggtcctgcggtggggatttttttcttacctatttctgcctcttcccccactctcaaccctcactgcccaccaggcacccagcactcagggcccctagaccaggagccagcactttgaagtgaaaatggacaaggtgaaggatcctatggcacccccagatgttcacgtggcattcctggctttcgtgattgggtgggatctgtttgttcagagtaatgttgatgacaccactgcgattcctgggctgtgtggatggatttagtgaagtcacttgtaagaacaagcaactggacatgggaatcctgtggaagcttggatttccatgtcatttagctactctatcttaggctccttttgtgttccaggcaccatcctgggcagtggagtggagaactgccaagggaagtttataaaaaccccctgttccctctctagatgatgatggagacagaaatgaccacacagcctgaactgtgcaaggctggaggagggagtctctaactgttaagcaaagtttataaaccatttctccttccctagaggattgatgtggggtatgtggacaggatttgcagtgactgatgggcctcaaacgaggctttgcccttaaaaaaaaccattatcatttatctcctcctcaacagggctcctcatgaccttcagaggcagcagctgaagtgttagcagtgagcgtaggtcagacaagggcttgtgtgtcgaacagtgctttataggaaaaccacagtgatagtggcaattatgcaaggctttccatgctctgttatgccccgtttattcaggatctttagggcatcaattgtactcgggtgcttattttcagggacctaaagttttcacatttaaacaccaaaagtgttttcttttagatattggccatcctgtgtatctttctaaaatctttttattccctgtttttttttttcaacttagaaaacgttttctcgtacatattcatggtagaagaaaaaccaagaaaatacttataaagtataataattttctcccttcatctactcctctcagagataagtcctgttcacattccaccttctaagatacggtgattttaattcagtcttttattgatgactcaagatcttcatctcagtcctcattagttgtcctctgcacatgtagcattttccccaccatgcactatgattcttggtataaaaagtgctgcacgaggcgattatctatttggctattttattttcttggtgccagctggcactttctgtggctgtacataaaccttatattccttttgcctctctatatgcaccgggtcttcttgattctaagatgcacatcttccctggatattttaatgtttctgaaaccaggatgtaccttgccagaggacaaaggaataagttcttgtggacattgtcaccatctccgtgtacatggggtttcatctatttcccacctcagttgctatggtcacttatttcattggagactttacagtcacttgaattttaacttacatttggattcctaaatgattgcttattatgtgttttagaagatgacactataatgaagtaatacaattattgtgaatgtagaagattgctgtcatgtgccagccaagatgattaaaggcagttgaaattgccaaatctcccagaatagatcataaaattttcagagttaagggaggtggccgtgaccaacttttgtgtcatgaaggaatatcaagtgcccgaaattattaaaagctttggacagactttaaagataaactgtctagttcccatcagcagataatttaattaaagaaaagtgaaacagcaaataaccaaataggaaattcagatgaaaggcccttatctcctttatccttgggtttgcctgagaattgttctgttcatttgaaagatgctgaggggttcaaggtcttgcagtctgggtcacaaacagcagggcttcagcagaatgctgtgcccatctggccaagacaggcaccgactcagacgaaccctgagaatctgcatctgaagaaggcttagattcaaactttgagtgtagtattgaagaagaaagtggtttgaataaacctatgctttttgctggtcagtaaaaaatatttctgtgttctcacttaaaagggaagttgtgacacatgctacaacatggatgaaccttgaggatatcatgctaagtgaaatgagccagttacaaaaagacaaatactgtctgacttcacttatatgagatttcctgagtagtcacattcacagagacgggaagtggaatggtggtcgccagggctgggggagaggggaaatagggagttgtttttttaagggtgtaaagtttcagttttgcaaagacaaaaagttctggaaattggttgcacaacattgcgaatgtgcataacactactgaactgtgcattttaaaaaggttaagatggtaaattttatattatgtattttttcatcacaattaaaaattatatttctgggttctcttggtgagagcaccatcatccacccagttctacaaacaagaaacctttgatacctccttcatgcccccacccagtgatctccagaccttgtaggttttatctgctagttctccaactctctgctttttaccatctctttgatcatagtccaagctaccatcatctcgagacaacagcggtggcctcttaaccacaacctcatggacttcttgctgtcctcaaattctttatccagagtgaactgttcaaaagtctgattgtattgggcccccatttaaaagccttccttgatcaggcaaatgcagatcaaaaccacatgacatgtcacttcacacccaccaggatggctaaaatccaaagtcagataataacaagtgctggtgaggatgtagagagactggaaccgttgttcattccatgtgggaatgtaaatggtctttggaaaacagtctggcagtcgcttaaatgattaaacatagagtcaccatatgacccagcagttccactcctaggtatgtatccaagagaaatgaaagcatatgtctacctaaacacttgtacattcatgttcatagcagcattatttagaatagccaataaggtggaaagaatctaaatgtccatcaactgacgaatggacaaacaaaatgtggtagatctataaaatagataactgcttgcccataaaaaggaatggagtactgatgcatgctacgacatggatgggccttaaaaacattaagtgaaagaggaagccagtcacataagatcctgtgggattccattcgtgtgaaatgtccagaataggcaaatacatagacagaaagtagattagtagttgcttagagattggcagagagcgggaagtggggcgggggggtggcagtggttgctaaaggtatgggattattttcctgtttgtctttttaatgaaagcaagatgatgtctgtttattggtgtcttttaaaaaataggtctgggtatatttaggttgcattttccatttttttaatcatggtaaaatacacataacatcaaacttaccttcttagccattttaagtgtatgtacagttcagtggtattaaatacattcataatgttgtacagtcatcaccaccacccatgtccataactctttccatattgtaaaactgaactctgtatccattaaaccataactcaccattcttcccaccctctagtcttggcaaccaccattctactttctgtctctacaatattgactactccaggtacctcagatgagtagaatcatacactgtttgtctttttgtgactgacttctttcatttaatacaacgtcctccagtttcatccatgttgtagcatatgtcagaatttctttcctttttaagctgaataatattctcttgtatgtatacactccattttgctattcactcatctgttgacaggcatgtgagctgcttccacatttcagctattctgaataatgctgctatgaacatgaacacacaaatttctgtttggaatcttgctttccattcttgcgggtatatacgtagaggtagaattgctggaccatatgataatttttaggggggaaccgccatattgttttccatagcatctgtatcattttacattcccaccaacagtgcccaagggttccaatttctctatgtcctcatcaacacttgttattttctggacttttttggtagtggccattataatggatgttacatagtatttgggttttttttttttgaggtgacgaaaatgttctataattgactgtggtgattgtgcatatgtgtgaatatactagaaagtattgaattgtacactttgaaggggtaatttgtatatgtgaattatatctcaataaacctgtttattttttaaaagctttccatggcctactcttcctagcagaaagtccacagtccttcggctggcccttctgcctggccctcatcctcccctagtcccatctcagctggagactgcacacgtggcttgctggcattctgccctttgcctggctgcatcctcccacccccgccctggtcgcttgcttcgttctcctggttgcgttctcttggttctaccttgttaagattcgagctcaaacattaccttctcaaggaggcctttcctgactccttggactagattcctcatgatgtgtgcttctggtttcctgcatgtacatgccccattgactgtgccagcccccagcccctgcccctagtctgttctgcatcctcaatcccagcaatagtcttccacatgtatttgtggagtgatgaatcaataacatcctaggtcttaagacttatggtattaatgttctgccattttcctaaaatgatttgaagcaacataaagcaaaacaaaacaacagctaataggatgacttataaagctatgttaattaaaacattgtgctctaaaaccaaaaagagatagccagtcagtggaacagaatagaaactctagaagcgtgcctgaataaatacaataatttaatatataataaattagaatgtgaaatgattgagaagaactgaatttatcaacaaaaggtattgaggatgactggttacatttaaaaagtttaaatgtcagaacaacctaattaaaatgaccaaaggacttacatagacatttctccaaagaagataaacgaatggccattaagcccatgcaaaaatggtcaagttcaccaacctttagggaaatgcaaatcaaaaccacgagtcaccgctttacacccattaggatggcttttattaaaaaacaaaaaaacaccacagaagcaaacaaaatgacaagtattggtgaggatgtgaagaaaatggacctttctgcattgctggtggtaaaatggtacagccaccatggaaaacaatatggcagttcctcaaaaaattaaacatagaattaccattgaatccagtaattccacttctggaaggacactcaaaataattcaaagcagggactcaaacagatatctgtacaccaatgttcatagcagcattattcacaatagctgaaaggggactcaacctaagtgttcattgacagatgaaaggataaacaaaatttagtgtacacacacacacacacacacacacacacacacacaaaatggaatataatttatcctgaaagaggaaggaaattcagacatatgctacaacatggatgaggcttgaggacatactgctaagtgtaatacagaagacagaaaaagacaaatattctatgattccaattatgtgcagttcctggagaagaccaattcttagaaaatagaatggtggttgttaggggctgcagagaaggagggagaattgggagtcagtgtttaatgggtatagagccttagttgggggtgatgaaaaagttgtagagatggatggtggtggtggtggttgtacaacaatgtaaatttacttaaagctgctgaactgtacatttcaaaatggctaaaatggtcaattttatgttatgtgtattttgccacaataaaaaaggaattaagaaagttaaaatgttagctttctactccccaacctccaatctttacagcaaaatcatttctagctttaatatttcagtgtgaaaaaaacccataaaatggtagaagtggctactgatataaccattggacgctgcagggcttgcctaagcatgataccaaggggcagcagccaccaaaacaaagactggtaaatttgaatacagaatttaaaaatgtctgaaaatcaaagccactgttaagttgggatcccaggaaaaagactctgagatggagaattgcctgcaaaagttttattggggagtgtatgggaaagtcgactgtggccaaaagaggacggacggtaggagggagggggcagaggcagagatggaccaccactgtggtttcaactgaggctgttgctgatcccagggagagccctggagctgtaatggcccttcagggcggtcccaaattgaggcagtgggactgggcctttgttttcctgcatcggccagtcactggccctgggctgccccgtgggatgaggcagctccctgacactgagggcaagttccagtaaaggactcagttgttcactgtcagcagctgatattcctagcagctggggggacaggcatatcagcccagcaaaagggattgaggtggagccccacagtatccactatatctataaacaataaccaaggcagatatttacaacacaggtcagatttctcgggaaactggctccaaacagatgtgcgtgcaggagctttatgttgcagggctattctccacaacagtacctgtaagggagagagggaagcaggattgggcacagagagattgaactgccacacagcacacagttgcagcagaggcctcagctgatgccgcagggagccctgaaggtgggagagcccttcagatttgtcccaaatcaaggcaagggtgttgggtcttcctacccctatgtcaaatagttactggatgtgggctgcccctggggaggggacataaatgtgggtaacgcagctcacttggccgagggtggcttctggtcagcagccagcactccctgcagctggggtagcggtgcccagctcctgaaggggaagggaggacctggacagtggatggcagccccaccccacccagtgctcctgctgctggcattcactttctctgtttagtaagttcacccctctggcatgtcttccctagaattctatggtttgttttcctaggaagcttacaagaggaagttagagggacaaactacaacccccactgctacagtgggctttgggaaacagctgagacccatcatctctcctttgctctctgttctatattccccagcatctctgctgatttaaatggcttactgggtgggctgagccagaccctcattcctgaggaccctgagcccctggtcctgtgttcttgtgttcttgtcagaccatgactgctgcactgtctatttacttgtcaaaattgggcaaaggaccacggagcactatcccagtggatcacctgggcaccaaacgcactcttccaggcccccatcacctaagagcagccctgcccctcttgatgaccaggatcagttacccctaccagggcagtggctcctcttctggtctgctgggttcttggcacaaggggcctgaagtaaccaggtggtctctgtagctgaaagattaatggtacctttaccattgtctcacatggaaagccttccctctctgttgctcaggccctctagacctgtgctgtccaatatagtagctaccagccatgagtaactacttaaatttaaataaaataagccagacacagtggctcatgcccgtaatcccagctacttgggaggctgaggccagaggatcacttgaggtctgaccagtccaggcagcatagcaagaccccgtctatgaaaaaacaaataaaaattcagttatccactcatactaaccacatttcaagtgcttagtacccacaggcaatttgtgcattggacagtgcaggcataaaatagttccatgatgacagtaagttcttttgggggcaatgtctctagacctaccataacctaaagctgcaaggatgagaagcatgaattctccaagtgggtcactgggagtgatcctgagtggagccattccgacctctagcccttggttcccagacccatgtattctacctgttgggccacagcaccatgtaatgatcgttcatttagattattcctttgggttcgttaggttccttcctggaacatggtaccctgtcctgcaggggatcatctccaggctggccccctcacctgagccttcagaaggccattccattgctccatcaggctggtagcttctgagtgattcggtctgtgagaggctccatagtcatgtgaccactgctacctttcctttgctctcatgcagtttccttggtttgaggtgatgttatgtaggatctgcgttagtggatcaaacactctgtaaaccccagacagacagtggtgctggctaaggctctttgggcaggacaggtaaaccataccagaataggtgtagattacagtcaagataaagcacttcctttctggggttgaagatgttcaaatgtaatcaacttgtctccaagtggctggtcgcatccctcgagggttggtgtcatatgggaactcagctctggtctttgttgctggcaggttggacgttcagcaatgtgagaagttagatccgccctggtgagtgggagtccacacttcatctcctccagggctcagaagcacattaagtgctgcctttcaagcagcatctagttctctgctgcagatggcatggccttgctccagaaccctagggtctgtgttgtgattgtcctattcaggcttgacacaaactccacatggtgtttttttcccaccagattcctctagtactatagggtctgctgggtcatatggctgaattgttagggctgcttgtgctgcagcctggacctaatgcaaagaccttttctgccctgggatctacacaaagctggcagctttctgtgtcaatcagtaaatgggtcagaacagtattcccaagtatgaaatatgctgctttgggaacctgaagaggtcttcttagtgttgggaggcgcaagatgcaatagttagttctcttttctttttttgttgagcaagcgagagagagagagagagagagagagattgagagagagagactgactcaccctgtcaaggaggctgaagtgcagtggaacgatcatggttcactgcagcctggacctcccaggctcaggcgatcctcctatctcagcctcctgagtagctaatacaacaggtgcatgccaccacactgggctaatttttaaaaattttatgtagaaacagagtctcattctgttgcctagtctggtcttgaactctgaggctgaagtggtcctcccacctcagcctcctgagtagctgggactacaggtacatgccaccatgcctggctaattttttaaaatttcattttgcagagatgggggtctcactatgttgcccagtctggtctcaaactcctgggctcaagcgatcctcccacctcagcctcccaaagtgctgggactacaagcttgagtcactgcacctggcccaataattagttctttcctttggcgagaatatctcagacttctggatccctaaatacttccctgatgtggtaggcacctgaatctttggagggtttgtctagttccctctgggtacatgtatctgactcagtgtccagcatacttgcctctcttgctcagctgacccagtgaacgagattggtcttttgagataaaagaccaatatggtgtcctgcacaatgtccagaggcccttcagactgttactgagagtgggaggattaacatagcactgaacaaaaaccataaatgtatcctgccattagttctatgtaaatgcaaacagcttctgatttttcttccccattgaatagaaaataatggatttgccaacttggtggccacatatcgtgtacctgagtctgcgttaatctgatctagcaaagctagtgctctgggagagcagtgtaattgaggtgctacttggatgactttgcagtggtccactgtcatccaccaggatccatctggtttttgaagaggctaggctggtggattaaatgggaatacaatggggatcactagccgtttattcttaggtctttgtgccgttctcttcccacccccagcaggatgccgtactgtttttgacataatattttggctaggaaagtgggagaaacagtttcagaagcttctgctcggccttgctcaactctgatggctcttactctatagacaagagaaccagtgtggggatcctgccgacgcccagacatggcctttccaatcacacatttgacaagagggacataccactgggtgggtctgtggacctagtagactcattatgatctggacctgggccgggatgccttttcttagctatccctagtataattctattctaacaaggtggccatgtttgtgtccctgggtacagtatcaactcagactgtgtatttaacaatcctcaaaatgtctgggtatttctctttccccagtttatgattacttgtataaatttgggatgtccctctggagaaagacagagggagtcattattatatatatttgttgtgatgatgttacagggtctttcctcatgggaacctaggccttccttcagacggaggctttcaggtctgcaaaatgtctcaggtccataaactgggcaagggatcataatttttttttttttttttttagtggggcagctgctttcagcctcctgatcattcatttttgatttttcagtttttggctccataaatgaaggactacctttgttggctgcccatctatctttccctgaggaacaccattctgttaaacgtcttcctagatctctgtggaccaggcccctgactgctattctgaccttgccgctaattatgacagttgcacccaccttgcttttgacagtgaagtgctgctgtctggccttttagtatttgggattctatcatgccgattgctatcaggtagaccagttctgtaacagagttttctgccatcatccccggtctgcagagaagagccagcactgaatatctccatgaccctgtgcctttcctccagtaccctctgctccaccccaccccaccccacccctgcctgtccccgcatggtctcctggccttggttaaatttcctctctagtgagcttacttccatgagctttgtgatttctccctccactgtcttgatgacagttctggcatttctacttcacttagcgtaggccaggcttgtaagagccattgtgttaactccttgtctcaggatacttactagggcattatattctgtatcatgggagggtcctctcatcatgatcaacccatccttaatcaacctgatgctccattccctcatgagccaccactctcacaattcagtcccacatatcacctcttggctcctgtgggacatgctgtctgggtcgcacagctctggtgtgtgttaccttgtctgggcttccatgtctggctgtgttgtgatttgactctagtttttggcctggtggtcaggaagagatggggggatacacgtgcctggggtgggcacgtatgatagcatctttggatcatctttaagcaaggtgacaccctagcctgtgttagggaggagtgggtcagtactgcaggcctgggggttcaggagaatctggagagcagggtcttcaggtaaattgacctggtgtctccattccaagtctcaggccctgttctccaattagagccctgatttcagcatagcagatttgtcagggttggaaatttacccttctctggagctctgctccccttttaaataactcctggggtcctcagctttttctgcccttcatctacatgagatgtgagtttctttatatgctactaagaagtgtcttcgattttcacactcctctgaaattggtgattaatcattctcagcctctcttcatctttccccagcacattgattgtacccagcaacagccatctgattccaagttccttatgatcattgcttcactcaaacctctcaaatgcctgtgatagtgccctacccatcttccattccagctggccatggtgaaagtttgaacaatttcactgcttcagcatgccacaggctatgagtgtcccaccgaccaccaacagtggggttctcactgccagctccaaaatctcatattagattttgctctgaaaacgatttctgaagccagttccttaggttggattccctgggaaactgagattctaagatttgtatgtaggaacttttctttggcaagtgctgttaggaataacacctgtaagagtgtgggaagcaggactggaagggggaagagttgaagtgaagcagaagttgaactgaagtgggagaagttgagctgcgatgtggttgcaataggagcctcgaccaattctccagggagctctggagctgcctgaatcaaggcaagggatcaggcttttgtattcccacactggatgccggctgctctgagggacggggcctaacctagaccagaacagctcccttcaggccaaggcaatttctggagagactcacttgtgagccacctagcagctgggaaaatgagtgctgtggtccaaaatggataatttgggcagtggtccgcagcatccactaacatagtcatcacaggccaggcgcggtggctcacgcctgtaatcccagcactttgggaggccgaggcaggtggatcacctgaggtcaggagtttaagaccagcctggccaacatggtgaaaccctgcctctactaaaaatacaaaaattagctgggcatggtggtatgcgcctgtaatcccagctactcaggagggtgaggcaggagaatcacttgaaactgggaagtggagtttgcagtgagccaagattgtgccattgcactccagcctgggcaacagagtgagactccatatcgggggggtgggggaaaagtcaacacgtctcaatacacaaaaggaaaaataagaaagagatgaacactccaaggcacgaggcgcaaagggcccacagtgtaggcttaataatgcctcgcctcaagatgtccacatcctcattcttggatcctgtgaatgttgccttccatggcaaaagggagtttgaagatgtaatgagttaagaatcttgcggctgggtgcagtggctcactcttgtaatcctagcactatgggaggcggaggtgagtggatcacttgaggtcaggagttcgagaccagcctggccaaatggcgaaaccccatctctactaaaaacacaaaaagaattatctgggtgtaatggcgcatgcctgtagtcccagctactccggaggctgaagcaggagaattgcttgaacccaggaggaggaggttgcagtgagctgagattgtgccattgcactccagcctaggcaacagagcgagactccatttcaaacaaaaaaagaatcttgagatggggatattatcctggatcatccaggtaggccccaggtaatcacaagggttcttataagaaggaggcaggaggtcagagtgagtagtaggagacacgggcatagaaccaggaagtttgagtgaggaaagaaaggggccatgagtcaaaaaatagaagtggcctctagaagctgaaaaaggcaaggagcttcctctcagagcctccagaaggaaccagccccgccaaaaccttgactttagccctgtaagactcattttggatttctgatttccagaacgataaaatagtacatttgtgttgttttaagctgataactttgtggtgatttgttatagtagcaataggaaactaactcagactccgtaggaaactcaccaaagaatatatacaattggccaataaaggcagttaaaaatgtggaacttagtcacaaatatgtgtgctagctatcaattgaattaaaattaatgcagtaggatacgcttttactctcaggttggtacaagcaaaaaatggtaattcccattattgatgaagattaaggaaatacgtattttcatactggtggaagtgttgtgtaaattgatataacttttctggagggtgatctgagaatatttatcaaacaactttaaaacctgtatcttctctgatctagaaaattcatttctaggactttatcctaaggtaatggtggaagtattatctattatagtgaaaagtggaaacatcctaaatgttcgaggagaaagaattgattgaataaatattgatatagctgtgcaatatttatacagtgttttctgtatccagttttgacatagaaaaatatgagggaattattgttagatgaaaaaggccaaaaattagtgtgtataatataatgcagatttcacttaaaatatgcatataaaatgtcttaaaggatatgtaccataattttaatagtggttatttctggcaagtaacagtttaatggagtttctaatccatatcacaggacagcaaactacagcatcatttttttttttaagcctgcaagctaaaaatggttcatacgtttttaaaacggttgtttaggctgggtgcggtggctcacacctgtaatcccaacactttgggagaccgaggtgggcggatcacttgaggtcaggagttcaagaccagcctggccaacatggtcaaaccccatgtctactaaaaatacaaaagttagctgggcgtggtggtgggtgcctgtaatcccagctacttgggaggctgaggcaggagaattgtttgaaccaggaggcagagattgcagtgagctgagatcgtgccactgcactccagcctgggcaatagagcaagactcagtcaaaaaaaaaaaaaaagaaaagaaaagaaaagaaaaaaggttgtttaaaaaaaaaagaagaagaaataatatgggactgtgactatatggtcttcaaagactaaaatatttactatctggacctttacagaaaacatttgctgacccctgatctgtatcgtctgattttctccagtgaataaaacaatgttaacaatgtaaaacaaacaaaaaagatgtataaacatttccagtgcagtgctttaaaataaatagctcagctggaaaattgtaaaatatgcaaaagggagaactgtaaaatgaagacaggaatgaagtgagtacagagaaatatatgcaaaaggtcttgcatgattgccaaaagtgaataagaaatttggccctgagcttcctagtggaaaaagcaagaatatatacaggatctgtttcatgacccatgatatctaaaacaacccagtgcctcaagacgtataatagtttttcttggctgagaaaataccaccattgcagctttataaagtgaatatttcatgtggtcagacttggagtattttgcccagagtgagaataaattggctttgagtacatggaagaaaagttcttatgaaggaaagtcttaaatttcagagcatgacatcccttaatgctgcccagagctcttgtctatttcctttctgtttctcattcgttccagataagggtcttctgggtgagttgggggtctcacgactagtactaacgtggcttgtgatccctgtgagccacaactattaccacgggacattcatgaggtcacatgttgcccccaagccagggcttttttccttctgcattacttgaacaaagtgctctgcacacactgccctagggaggaagcctactcctgaaggatactggcagtggttccttggaagaacccgcttttaagatgccacattgaataaggactggtctttgtgtgagagtgctggttccgcctctggagggttgacagagcggtggatgggagcaggcatttgtcttcatgtggagactgatatagggcatgtccaggtgacatcatctagtgggaaaagctagtcggttacttgagttagccaggtcacaccagcatacattcattcattcattcattcattcattcattcattcaacacagtggctctccactgaagctgtacccatggagcacctggggagctttataaataaatagggatgcccagactctgccccagtcagaatcttctggaggtggggcccaggcttgtgtatttctaaatacctcccttggtgattctggtgtgcatctccagtggaaaccgcccgtggtggtagaccttgggttttggtgtttggatcccaacttccttgtttattaatcacttgactatgggtggatgacttatcctctctgaacctcacgtttcttgtctgaaaaatgagttaaaaggaatatatgtaaagtatttagcatgctgcttagcaagcagtcagtgcctagtaaaggctcttggtaactgtattagtccattctcacactgctatgaagaaatacctgagactgggtgatttataaaggaaagttttgttgactcacagtttcccattgctgggaaggcctcgggaaacttacagtcatggcagaagacaaaggagaagcaggtatcttcttcacagggggcaggacagagagagaacaagcaggggaaatgctagacacttaaaaacccatcagatcttgtgagaatcactcaccatcatgacaacagcatgagggaaatggctcccatgatccagttacctccacctggtcccgctcttgccatatgcagatttgggggatgataattcaagacgagattttgggtggaaacccagtcaaaccatatcatttcactgtcatcagaatcactatcattgagttacctgagttggccctcaccctggatcctggttctcataactgaatgttgatcttttttgtggccacgtgtttttcatattcccttccgctaaaacagggtcccttccttacatctgagtccctggccagggttccacaggggctggccagataaatgtaaatgaatgaagagaacaggcgtaagggaaatggaccacggcacactgtgtgttaacgcctgctgggagggtttttaattctgtaaggaaatataccctccatttttcttgaaaacgtacagtcttcttggtttatgttttgtttttcacttttaatagagacatggatacagagaaatatttctttaccataagaaaaacaacactttgcaaccgcaatgataaatgtcagctgacacttaaagctgggtaaagccctaaagatggggcatcatggaaatgttgtagatgggagagccctccccctctgcaggggcaaaggctgctcagttccaattgattgttaccacaggtaaacgtggcccagtttgaccagatctactgagttttcaagagaagctgaaaatttggatttttaaaatgttggctcagtttttaaaaagtagcactgtatgagtcaaataaaacatatttcaaggttgaatgtggcctaagagccacccgtttgcaacctctgatccagcatctagggccagctttgctcttgccagcacccctacccagctgcctgttaataaacctccctgctgctgaccccttcttgtctggacttcccccatgttttttgtttccataatcatgtcacagtgctctgccctcctgtggggacaccctcactcctaaatgtgttctggaaatgtggctgtcctctgataggtttccttaagaatggatgaaatgagttaaggcataactggtaactggctcactgttctttggcaatggaaaaatattccttgccaataatttctctcaacactttttcaggcaaagcaacatacggggtaattatttttagatcagaaataatttgggtgttataatgtcagtgtacgtaaacctggtaagattataggaaggttttaaaatgagttttgaaactagtgacatataaattaaatgttgaagtacttgcccacttattactgaaaatatcagctcaactgttgttttttttttcctttttataataagacagcaacacaaggctgggattagcctgtcagatgtgaggcctgtcagatgtgactgcagcaccttccatttagttctgctccatggtcctgcattttctttagggatggccccatcatccacacatttctgcaagccagaggcctacaggtcttcctccacaccccttcctcctctccgccatatccacccttaatatctcctggatccatttacttctcctgccctctgccattatctgctgtaggccatgatcacccagctctttggtgactacactggcctactaattatctccctgtacccactttgacctcctctctgttccttccataccctgcagccatattttcataacttaaatcttatatcaaccctttgcttaggactcccagtggctttgcgttagctagggtaaagtccaaaatctctgttattattatactttaagttctgggatacatgggcagaacatgcaggtttgttacataggtatacacctgccatggtggtttgctgcacccatcaacccgtgatctacattaggtatttctcctaatgctatccctcctgtagccccccatccccaaaaggccccagtgtgtgatgttcccctccctgtgtccatgtgttctcattgttcaactcccacttatgagtgagaacgtgcggtgtttggttttctgttcctgtgttagtttgctgagaatgatggtttccagcttcatccatgtccctgcaaaggacatgaactcatccttttttatggctgcatagtattccatggtgtgtatatgccacatcttctttatccagtctatcattgatgggcgtttgggttggtttcaagtccttgctattgtgaatagtgctgcaataaacatgtgtgcatgtgaaagaccaaaatctttaacatcactcttaaggtcccacatggattgattcccacacacatcaccactcttatctcttcctttggtctccttgttctctgagccctagcttctgtaccttttcttttcttttaaaggctttttttttaaagcaattttagattcacagaaaaattgagaagaagatacagagatctcccatacaccccttgcttacacacatgaacagcatcccccattatcgacatcccccaccagagtggtacaatcaatgaacctacttcaatactttcttatcgcccaacgtccacagtgtacattagggttcactcttgatgtacattctgtgggtttggacaaatgcataatgacaggcattcaccattaccatattacatagaatagcttcacggccctaaaagtcccctgtgctcccctatttatccctgcccaaccaccgatctttttattgtctccatagttttgccttttccagaatgtcatgtagttgaaatcaagcagtatgtagtttgttcagattggcttctttcattcaacatgcatttaaagaccctccaggtcttttcatgccttgatagcttatttctttttaacaatgaataatattctactgtctggatgtaccatggtttatttatccattcacctactgaaggacatcttggtggcttccaagttttggcaattacaaataaagttgctgtaaatatccgtatgtgggtttttgtgtagacataagttttcaactcctttgggtgaagaccaaggggctctgcttttttttgtgtcttcatacacatgatgtagttctctcctcttggactgctccctactccccactgcccttgtctaggccttctgaattcagctctgatgtcacttcttcaaggatgtctgcctcgccccttcagatcttcttgtcgttgcatgtcctctaaccctcggtgcttttccacagcacccatccgcttgtttgactatttgactaatatccatttcaccactagtatgtatgctccatgccagcatgctgttgagttcccaccatctggcacatagaaagcattcagcaaatatttgttaagtgaatgaatgatgacgaagataatacttattctttctccccattatgggctcttaaaggagctcacatgtaagacagatgtttaaacagacaacatgctggggccgagatgggccatgacaaggctgtgtaccaggtgcagaggggcccaaagttgaggcacttaaacagttcttggctctgtttccatagagcgcaccgtggtgtcagggaagagtggacacccacaattgcttgttggtattcacaagtacccgaccagtgcaacataggtctgctttcctcatcgtgtgtagctctgtgtctgtacacattttgtgtgagcaggtgagagcgatgttatggctgtaagacagaaagactactgaattagagcctgaaaaccagaatgtaagtcccaggatagtccttgtgagctttgtgacattgagcaagtcacttaatctctccaaacctcagtttctttgtggatgcaataggaataaatatacccactcatggtgtggttggagagcagagaaatgaagcatgaaaatgctcaggcagtacctggcatactacatgcatccactaaatacgaggactcagtttctccatgagctaaaggtcagcactgtatgcagattcttctcccttctgattacataaaaagaggtgtgtttgtgtgtgtgggtgtgcatatgtgtgtgtgtgtgtgtgtgtgtgctgaaaacctcagggaagtccttttaggcacataaagaagaggctgtgctaacagccattagggacagaggttggttataatatcctgctggattttgaattgatatccagaaagagaagttagaaatttctgttttagagctcaggtagaaaaaggaagacagttaaggtaaacttattctacctaggaatcatggaggttacatttctttaaatctcgctctaacttaatctgtttttcaaccaacatttactgtgcatttatttatgtgttatgtttataccaatgctcattttctttcagccatttattttaaaagtttctttttatgggtaaagaagactaactgcttagagaaaggatcccgttgtctgtatagctgtgctccacaactctggctgtgctttagaaatagctaagggctaggtgcgatggctcatgcctgtaatctcagcactttgggaggccgaggtgtgaggatcacttgaggccaggggtttgaggccagcctaggtaacatagagagacttcatctctaaaaaagtaaaaataataacttagctgggcttgggcatatgcctgtaatcctagctactcaggaggctgaggcagtgggattgcttgagcccaggagttcgaggctgcagtgggctatgattgtgccactgcactccagcctgggtaacagagcaagtccctgactctaaaaatgattagttaaaaaagtagctgaggagtgtagccaaaacacatggctgaggccacccacaccaatgaggtcagtatctctggagatggggcctggcactggtgtgtttcactgcttccctggcgatttaaatgtgcagccaaggttgagaaccactgctcctgggcatggggattgactgcagagcctggttgttcagacctcagagcccctctggtggccacctggtaaggccacctggtgccagctcttctcacctgtagtgccttggaaaagacccattgcctccaaatgcgaagctggaaaatgacagtgagagtgacgctccactggggggaaaggctttagcctacttgaggaagacttatcagaaatgggctctagcctcactttgaaggagagtggggaagaggcgggtgtgggagaaggcagagctttttctagagcatgaggaggctgggagctggagaaaagcagctgctcagagaggtgagagaggacagacctaaaaccactgatccaggtgtcagtctcaaatctgctgcttgttggcttgagcaagtcagtaaactctcagggactcagggtcctcatctgtaaaatgaggttaacttctgctgacaagcaccctgcaactgggaggttgttgactactttaataccgtaaatggatgagccataggaagggagttcaagttggacctgagagtgcagaatggggctgggagggaaggtccatggcttctgtattcctaggtcttgagactggaattcaatggaattaaccagactaaactaaaaagtggttatcatctcaggaacagtgccaggcccttgagaacaaagataatacacataatgtaactatgatacatatgataataaactgtttgaccatattttattatggaaacttacaaacatatagtagacagaataccccatgtacctatcacccagcttcaacaattgtccactcatggccagtcttgttctatgactatcccaattcatttcctcttctcccttattattttgaatctaatctcacatgttatatgattttgtttgtatgtctgaaagataagtactcttataaaccatgatcacaccttttaaaaaatcaacattaattctttaatataaaaaaatccagtcagggttcaaatttccaattgtctaataaatgtcataagtgtttgagtttgtttttgaatcaggcccacacattgtgattggttgacatatctcttaaacatctttaaaaaaattgttatagaccaggagcggtggctcacacctataattccagcactttgggaggctgaggtgggaggatcacttgaggccaggagtttgaaaccagcctggaaaacatagcgagacccatctctaatttttttttaaattagccaaggttgatggtgtgtgtttgtaattctagctactctggaggctgggacaggaggattgcttgagttcgagagtttgaggttacagtgagctatgattatgccactgcactctagccttggcaacagagtgagattctgtctctattttctttaacttattatcttgataagctgggcacagtggctcacgcctgtaatcccagcactttgggaggctgaggtcaggagttcaagaccagcctggccaacatggtgaaaccctgtctctactaaaaataaaaaaattagctgggcgtggtggtgcatgcctgtaatcccagctactcaagaggctgagacaggagaatcacttgaacccaggagacagaggttgcagtaagctgagactgcaccactgcactccagcctgggtgacagagtaacactgtctcaaaaaaaaaaaaaaaaaaaaaaaaccagtgtgtgtatgtgtgtgtgtgggtgtgtgtgtataatcttgataaaatatacataacataaaatttacaattttaaccattttaagtgtacagttcagtggcattaggtatattcacattgtggccaaccatcaccaccatcaccatcactactcaataatcttttccatcatctcaaacggaaactctgtactcattaaacaactccccattcctctctcttcctggctcctggaaaccaccattctacttcctgtccctacgaatttgaatgctttaggaacctcatgtaagtggaataatatagttgactggctttttaaacacagtatcttcaaaactcatccatgttgtagcatgcattggaatttcattcctttttaaggcttaataatctgctattgtatttatacaccacaatctatttctctgctcatctgtcaatgtgtacgtaggttgcctccccctcttggcttttgtggataatgttgctgtgaacatggtgtacaaatctcccttaagcatcttttagtataaagattttcctttcatttccctcctccttttcttttttttccgttggaatttatttgttgatgaaactgggtcatttgtcctgtagtgtcccactatctggggttttgctgatgacctcattagctttggggctggcaaaggtattttgaaatttgtcaattatattgtacttattgtgtgccaggcacaattctaagtacttaaaaaatgtaaatggagttaaccctatgagatgagtactattctttcaacttctgttttaaagacagggaaactgaggttgagcagaggttaaacaactcatcctccgtcacccagctagcaagtgccagggccaggattcaatcccaggcagcctggctcaattattccacactgctgctcaggctagggcattattcagtgacaaggaggtgatgattttgattcctggggaaacaggactgaaacacatgaaaaattttttaaaaataatggagatagaaattctagttaaaagaggaaatattacaagaccacacctgataagtttccaaatgagtaacatatcttgtgaatgtcagggaacagtaatggaaggagagacctctttatagctctcactgaagtcagtgtaaatccagacacatgaattacttcaggatattttattaacatagctgtacatgcttattgttggagaaaatatccaaaatagatggtcatgtcattgagtggaaataaagcaaggtaaatggccacctctctcttcccaatagtccctggatgccacctttccaagagcttcatttgttttttgtaaagtttgtacatatttttgaaacaacactattttggaaaatggagaagaaaatcattaatcctaccattcattatacctatttttctcaacctgtttttcctgtaggcatgaacacaggcatattttgtattgttgcggcactttcaaatggagagtcttatttctaagtgactgaaccttagtccccgggcttgtgaattgaggaggaacgcattcttcttattttgctgctgtttgtatcccaccgctgcagtcaattttgggtaaaaggaaaatgaagacattgttgagtgttcttttgtagccatgggatccctgggaaggactaaattaagctggaggcagtgggtgtggtggagaaggcattctcctccttccctgtcactcactaactctttggggccgtaaggggcgaaactgggtgaccactcagtctttccagctttgaaattccaggatgcttcaatcctaataaaatcagtattttttaacaaagaagaaaactacatttgcctctgagctgtaaaggaggctctaaggttatctttctgaaaaaagaatacatcttttgcaggagaaaaattggtcaaattgagtcttcctgactggtgagttaaatcagttagatttaaatcaaattcacccagctctgccctttcatcactgagagatgaatcaggagaaatctgcctttgaaactgacctggatttggagacatccatcactttttaatggacctttaggttgcggactttcctttgggctctgtgttttctgttgatgcctgtgaatgaagaaaaatgatagccagcatgacccatttaaaaagaatcatatttaggaaaatggaaagtaactcagatgcctagaaattggggaattatcaccaggtattagttcagtgaggtcatcccaaaggtagaatatcaatactggaagaaacttaatagtattctagtccagctggtctgtggctggacaccagactgagtcctctggggaaggggtcttgctaaacatccagatttccaggccccattctcgaaaggttcattctgtgggttggggttggggtaaggcctggaatgtcggtatttaaaagctattcaattgattatgatgctaactaagctaggtttggtaacccctgatctagtccagacccatcatgtgacagaagaagaaactgagacttggagagggagaagtgggaggagtgacctgtggcagagcagggcctggagaggcgctgtcaagtacttgccactgtcatacctcccttaaagcggcaaatttgaaggtgatgtcaaaacgtggagatgcatctttaaatgccgttgggtggtagaagtatatcctgtatgggccaggtgcggtggctcatgcctgtaatcccagcactttgggaggctgaggtgggtggatcacctgaggtcaggggttcgagaccagcctggccaacatggtgaaaccccatctctactaaaaaatacaaaaattagctgggcgtggtggcagctgcctgtaatcccagctactcaggaggctgaggtgggagaatggcttgaacccaggaggcagaggttgcagtgagccgagatcgcgccactgtactccagcctgggtgacagagtaagactctatctatctatctatctatctatctatctatctatctatacacacacacacacacacacacacacacacacacaccctgtatgattaatgatagaaaggggaaggggacttaatgaagagtccacttctcaggggccatgactgttggcaggtttctttccttttgctgtcaatttatttggagaaaaaaaaaaaaaccaaacacttaacaaataatgaccatttcaatcgacagtgtatggatggtattcattcttatatatgagaattgtacttgaataactggcatcttttcagtgactaaccttcgtatcagagccagcgctcgaggtaatgaggtcaaatattttaacatcacttgagtagcaacttttacatttatttaacttatgaacaaaagatgggatcagagagcttattaccctcttgcatttcttctcaatgtaattaacctaattcttcctcctgttggtggagcaaggaagggaaagtaggtggcctattcataaaactggtacatccagcactcagtatccagggggatagggcacaacccgtcgggtgccaggctcggggccaggtttgggtttcatgcagtctcctccgcccctgttattcacagataaagaagcggagagtcagagccttatggaacttgccagaatcccagagctagtgtgaggtagagctgagatcaaacttgaggccatctgtttccaaagccctctacatcttctccggcagccacctgcgcatttcctgggctgggctttctctggaggagaatgtggagcagaggaagtgtcggagaaagaatagagctgtgtgaaagggtgcaggtctggcatgatcaggtaaatgcaaaattgctgaatcgcagggtcagatgctagatctgacaatgtacgaatgggcctgtcattcccagtgatgggcaactcagtccttcaaaggaggcctcttcctagaggtgagctctatagcacagggactgtgcctagtcctctagcatctccagaagtccagcacttcacctgtgtttgttcaatttatttagaagcgtaccctaattcagaaagggtatttattttttcttatattgcaaacagatatcctccctgcctcttctcattgtgcctggtactgccctctgagacagatcatgggggacccctggataggaagtcaaaagagacctaggttctagtccttgaagatgtcacacaaccattctgagcctcgctttctctgtaagtaaaaccacattgctggcattgctcatcactgaaggcctacttttgatgccctgtggggacaagataggtgtgggaggaccctctgggagatagctcccagagaactctgctagccttgggactttgtgccagcccagtgctggacaacccattgtaagccatcctgcaataccagagagatagtctgttgtaacatatgaggaagggcctctgaacaatgtcacccaagaccaactgaacgaagacttcctatgatgttctttcagatgatagctttagggcttttgaagatgcgttggagtccccaagaccacctctaggctcgataatttgctagagggactcagagtacaataaacatccagttgtactcacagctatgatttattacagcaaaaggatacaaagcagaatccgcaaagggaataggctggtggggagaagtccagaggaaaccaggtgcgagcttccaggagtcctctcccggtggagtcacataggacacactcaactcccccagcaaccaatggtaacagcactgtgaagtgtttctaccaggaaagctcattagagtctcagtgtgcaaggtttttattgggcactgggcatgtaggcaccctctgcttaacacataccaaaattccacactcccagaaggaaagcaggtgtttagtaggaaccatattgtctgcacaaacaatttaggcccagtgagccattcttatcagaggggagtgggaactctcttgaagtccaagtccccagataccagcccaaggccaacctctccagcagatctttctagggacacagtctcagacccgctgtgttaacccttttccgcccagagaaagtattacagtgctcatcaacagggatcccggagccagactgcctggatttacatcctggcctgctgtttgctaggtaattgtgggcaagttatttacactttgtgtgcttccatttcttcatctacaaaatgaaaataataatggtacttacctcatagaacttgtgtgaggattaaatgagttagtctatgtaaagcacttagtgcctagcccataggaagcaccaagcaatacttactagcttagctgctgctgttattattattattgcttttgttattgaaggttcaatagtgctcaatatacatgcttggctgcagtaggggaagttcccaaaggaactgtactcctgttaattagaagtatcctgcccacactgtccctggtcccaggcagggctggagaatggggctttcgcatacacagggacattcagaaccttaggggtggggtggggactcagttgctgatagttttctgagcactggtgaattcaccctggagaaaatcctgatgagagtggttgatggagagaggaaaggctgaaggtgcagggtagccctccaacttcaacactctgatgatagtaacagagtgaactagacacccttcttctagcttctttcccatgcaatgggaagagcatcagcccagcttctagttccagagatgccaccagcttgctaagtaacctcagaccagccctgccactccccaaggctggacgctatgcttttagtctcccagctctgacaaattgtgcttctaggtgcaaagtagattcactacatgctggttaccactgcagcccattgcaccttgggctgcactttgcctgcttgcctgagtctggtgaggcagaacactcacatacaaattacatgaagtggtttattccctacaggtaggcaacaagggtcgacagaagcctaggattcatggcaagccagtctctcaaggctcaggaaagctgtccagaatgaatggagtcttgtcagcgtgtgcctcacttggtccgaagctgagggaccccagaaaacagcccgccctgggttttataccttggggtaacatatattgctgggctaaagtgctgaaggatatcctctttgtagcagggacaggagcaggacctagttgttctggccagtccaaccttatatcagaatgttacattcccagtatcttcttttgttttttattttttcatttttgagatagtgtcttgctctgtcacccaggttggagtgcagtggcatgatcttggcttactgcagcctctgtctccaaggttcaagcaattttcctgcctcagcctcctgagtagctgtggctgccactatgcccagctaatttttgtgtttttagtagagatggggtttcgctatgttggccaagctggtctcgaactctcaacctcaggtgatccacccacctcagcctcccgaagtgctgggattacaggcatgagccaccacgcccagcccattcccagtatcttctgcagttattcttgagaactacaagtgagaaagccaggagaaccgggttggcccaaggccacctggagaactgtcctgcactagaggcctctctggggctgaatctgggttaacatgctggcaaattccaaggtccccatgttaaacccagggttccttttagattgacacaggcaaccaagatctgtttcagttccctgactcctttcccactgtcttatcctttctgctctttgctgcccacaatgtgtgtaattatccaccacatctgctttggaggtcatgattatgactggtcagtgatcatgtgtctatgtttgccagtggtcagggctgcaagtgtgtttgggtggcgtctgcaccacaactatctgtgtagacaccatctttccctgctgtgtgttgggcaatgtgaagatccggatgggtcatcgctccgctttccaggtgacagtgcagtgagggagagacaacaggtggcactggatggtattctgggttgtaagtgacagaaactcagttctagctaatttcaggagggaaacagaattgattggctcagaactgaatcattcagaaactttggggaaggctagcccccggaggcttaggcagtgtcaccaggacttggctcccttgtcccttcccttcctgggtgttggctctgttctcttgaagcttttctcctcttggtggcaacatggcagttagcagttttcagcaatgccagcaaagaaatgattctttttcctaacagagtaaacaaatatcctcagattgagcttcattgggcctactgggggctgtgcccatctctgccctagtccctgtggccacagggatacagttggctcacatggattaagggtggaagaagggcagttccccaaggaaaatatgggtttctttccaggaagaagaaggtatgaatattgagctaattccgtccctctgcgcaaggagctcgtggtcttatctggcaaagcagacacagaaacagacatagaaagaaaagaacgggctccaactaaaataaaggcagaataggctctcttctctcttaaaatctttctatcagtgaatttcaggaacaaagacagtggaaagaatgtccactatgcaactggaaccatgacacctctgtgtgcctgtgtgggcacgtgagtattgagcatggcagagcagaaaagcagattccatggaggaaatgacttttgtctagaacctgtgtagccacccctgtcgctgccccatccatcgctcttgggcactctctatgccgttgcatgctgccctggcaatttccctctgctaggatctcacagcagtggctggcagggttggtgggtgaatatctcagctccctctcccctccgagtgcccagtgggaactgcagttgcccatggcagggtcctgctcaacagtgccccctggattggttccagtcccttttgcttcacttttccacttcattacccatgccttttgggatcacttcccaaatacacatctttatctcagagtctgcttctgggagagatcagctaagacagcctggaagaatgcttatgatgtggatagatggaggtggcaggtagagagaggcgagggagacagtgcaggaggagggactcgtgtgggaaactatggtgatgaaacagtgcacagagaacagagcagaggagcagtgaattcagcatggcctgagaagcgcttttcaaatctttctgacagatccacagtaagatgtgcatttcataatgtgttacagtgcattcacacctacacacacacgcgcacgcctaaaacagaattttcacaaaatgaaaacttcctatgtatgatgcacacctattctgttccattaaaaattcctgctcaagatgtgctaaaataatatgatgtctcactcatagggtgggatctgcagtttgaaaacactgggctagagggaatggtgtaggaaacagagtggtgggagatgagaaagaaagctaggttagaccagacctcagaggagcttgatggtcaagttgaaacatttgcacttgactccattgcaggcttttgaggaaggacatgataaattcctagctgagatgcaagaagattcttaggacggcatggggaatgggctggaagaggcatagagactgctgaggagtctgttgccaatgtccagctgagaagctgtggggtctgtgttagtgctagggcaggggctggagggacaggagcagatgctggaggcagtgggcctcagtggctaattggacgaggagactgaggaaggagaggaggaagcgtggggttcccagctggctctctgggaggagggggaggccgttaccttccttggttgttgatgaactatttatcagggcatgaaactttcattaatattattctggtctgagagtctggaaatgtcataaaggacttgttgagtggtcaagcagcttgtacttaatgcgccctggaagcagaactgttcccagggctgccgtaagcgggaagtagccgtgctggaggagccttgctttttgatggatttcattcttaccactcctcgaatcgcccctgttctctcctcgagtgaggccgttggggtccccctagcccatcgacctacttactgcacaattaacatggagccaggctcagggactgtgggggtggtgctgccttctctccttttattctaaaacacttacctggccagggccctgctggatgccagagatgctattaataatttggttcctcctcttaaggagctcacggtcttgtttgggggaagcagacacagaaaccaacatagaaacatgaaaaggacctctacctaaaattaaggcagaatggattctctactcaaaacctgtgcaatcaataaatttcgggagcaaagacagaggaaggaagaggaactcactttatgagcagcactgtgtgccacatgcatgcccgttgctttatgtaccttggataacttaggtcctaaaataactgaatcagtgatttatgggttcgtggacttccctcttaccccatgagaatgctgtgacaggtatctgaaggaggggactttaaaacacagatttttggctggacgtgtggtggctcacgcctgtaatccgagcactttgggaggccgaggtgggcggatcacctgaggtcaggagttcgagaccagcctgaccaacatggtgaaaccctgtctctactaaaaaaaaaaaaaaaaaatagctgggcatggtggtgtgtgcctgtaatcccagctactagggatgctgaggcaggagaattacttgaacccaggaggcagaggttgtagtgagccgagatcgtgccactgcactccagcctgggcaacagagcaagacttcgtctcaaaaagaaaaaaaaaaaaaaaaccaaaccacagatttttgtgttctacctcagacctctggaatcagactctgtaagtgcctcaataggggtggaggggagaaggaagcccaggtatgtgcatttcagtaaggcctccaggcttttcttacgtgtgctaagggttgagaatcactgaggaggcagatcttactatctccattttgcaaacggggaaactgaggctccagaaatttcagaaactcagccatattcagtctgttaatatcttactccacattccatgcatcagacctactgatcagctcgtgtgtccctcaggcacactgccctgtctcagaatctctgagtctccgcagtgtgattcttctcaccttgcagagcctgactactgcccacactgctcagaaggaacctcctccatgaagtcctccaagatgccttaccctcctcctcctctccagggggttagaattctccctgctctgggcccgcaaaacacagcttacccaaagcctagaatgatccttttctgtctgtggcacctcttttcccccagagggcatctcgtacactccatgtacatccatgtatggtacctggtaggactgttctgtctgtggtccctcagcatcacggagggtggtttctggccagcaggacctggggcatcagagtggtttcatggaggaaggggtatttgcactatgccttgccagatgagggtaatctgcccctgtatgccaccagcaggtttactgtgtctttggcagttagcagctgagtgtagagagcagagtgagattcataatgtccatgactaatggagtttatgagtctatccccgggatatgtaaggttaggggattgaattcagttcaacatgtgttactggtgcacctactgtgtgctataggtacagcagatccaaaagtgaataagaccctgcccctgcccttatcaaggggactttcagctgttttgagaaaattactatcagattgtttatatatatatatatatatatatatggttgtattttcaaaggctcaaaactttaaaaactattcaaataaaatggaggtcttaaaagttgaacttagtggaattaagccaagaatcccttttaaatgcaaataaggcaattgccagggaaagaggtaagaatggagtttcagagacagttcaaggtgatggaagactacctgtcctggttgccactatgctgtctctttctctggctaggaaggaggaatcggaatggtgggaaatgccttgttttctcccaggccgggcagggcaggtctcagaatcagcagagtgcctcccgagataaggctatttttaatgagaccaccgggacccttggagctggcagctggcagtgacaatgcagacactgcaagttgcaagccagcagctggatctctgggaacaggcttctgggtcagggaaggggatagtaggaggtgctttctaaagcagagtgtggaaaaccagaattttcttgaaccattgtaagtgggtcttgtatttgaattttttttttttttgtctatgcgtgtgtgagaacaatggttgatgattagatatgaggctacaatttatgccaggttaattaagttgtatttgtaagaaaagtgtgtcgctgcaaggtgtgctgtttttcctctcccaggggtggtgggggaggccctgggtccctaaagtccatttccagggcaatgacagtcttctggcagctgctatcttcattagtgtgatggtgcaggtcaacccaaacatgcaaggtggtgacagatggtagcacacacaatggataatctgggtgactgtggcctgtttgtgtcatgattgctggcccatctaggagcaagaggccttgccaggtgaggacactgctttgagacattataggtgcagggctcccagcatctccttcaatgtgctctggatggagtgacccactcaccttagccactcatgggccttcacagactcttctggaaggaggaaaggagggccagggtgaggggtatggagaaaccagcactggaggtgttcctggaccaaactaagtatcgggctgctatttcttgtggcccaataatgagatgcagatgaactggggaggaagagagtttttatttctgtaactggttatagggaaaaggcctggaaaatatcaccagaccaactcaaaattacaaagtcttccagagcttatatacctcctaactacatgtctatgtgtaagtgtgcattcatctaaagacagaagtgattaactttttaatctataactaagatctgagttcggaagaccttcctctggagcctcagtaaatttacttaatctaaatgggtccaggtgctggggtgattacctttatcttgtcttttgctaaatcacaggtttggggcattcctttagaccctcaataaacttgtttgtggaggcctggggagtttcttcagactctcaataaaacttgtttaatcctaaatgggtcctgttaagaattctttcattatcttgtcatgctataagtctcaggaaaggcctatgcaaaactcttggtgggtttttgtatccagcctttgtataaaggcactggctctttcaacttttaatatttatcttaaccactcggtcagtactaaaacagggcctgcattagtgagagctggcctgccacagagaggccctgggcactgggttccagccccatctctgcttcgcttctctgtcctcttggacaaggtagttattctctttggatcttattctccccagctttaacctgatgggtttgacctagactgtcttcaagcacgctcacaactctgatgatttgagtctgtggtttcagacttggaccataggcatttcttaggaatcctaggacaaccttggggtaactgtattgtgattatgtattttgttctgggtctttccttccagatattttcatctctttgttcccattttcttactgttaattttagctcctcattttcctccccaccctttcttcataaaggattttggagacagaactggatttgaatccaggctctaccactctgtctgtatgaccccgggcaggttatttagtttatccatgcctcagttttctcatatgtcaaaggggaataaaaacacctatccttaagtttttgttaaatggaatactacatgtacactatccagtatatagtatgttactatatcatctggcctatagtaagtgcattagatttctcttgctgctgtaacaaatgaccataaatttagtggcttgaacaaacacaactttattatctgatagttctggaggtcagaaacccaacatggggcttggtgggctaacatccgggtgtcagcagagctgctttccttctggaggctttaggggacaatcttttttcttgccttttccagcttctagaagctgcctacatttcttggctcatggtccccttggatcttcaaaggcaataatggctggtcaagtcttttttacatgacatcactgggtactcaccctcctgcctccctgttccacttttaaggatgcttgtaattacagatccacatgaatcatccactgtgagctccctactttaaggtcagctgattagcaaccttaattttatcttcaatctaattccccattgccatctaacctcatgcaagttctgggaattaggatgtgggcattcttggggggccattattctgcctactacagtaagcattcaataaataatttttattaatgccattattctctcctttctcttaggaaacaggagggcaggaacacaagaaagggcttggggagggggatgttaaaggttcccaaagtagccaactgtgtctcccttttcgcatgcagcacgtgcagtcagtaggtaagtcctgtgtgtagactttcgtaccaggcagcctgtcacagaaggattagattttacttggactcactgcagaggctgggaacctggagcacttgggcacaggaggaagttttcagttcgatatcagatgaaagtttttaagggttgcagctcttcaaagttgggatgggttgcccttgaaaggaaggccctccctgtccttggaagtttgtaagaagaggccgggtgagctaactgtttccaaacgttcctcccctcaagaattccttggctctactatagacccaccaaaccagagtcttccaaggagggcccgggactctgcatttatgggcaattcggagtgaggtatttggagacattttagtgtgggttgggagattggcccaaaggaacatctgcttctgagatgctttgcttcccaaattcttgcttctgaaatccatttttgcttttcaaaaacaaaatgcagcactttgggaggctgaggtgggcagattgcctgagctcaggagttcaagaccagcctgggcaacacagtaaaaccccatctctactaaaatacaaaaaattagccagctatggcagcatgcatctgtagtcccagctacttgggaggctgaggcgggagaattgcttgaacccaggaggtgggggttgcagtgagctgagatcacgccactgcactccagcctgggtgacagagtgagactccatctcaaaaaaaaaaaaaaaaaaaaaaaaaagaaaggaaagaaaaataaaatgcaatgtctgtgtcaatcctggtagcccctttgtgaagaaatgacctgtctccaagggcatgattcagtttcatctgagacactggggctacaccccaagtgcgctcaccctgaaatgacctgagggcccctctctgcaaagtataggcagactctgaggctcagggggagagtggcagccccagaagccactgctctgcctgcagaggtaattttttgaaaattcttggcctttcatttttgccgggtactttgatggagacttgaaattggttttctttccccagtgcatttttttcatatgaacttaaattgccagtatttctggcatgacctaatatgttgttatgccacccacatcatttttcataatggagaaggtaagaagcccaggactacttcccaggtgagatctgcgactcctgtcttggaatcaccgtggccccatggtgatgcagaagtccaggctccactttgatgcatggagtcagaaccgggtgcatggtggggtatgcaagggacactgtgtggcaaggctagagtctggttgtgaagcaggctccacaggtgacttctaatacaaactcaagtttgagaaccaccatcaatgcccagtctcatgggaaaacacagctaaagagaggaatcctgtacccagtctaagaccatgtttgacttcaacttctattcttatctctttgatttgcaaatactccagccacagtgaacttgtcctcattccttgaacatggtctaaagattcagaagttccttctgcctggtctgtctatttttttcagattgtcacatctgacttaaagacccaacctacagacacctctttctagaagcctgccctgattccacctcaagaggcggtcacacctcttgcctctgtgtgtgtctttctttttgttgaagttagagtatgacaggtaaatgagtcatgctgagagttctaggcagtagttctggctctgtctccctcatggttgttgcgggagtaacttcctgacaattactccattcctctctagccctctgagtgtcccccaccctcaactcccatcctccccatgccacccctatggccagcccacactctggcacctgggagtcactctctagaggcctgtggaatgaagggaccactcttcctgaacttgggtctggtgtgcccacccaacctcagtggctgtccccaaatgccctgtggttgctagaagttctgggtgtgccagttttgtgaatccctggtgaaaatagaggcagagcagtatgctaatcagggaaagattgtctttatagagctttatacagctgataagatcatttgcatattctggttcattgttgtatttcgagtaagttacattattccttaaaggaactgggactgagtagcctgtaggaagatttagcaggagatgggctgttgaaagcaggccagctctcagaaaacaaagctaggctggaagctagggattacagagaggcagatatttatgtcagtataagggaggggctttgtgggagttgccggaaacagaagtggcctcacctaaatgtagttaagttctcctgcactggaggtgtgtgagcaggaggcgtgacagagggggagaggcatgggtcgcatgcgttccagttccaaggatcactcgttaggttgttgctttccttcctccaacccttgatgtctacacttttgatcgggatagtatagtctatcatttcccagggctgccataaaaaacaaccagagactgggtggcttaaaacaatagaaatttattagctcacagttctggaggctagaagtccaaaattaaggtgtcagcagggccctgcttcctctgaagactagggcaggatcctccttgcctcttccagctctggtggctctggtgttctttggcttgtggcaccatcacgcccatctctgcctcggtcctcaagcggccttcttcattttgtgtctctgtgtcttattctcttcttacagggttatcagtcattggatttagggcctgttctcaatccaggattatttcatctcaagatccttaactgattatatcagcaaagaccctatttccaaatgaagtcacattctggggttccaggtggacgtgaatttcacggggacactaggcaatccattacaaatagaatttaaaaattacacccatgcagcgggctcacatttagaagttccacattctttttggctaggcctccctgcgtgtatagactgaagtagggcccaaagtcgggtggggaggcagttgggaggtgagctgatgcttattgtcctaccctacacctaataggcactcctatagtcagcggcagtctcgtgcatgctgttggggtcccaacttaaggctccactgcacttccctgggtgtctgcctctaggccactcagccccgtgtgacagctctgaaaattcacctctgtgctctctcaggagtggccagtgtaactgaccacagctcagtggctgtgcactgaagccggttaccatgttcatgctgaggccatgcttctggtagacagctcccaaccggcactgagctgagtggggacacaaaggcagaaccactcctgagaaacacaggactcctctgatggatgcctttaacttggggactctccatccaccttgctgagcacccctaaaaaggcactgcagactaaggctcttccacgtccctccccgccctggctcctgcagttggggtccgacttgcattgtggtctgatgctctgtcttctggtgatattgaggatgggccttttatctgttcttattctttttttttttttttttttgagatggagtctcgcgctcttgttgcccaggctggagtgcaatggtgagatctcggctcactgtaacctccacctccgggttcaagcgattctcctacctcagcctcccaagtagctgggattacaggtgcacgccaccatgcccagctattttttttgtatctttagtagagacggggtttcaccacgttggccaggctgctcttgaactcctgacctcaggtgatcctcctgccttggcctctcgaagtgctgggattacgggcgtaagccactgcgcctggcctgttcttcttattctttatagttttttggagaagacattaagagttttgggtttaaatggctgccattccctggactggccagcacccagttgcacctgacattttgccacgtttttcatagcacttctcacacttctcacaccaccctgacagtggtgttctggagctggctggtactggctcatgaaagctgaggttaaattctcaggaattttccaagctgggtgacttcacttttgttccttgaaattggcagtgataggaatattcacaccacggatatctacaaacactacaacctagggtgtcccgaaaccccagctgtttattacacatttaccagcacaccactagctatttacttttatacttctccactagcctgtacttcctgaggctctccagagctcactgcacttctttgctcttagaaggcaccagtgaatgttgagtgaacgaatgaaacctactgagtgttccagttacttattgctgtttaacaaaccatcccaaacttagtggtaaaagcaaccattttatcatgctcaaggattttgtggatcagaaattcagaccacagcagggatggcttatcctgctccatgatgactgggccctcagttggaaaccctgatgggctgagttgactcaaaggctgagcttagctgagactgttgactagatgacctgaccacagcctttccacatggttttggcttctccagcatgatggccgggttttgagacagaatcccacgacagccaggaagcagctgcacagactttatgaaaccttgtcttagaggttccatagtgtcactctcaccatactcaatattgatcagagccatcacagtctgctcaggtccaggaggagggggcacagaacccaccactcaaggggaggaatgtttaagagttttggtgccatgttttaaaactgccacactgaataaggcaaggaactccatttattgagcacctagtttgggccagacattttacatacattatctctacttcttcacaactacctgggaggtattgttattatttccattttgcagatgaggaaactggaggcttagagaggttaaggagcttgcctaaagtcacacagctataactcaccgtgacccttccactaggacatacttctttcatttgtgaagggtcctggggaagacaaggataaatgatacccagtcttgcttcagagaacacagaacaaacgctacctggcatacataccaccctggggcatcttagtgtctagacaattggggctgggtgtgagcagtcatttcgcttcctacaaaccagtcaaggcaatttgtgctgaaagtgctgagtatttgctcttgtccaggctaattcagcttcataacctcaagtctgaaatcagtagtgtagagtactttaaattagctgtaaaatttcaatccaattgctaaactgcctaaattatcaagtttgctcattgctagttgaatgcatgcataattaattttttctaaagtctggactaaaagctgctgaaatcagatctttttcttgaattagattcaaatgtcatagtgaagtgtttggttttatgatgtaatccaaagccatacataagtttaaagaacttttagctgagatttgtatttgggagggagatgagttagaggactcgattactttaaaattgaaattacattctaactaattgagagtggactgagtctctattaaattcaagtatgaatcatagtattgtcagactgttaacattatcaggattgatggctaacatgtgctaaaatctttcagaatgtaagctctgtgagggcagagatatctgtctgttccattcattacctgttttatcctcaatgtgttgaataaatagttgctggcacatagcagaccctcaataaatgttagttgaatgcatcagttagctaatgtgatcatagcagcaaataagatagaaagttttattatcactttacagatgaggaaactgaggcttaggaaggttagttatcttttccagggtcacactggcaggaagtgtgatagtcaaggcctgaatccagattttgggactttgtaccctgtgctgcttttttcttaagtgtatagacacaccactgaagttcatgaggtgttttctgagttgaaaatcaactcagtctaattttggaagttcatgagatatttctgagtcaagaattagtctgattttgttgggtatcactggtagtttttatattaagatagcatttcgttatgttttcttcactccccagcagcgctatgcagtagaaattcctgtgataatggcaccgttctctatctgtgctgtctcaaatggtagccaccagccacgtgtggctagtgagtacttgaaatggggttagtgtaataacgaaggaactgaattgataaattaaatttgatttgaattaatttaagtttaaataatagtgacctgtggctagtggctgccaatgttggacggtgcagctctatagtttaaaagtattggtaggttggtgtcctcttaaaagccatcctattcaactctcctttttcatttttttaacagagacttgaggcctctcacactgactcctttcctttattgggtggtctttgctggcttgaaaatttagtttctcaattcctagtggtctcccaattttctaaacaaattctctttgcttctcttttctcttttggctatctgtgttttgatcatttctctaccctcttgctgctgagctaaggaaaagcacatgaaaggaggtgaaaattaagtctgtcctgcctcagtaggtctttgggccactgctcaagctcctgtagtcctcacaatgcctgtgtcagtcacctgatgccaggtatccacagccacttctcagtcataatgatgaaagcaagatcatgacattaagtaccatcatgtagtgaataacaccacctccctgccaacctcatctctcattgagtgatcttgcctattaggtggtgttatctccactttacagatgtgaaaattaaggcccagaaagactagtgccagggggatttaagtcagggtttgactgatttcagatttgggcttggctgccttctctggatgcttctcacccagtgatcctttgtgtctgttgttccagggtatctggatacccttggctgtcagtaatagaagagccatgcagagtgacataaaccatacagaaattcatgggctcacaatgagaagcccataggtagggtgggatttggagtcaactcaatcctgaaatagggctcagttattcatgaggcacatgaatacttttagaagcccacaaaagtgttttaatttattttaaaataagaagaaaagaaaaaaaaccttgtagattggagaaaatgttttgatgtaatattaatatattcatcttaataccggtgcagtattaaaatggaggagggaaggggctcagaaaggcaaaaatatctggatcgtcataatgcaactctctttaataacttcagtgacctttgcttgacagttcattgtcccaaattttccaagcacatccttctgggagttgtatgttctcattggcttacacctgaaccaatcacaatcaagaaaaaaggggtgagccaattggtttggaccaaggcaccagtattccatacagcatggctttcatatgtacatggggaaggggtgaccccaaatgaaaatcaagtctatctaaaatgtaagaaggagttgaatgctacgtggcagaccatcaatgtctactatatccagttaatatctgtgggcagagaatgttgaagctattggaggtaggagtgaaaggatggccattcctttcagacttggtttttataatctagtcttgaggaaaagaaaatggcttgtaatttaaggagctcccagcagcaaatgtgcttgcttaggctgaatgattagaatcaacttaggtataaataaggagaagacatttttggcttatcatatgatcacttgtggtattttctatgaaaattatccttttttattaaaatagtagcataaacctggataatctctatttttccctttgtaaataaagaggcacatcatttttgagcatatccaaaaatacatcaatattaagtacaaatgaattcctttgctcattaaacctcaactcttcagtctctttttagattaactttagtgttttgtaccaggtgtgtgtcagaatgatccctttcgttacccagaatggttttttagaatctgaagctttgaggatttcacctttggttctgacttagacttcgtttcaaatttggtaacaagtttaacattgatcaagaaggcaagcccttctctgataaaagcaaggcctataaaggacacagtgtggggaaggacagaatggccccagagctgcagcccctgtaggggtaggtgcacgcgcgtgcatgtttgcacgtggccttttcagcttcacgggaggaagctgggggatccacaggtaagagaagctggctggagggggacacacactccatcatatagcaaacccttgcccttcctcttagggaaaaacatctcgagaatgagttggcaggaggttgttagaggcagggtggtgtgtgaggggtgagaaagttccatttccaggtgtggtttggatcacacagacaacagacagcaaagtgttttctctgaggaaaagtcaagtacagcagcgtagctaatagaaaagctttgaaaaaaagccatggatatactttttatataaaagagaaagaaaaaggtgtttccatctaaaatgggcaatttcacagcaagctcaagtgttttgcagccaaatggtgccccggagctgacaaaatcccagcaaaagcccagggaaggctgtcacttcagaaagtgaaattcaggggacgtttgtagccagcaagctgcttagataattagctaccctgccttttaaaactgatatatttcttgataacatatgactttaggatacctggggtcattgcaaaaaccttttgtttggaggagtggctttggagtcagcacaagcttctagttcttgcttcgctgaagcttccctggtctttaccctcctcatctgataaatgagctaaaatgtaaacggtttattgttggcctaagtgggatacttttaaacacacgtaagttattcttgttgtatcttatgtcatgtaacttttcaattgctacttgtaacggtgcttaagggaaagctacatttttctaaaattttctgtgctttttgagatgtgtccttatctgattaaaagccatttagctacaattggaacatgaagtcttgaaactgtttttttcagcagaaagtctggctgcctatgtccaacttcaggcccaattgaacacgccaatttaagactccaggctctgccctgaagagctgcgtgaccttgggcaagttaacttctcatctgtaaaatcagttttttccttggtcaaatagaggcgctagactagatggcctctggggccccttccagctcatttggtttctgccttttgtcattgactgagcttcaggcttgggggacagacaccgaggagaatggccatagggcttcacagatcagccagcacacggacccgcttcagaacgccctgatgggtgctcatctgtcacctgccctgtgtggacacttctgtgtgacagggcgatcactacttcacaacatagcctttctctgttctaccacttacactgttggtcagattttcctaatgagactaacagacccgagtggggacagcttacaaagccctctggaatgcagtctttcacatgatgtcccgatgattcctgcattagccggaagaatgaacaagaggctggggaatagcttgtctcaactctctccatctcatacacagtgcctcaacccttgaagctgtagcctgtttcctgggtccatggctcctattctccctaccaagcttctggtggtccaggcaccctttctcaggaggaatttggcctccgaggaagatgatggagagggccacagcttgccatctgcttggcctccggtctcactagcttattcacagagaaagtcccagagtccgggtgggctgtgagtatcatgtggacatctgacattgggggtcactgtcccaaatcggcccaccagtggctgaggctggcctccgtgaagctgatcccacacccttatggctcaggtgcctcatcttgtttaggaagcaaatctcagagaccatgaaacacaggcagcatctgaaaagcatccaaggttctccttgcagtcctcactcaagaaaggcggtttcaaacctaggcatttcatgttctcacttattcctgaagcaggatgatgtcaatggtgtcttagaaatcacttccttgtaacttctgtgctggttcagccctccaggagcatctggaagagaagttcaagacagaggcagaaattagtgctcgttgactgactgaatgaatccttcctccaaagaggaagcattttaggccactgcatcgcagagcagaggatgcaactttacataaacaacatgcaaatgcttggtgttgcttcagataataaaaataacagcaagcactcatctagaacttataatgagccaagccttttcaagtacggctatttacataatctaactccaacttcatagtcctaagagatataagtattgttatccccgttgtacagaaactgaggcatggagttaagtgacttgcccaggatcacacagagagcaagcagtagatcaggatttgacccaggctcttcactacctctctacgatttcacctttagctaaacaagaggtccaactcattttcttatcctttttaaaaaaataacagcttttctgaaatcttaatttaattcacctaacatacaattcacccatttaaaatgtgtaatctaagtgtttttgatatattcacagagttgtgcaaccatcaccacaatctgtttagaacattttaatcaccccagaaagaaaccctggagccattggcagtcactccccattttcctccaatccacccaacccctggcaacagccaatctactttctgtctctttggattaacctattctggacgtttcctataaatgaaattatacaatatatggtcctttgcgacagcctctttcactcagcatgatgttttcaaggttcacttccgaatctctacccaggtgggtcccacggctgcagtgcttcttctcccggtcagggagctctcccctctattgttctcccagggcctccctatgcacattcctgagccctgacttccctgtcttaagctctgtcccctgtttaaggtacgtcaggctttgaaggcaggtgcacttggtgtgaatccagatcactacatattgtgtgctccttggctcccttcgcctccctgagtctcagtttcttcatctgtgaaatgggcaggaaccagtccctgcttcttgaggtgctctgaggatgaaaggagagagttgcctaaatgcattccctccagactgtgactggcctgtggggacaggagaatatggatttgattcatcttaggtctgtcttaaagacggagggaacctctgacatcatagctgtgtgtgagtccttgatgaagagtgatcctaaccacactacctctgtgtagagtcttccagtttgtaggggacggtcaccctgttgtctcatttgacactctcagcagcctggcgaggggatatcatagcccctcccagagaagaggctcagggtcttttccaagacccctcaggaggaagtggcagaggcagtttcttcccaagttctcattctctctgtccaaggtctcctgacacagctctcagggcagcaggctgccttctctcaggggcctgggccacgctgggtatgaggacagggaacagtttccacagaagggcaatggtgtggatggtggtgtctcctggatggtcctgagccctgagccgggcatcagtgaccaggagcttccttccctgggcaagtgagtggaagtaaatgtgggagtagggcaggggtggagcagcctggagggagcacaagcgtgcctttgggtgggcatgccgtgtggcaactggggcatgggctgggttatagccccctttgtggggccctctgctgcagccttgacacatcatccaggagtatgtacaggctctggttccaggttcccagacagtagcctggctgggcttgggctgtgcttcctgagtgtaggtggccagcaaagcctctggaggctgggaggagggcttactggcagttaacaccagggcaggtgatggaggggaggttctgcactacaggaagccctgtggagcaacaggctgatccctcctctccacaaattcacatggggaaactgaggtccagagagagaaaagcctttgctcaaggtcccacagtaaattgatgcaagctgcctccctgtctgccccgggctcggggctcctacctggcccaccactgattctcagtgcatttgccagcagccggcctcagcgttctgcagctcccagcttcctccgcatcctgtgcaggccaagttccttaggcgggtccacagagaccatcacagaccatgaggtcaaggtgtctgctcggcctgcagcttgcttccttggctgctaccagcagctccttgctgcctcctcttcctctctcttcccgagagactctcttcctccctactctccctcctaccctaagtctctctgtctttgttacaaccacccgcccaccttttgtttaacatctcatttcttttctactggaagacagtatttgaacaattaggataattgaagtttttctctcccacagttctggccaaaatatatccacctctcatggaacgggggtgagatgccagcatcccaatgggggccaagttctctaggcaggtccacaggacccactgaggctgtgaggtcatggtgtctgcttggcctgcatccttgtgctgagacttgtaggccctggccctgtctgctgcttgccttcctgtgcacgctgcctgtgagtccaaggggaggccagatcttcgtggggctcacattgcacacccctcaggacctggtccagcccctccacagtgcccaggaccactgccattgacctcccttgccttgccctccttactgtccttggctctccagccaaatggagaggctcaaacatctctgcacctgccaggtgacctcacaggacagacggagggcttgggctctgcagtttgactgtgcctttgaatcccagctcagccacttgccccatgtgagacctgagaagttaccgagctgccctgtgcctcaggttccccatctgaaaaatggatatgaagaagactgtggtaggcagaaaaatggcccccagagatgtccatgttctcatggcagaacctgcggctatcttactttctacataggacagatgggattaagttaaggatctagagatgggagactatcctggattatccaggtgggtctgaaagtaacacagggatcttagaagggaggcagatgggtcagaggcagagaaggagctgtgacaacagaagacgggtcaaagagagattagaaggtgctgcactgctggctttgaaaatggaggaaggggccatgagccaaggattacaggtggcctctagaaggtaggaaatgcgagagaatgggttcttccttagtggctgtagaaggaatgctgccctgctgacaactggattttagcccagtgagatccattttggattctggccttcaaaactgtaagacaattatgcgtttttgtatgttttttaaaaatattttatttatttatttttgagacagggtcttactctgttgcacaggctggagtgcagtggcacaacctcagctcactgtaacctctgcctcccaggctcaagtgatcctccgacctcagcctcccaagtagttgggattgattacaggcatgggccaccacccccagctaatttttgtattttttgtagagacagggttttaccgtgttgcccaggctggtcttgaactcctgcattcaagcaatcaaactgcctcggcctcccaaagtgctgggattacaggcatgagccaccgcgccccgcctgaagactttattttaaaaataaatttttagagcagttttatgttcacaacaaaaatgagaggaaagtagggaaatttcccacatactctttgcctcccacacatgcacagcctcccccattatcaacatccccaccagagtggtccatttgttccagtcgatgaaccgacattgacacagcgtcatcacccagagtccatagtgttgtacattctgtgggtttggacaaatacgtaatgatacatagccaccattacagaattgtatggagtatctccattgccctaagactcttctgtgtttgtctctgtgttattgaagccactaagtttgcagtgatttgtctcagctgccacaggaaattaatacaagtacctgcctcaccactgtgaaaagaaaaagaggtgacatcaaagagtaccaccccagggcaggccacatggggctgggggggcactgcaaggactttggctttgactccaagcgagacagggcaccacaggaaggttttgagctgaggagtgccatggtctgacatacagtctgactctgagcatcctgaggacaggtgtgggtcttaatcactcttgcttctcttgaaacttgcctagactgcagtacatagctagctgaacaaacatttattgctttccttcttttctatcatgactgggggtttctgtttggtagttataaaatatgggcgttagcactttgggaggtcgagacaggaggatcgcttcagtccaggagttcaagaccagcctgggcaacatggtgacgccccatccctacaaaaaaatacaaaaattagccaggtgtagcaatgtgcgcctatagtcccagctaatcaggaggctgaggtggaaggatccatttagcctgggaggttgagactgcaatgaactgtgatgacaccactgcactccatcctgggtgacagagcaagaccctgtctcaaaaaacaaagcaaaacaccaaataaagtaaaataaaataaaataaaatatatgtgagttgcaggtgggatgaaggaagagtcaccaggttcttaagtagaggatgctctgataattataatatttgggtcattaaaagaatgcatttttagttgggatgcctaaagaccattttttttggtggcaagacacatttttttttcggtcttaaaatcttatagtcagttgttttgtattttgattaaaaaattgtgcatttttcatgcaagcccataaagaattgattttcagattcttgatgtgactgatatattgtatagatacacttccattccttctgcatgaggctttcagcaccggatatctgtaggcacattattacagggaagcattgatttttgcctagtacaatatgccttctctttgaggaaatgaaaatcatgacaaataaaaagccatttttcaaaatgactttgattcttgcagtttatgattcagaaatgaggcctgggagaagggaccttaattttctgggctaattatttggctcccgttgtaaaggagcatgtttttcctgaaggagcccttagtaggcccacagagtctgatagcagcagtggctgctttcagtctgcagaatgcgtcgcagttcacagcatgcctttctgttttgcgctctgtgaacactagctgactgacgaggtggaggaatcatattccatctgtggtaggggacaggggctctgagaagcagagtcacaaagtctgtccagactgaaataagacaggatatgtgttctcaaggcaagaatggatggagaaccacacgatgtggatgccatggatacagaacaagaacttggaactggagggtgggatggcagtggtgcccctgcttcactccgcaagtcctggttccttctgtaaccagctgtaacctcggccaagctgttcaacctctctgagccttgagtcccctctctaaggtggggataattgtccccacgtggcccacttccctggactgccatgccttcaacaggagataatggagaaagtgcttcataaattgtgaagggctctttataagccaagggtaattgctgcgcagataagagctttgactgtagagtctataattcctgcaacattaataacaataatagcttttttttcccccactgagccattgctgtgcctgccgttgtgcctagtgtttcacatgtttaattctcatgatggctttaggaggtaggcacaaatactagtgcacccattttgtagctaaggaaactgagactcagaggtggaaggtagtttgctgagggccccgcagatagcgaagtgggattcagactgggctctgtgtgactccaaaagcctctgagcctcaactccctccaccggagcaataataggtgctgagatgggccagggcaagccgtcaattacagataatgaaaacatctgcagaaaggaagcatgaagctcaaggttacccggacccaatgcctcaaagaagattcaaaacctaattcccagagttccttcttacctcttctgctacccagttatcagctattcttttgtcccctgcttgctttggaggaataccatttaaaaaatcaagggtgggttggcaaagagacattgacaaccaaatgtaatgtgtgaatttctttttaaatctaggatttaaaacaacccataaatacatttttggaacaactgggaaatttaaagtattgattttattttaaataagattattttaaaatatttctttttaaaggtgtagagtggtaatgtatgtaggagacggtccttaacgttaggtgataatccctgatattagaggtgaggtggtcttatctttgcaagctacacacaaataattcagggctgggagcggggagagagagagagagagagagaaagagagaaaatattagtgattggtgaaaagacaacaggtatatgagtattaattgtactatcccttcagctttactgtagatttgaaaaaataaaatgtagcagtacagagaaaataaatcaaggggtttgggagaattggcatttgctgactgcctcctgtgggccaggctctgggccagacatccacatgtactatctcacgggtttctcacagcctctctgtaagacaggtgttaagtccattttgccaatgacccaacacagcacagagagggtaagtgacctgcacaaggccacacagcaggtgagtggtgagctggggttcatatgcaggcatgcgtgaagcttgggaagctcagctagaccacagatgaaccctcctttctcccccacactgcgacccttcctcacctggctttttcatgatggaggtgcatacagaaattactttttatatcccaatggaaaccctaaaggctcagtgaaaaacatcatacactattaatcagggccctcaatcagaagcaagaaaaacaaggaactccaagtatcaaaagcttcatttgctgaccagagtccccacaggaaggagagttctggaaaaataaatgttgacatttgacaccacaggagcaccaatttaaaaaggcactttaaccaaaattgacttcacaaaaatcaatattgaaaaatcagacttggattccgatgaaatatcagtctcttgatgtttattgacttgggtaaatgttggcattttacagcccagaattaaaataatagaattttagagctagacaagacctctgagatcatcctgttacctgcctgcaaatctctctttctgggctgtacttaatgatcttgtttttattatgtttaattatcccttcttaaactatgtttaattttataaatctccctcaaatcttggttccatgggcacaaggcctaataaattttttctggggcaggggtggggggttaaaattttattttgtgcttatatttgccttgcttcttacaggtttcttttattaccttcttttgggtttgtctatttttattatttctgttttccttttgctagggagttataatgtttctattcttttaatatttaccctcaaaattgaaaatatataacttctaaaattttaaacttaatatatgtatgctcattacaggcagtataaagatcttagaacacttcacttcacttttccccaccaacttatgttcttattgaatgttttctctttttccttttttataactattttttaaaagaaaagtcaggccaggcctaaactaaagctgtcagtttatagaagagatcattggcaagaaggggagtgacttgccttaggtcacagagttgggaccagaagccccagacagtcacactggtgcctcactttctcctctgggcctgtctcttctggagtctttctgtcatgattacatcaaggagggagtgaggagcacttagcaaaggctggttccccagggctgctggggaggtggtagccatgttaggcagatgtcaactggagagagaggagcaagagacagagagagacacactgagagaagcactcacagagacagagagggagacagaaagagagatagaagcatacccagtgacagagatagacagagagagagagagaaatagacagaaatattcagagaaagagacagaaagagtcagagagacagagagagagagagagagagagagagagagagagatgcagcagacctttttttttcctttgcatggaggcatcttttgtcattgctgcagggtaagatgcagaacatgtcattaaattagagatactattgtttcatcctaacatgctttcatctgcctaattaaataccgcgcacaaacccccaactattgtgatcgaacaatccccacaaagtcaagattacaaaaagggcacaagtctagtaattatgccaagtgtggttccccttccgagggtgcctatgattaagccatttagagggatcttgtggaataaaggtggatgcccttcatgaagtctgagaccagagaactggagctgcaggatcggttagccctgagcctgacagccatggggacacaggcctctgatgtgggtaaaatcacgtttcttcatgatggcaagaataagaaccacagctactcttttttgagcactttctatagaccaggcactgggctaagctttttctgtacccattttttatcctcacagagaagccaattggatagatgtcatcccattttaatagatgaggaaacggaggctcggagtggtaaggggacttgctccaggtcatacagactgcaggtagtgggggcatcactgggtgcagatctgtctggctgtaagtccactctggccatgattcttccatcactgcctgtggtcttgttctgactccacagtgaacttgtctctgctgtgactttagtgttgggtttcgtgaagcttttttttgtgtgccaacaaatggcctaggtctcctgcattcactagaggagtggttaggattctcaggatcgtgactggagaggatctaatcagagaatcaaggccaaagaaatccctttagggacccaagttctctgactgtgcaggaggttccatctcccttgtcattccttctgctgaatcttggtatttttgtgtggtccacagcaatgtctctaatgcgtatgctttcattatgattccaacaaacacaaaaatgtgactatgagaataaaatcagaaaccttagaggtacttggggctcccagtcattcagtgtccctgctctcccaggctgcatttgcgtctccttgtctagacatcctcaactccttttaggattctctcccttaacttctcatgctgcctttcctttctctgggccccatttcctcacccctccagatcctcacctcctttggggagcagctgggtctggctttccttggtacccctgagcacccaacccagagccggcacccagtgcatgtttagtttgtggcatagtttaacatccattcacacgcacatctgacagaaacttgtgatcatccatcataaagagaatttatcgtggtggattgggaagttatttaaatgcaatgcagcagggacccaggaaaattctaggtctcatttataccttcagaatgtgaatggaggagagtggttagaactgacatgcagtacctggggaagcctggaatgtagatatttaaagtgaaatacactgtccaagggattgcaattcatggttctgcattttgagggcagagaaattaacaaatgcctaaatcagaaactttagttttaaaatgtagaaaatatattcatacatcaatacctcacttatccagagaacacagatccagtcacttcatctatccaaaacccagctgactctgtggatctctaaactgccaaagtagaagacttttctttctttttttttttttgagacggagtctcactgtcactcagactggagtgcagtggcgcattcttggcctactgccacctcctcctcctgggttcaagcgattctcctgcctcagcctcccgagtagcaggaattacgggcatgcaccaccatgcccagctaatttttgtatttttagtagagaaggggtttcaccatgttggccaggctggtattgaactcctgacctcaaatgatctgcctacctcggcctcccaaagtgttgggattacaggcgtgaggcaccgcatccggccaacttttcttaaggctcattcggtttgtctgggagctctgcttcgggcttctctcagttcctagctgcacttgtgttgtgtacttttcttaccagttgtattatctttggtttccagactacagcaagtcaaccaattaggaacaagtgtagggttgatagccagcagcaagaaatggcagcttactgcctgacccggagggtgagaaagggaagaaatgtcaaagaccctgaggatttgaaaagcatgttggaaaattaggatggagggcagtgtaacaccccataccctgtatcttccctggggaccacatgtgtttctggcaggtccatggcttgaaattcttaaccgttgtttggatttgctaagtcatttaacctctctgaatctcagtttccttatctataagatggaaatagtaatttatcagctttctacgtgtcagacactgttcttatttctttgcatgtgtgaatttaattctcacaatttaccatgaaggaagtactacttattagcactaagcagttgaggcacaaacaggtgcaaacttgcacaagctcacctagttcatagatgacagaactgggattgagaggcaggcagccaggctctggagtcacattctggactgtggcttttgttctgggagcaatgaccctccctcccacacagagctgtttagagggtgaaattaaatatgtatcaaggagtccagcacagttctgggcacacactgagtggcctggaagaaaggatctgggctatgtacagcaccatgtgttttttgagagcagggggtcgacaccgattattcctggagggtgagattggaggcaagggaagtggggagcaacttggcacctcctgctttatccatgactgtattgttggactcttctggaagcacgttaccttagcaatttcaaaatatcctgggggtggggaggagaaagaattttggacaataagggcatgtctaaaacctgcagccatgtctaaattgcattttaaaaattagtctttcaaacatggcttaagttggagcacttaatgatatacgctttattatgtagaacttcacttctgtggaacagctgatgccttttcactggtctgctgtgaatgccacctgttactgtgctgagataggcttgtggtccttcctcctttcctcagtaaatctcacaccaggaggactctctgtgcctctggggtctacagctgagacatccagaccatctgcattgaccgtgtgctctagtgtgtctcgcatcctgctaggggctggtgattcaggggtgagttgggtggcatcctgcctcaggagcctataaagtgagagaggcagaggtggccagccagcccagggctgacctgaggttgtccctgagtgggggcatttcttctcatggaaggatccatcagagtggtgtgtcagctgaacagagggagatgaaggatttttattgaaaaggctacaggacagagaagctgttccaggttgagagaacaacaggcagagggaaggttaatataccctgaaagtctgtttctgggcaatagcatcactgagacctgtgttaaaaagagccagctcctggatgaattgagtttacagtctccatttgtgatcaagttctgcagggttgatcttcatgcatgtctgtctctctccctccctccctccccaaagcatctttttatccttctccattctcctttcccccttcttccctccacagaaacaacagctatctagaagttagttctatgtttctcatctctattgttatatcttactgcagatgtacatgtccataaacaatctatagtatttttaagctttatgtagacatcatactatatataacattctataacccattttgttttactcattttaatttgtcttttatttacttaattaattaatttatttttttgagacaccgtttcaatcttgttgcccaggctggagtgcattggcgcaacctcggctcacctcaacctctgcctcccagggtcaagcaattctcctgcctcagcttcccaagtagctgggatttacaggcgtgcaccacaatgcccagctaatttttgtattatcagtagaggtgggatttcaccatgttgaccaggctggtctcgaacttctgacttcaggtgatccacctgccttggcctcccaaagtgctgggattacaggcgtgagccaccgcgcccagcctagtttatcttttaataggtggttttaattggtttatatttattgtgattagtgatatatttctactctcttattttgagtgttccttctgccactccccctttttcctctgctgatgtggttatatccttaacactttagcatatatcctaaattaatttctttttttctactcaaatctattgctattcaatatcattctcctttactgaatctgatgagaattgtaatcatgcatcacaacccactaatacctgttctatcattgtttcctagaattttggttccaaaaattttaattgttattattttcgtgttacagttagtagttcattaactttgctaacacattttcctaatgcttttgctcgccactgttttttgtgccctattccttcttctgagttcccttttcttctggctgagttcattctcaagttgtacttagcgcatatggtgagtgccaaggatggtcaacgctcttaatatttggatgtcttaaaatgtctctgttttcctctcacttttgaatactgctttagcagagttcagaattccaggcatgcagttacttccctgcagaatttgtcttttgggtctcttgttactgaagagatgtctgctgtccatccagttattgactccttagaaactgtctttttctggtaactcttgaggcctatgcctggaacaggcttcctctcgcttttatcatattcttttggccacatcaagtcacaaggccagcccagattcaaaaggtagaaagtagactccaccctttttttttttttcttcccctgagacagtgtcttgctccgtcaccaaggctggagtgcagtggtacaatcacggctcactgtaaccgcaatctactgggctcacgcgattcttgtgcctcagcctcctgattagctgggactacaggtgtgtaccaccatgcctggctaaattttaaaaatgtttatagagattgggtctcattatgttgcccaggctggtctcgaactcatgacttcaagtgatcctctcaccttggcctcccaaggtgttggaattataggcatcagctggtggtcatgggtgccaactcaccttttgatggtaggagagtcaaagtcattccaaaggctatgggtataggaaggggtgaataactggccatgtttgcattccatctgtcacagttttccaccttgtcctgccatccagagcgtgcagcttcctgtgggctgaggcagcaggtagcagttggtagaacttcatcccagctttcctctagagcagaggaagcccttctctacctgctctgctccaaccctttgcttcaaatagtgagcttgactatagttctcttttgcattgattgtggctctggcccccgcctttacttgggcgtgctatgagtctctgttaccccagagaattctcaatgccaggcacctctgtctgtattgcactcagagcccatcaagcctgcagcctcatctccacttaccatgttgtggttttttcccccctgagaattttatttttgagtaatgctatgtctttaaattttctatttttgtatttcagctatcattgctgtgtgtttattacagcaaggaggaggagacctcaaaatgtgaatttaatttgcgataccaccttggctgggattcttttgtttactttcttcataaaacagtgcttgtcacattctccaggaaacagatgaggctgtgacagcacattagaatgtacataactgtgatagtgagaacaaaagtgcagactctctgggttagaagcggccctctagtgcttgaatccctcctcagcctgtcacacaggtgagcatctaacacctggacagctccagggctggctgaccggccacgtttctgttgcatccaagcatagccctggctttgaaaaaaatgccgttattctccagctggtgcctgtctccctgcagctttctgccccagcccccatatcctagttctggtcctttcctctggaaccaaacacactgcatctgtgctctctgcctctgagagcccctcagagctgtgcaggccatgctgggcctgagggggcccttctactggctgaacagttacaggctctgcagccaagactcgtgggatataattggctgtcctctctccagactggctgactctggggacaatctgcaggtggtcccttctctcttcctgggcagggcccagatagagcctcaaagatgggtttggatagaccaaccagaaactgagcaggcctgttctccacctccttgattctggaatgaatcattctcctggtgtagcctccagctgtgttgtgagatgaactcacatggctcctcggtcaattgccattcattcattcattcactccttgggcgcatcagggaagcagtgctgaacaaggctgccatggaacgtgaggtctagtgaggcagacagatgtagtgtgaccacagccacgagggcaaggtacccggtggtgggagtgtgcgtggctggggaacctacccagaattggggaggcttttctaagaaagtggtgtgtgctctgaagagcactttctcgttttcttaacatttccaaatccagattttcaagagagaaaatctcttccttgccagctcatttttcctgggcctacaaggttatgggtcagcagctagcctatggcttgggtttacataccttgtccagttagctaggcctgggatataggaatcttccaatttcattcattcattcattcattcattcattcattcattcctcgggtgcacttgggatgtgatgaaggaatccatagcagttttcattgttggagaagctcaagtaggaaatagttagggcagggatgggatggggtgacagtaagtgtggtggctccatgctgaaggagacatgcagctacaagggactgtgagtgaagcctaagacaccagggtgagcaagggacaaggtaggcagtggaaatggcagcggccatgccacagagggccttacagggcaggaggcagggggtggcattgatctttatcccaatctttatctccggggggctgaggagcccattgttgggtggaagtagcccagttgggagaggacaggatggtggttctgtaggcagcggggaggaatgacctccctggacagagggagacttgagaaagcagtggaaggtggggagagcgatgtcaaggaggcaccttgttttttttgtttgttcgtttttgtttgagacagagcctcattctttcacccaggctggagtgcaatggtgcaatctctgctcactcaacctttgcctcccgggctcaagcaattctcctgcctcagcttcctgagtaactgggattaaggaggcaccttgtatttgcttcctgtggctgccagaacaaattgccacaaacagggtggctgaaaacagcacacgttttttttttttctcacagtcctagaggccagaagtctgaaatcaaggtcttggcagggccagggtctctctggaggccctgggggaaaaccaatccttttgtgcctctccctgcttttggtgactgttggcattccctgacttgggtctgcagggttccaatctctacctccctggtcacattgtcttctctcttctgcctgtctagtctatttctgcctcactcatgagatttatagcctacctgaatattacaggataagctcctcctctcaagaaccttcactaaatcacatttttgccatgtaaggtaatattccctcttttaccatataaggcagcattcacagttccaggagttagggcatggatgcatatttttgcaggctgcctttcagccagcgcagtgctaaggacctgactatagaagtgagccctcacgtagtgcaggctgtgggccaggctctgtgtcctgactgctccagatgggttgactcattttaaacctcatgaaataggcactattgtcatcctctctttataggcaggaaactgaggctcagagaggttaaatgggcccactgtcacgccaccaggaagccaccaactgggagttgagtccaggcagcagtttctggagcgcttggcaggctgcactgccctcctaggcggggcggatggaggatgggtgctgttcactgaaatgaggcatctgggagaggggcgcagggaggacaggagtttggtttggggcatggtgagccacagcccctgacatccacgtgcttctgtgtccccttcattgccaagtgcagcctccgtgtctgggtttctgatcttggccatggcccctctgcccttttggcttgtggaaacagcctcccagtgcttcgatggcaagccctcttcagaaccactagtgccactgcccagtgtcctggccctgagcctgggtttggagctctcagcgtccacacaaactgagtagggtagcagacggggcatcacaaagactttgaggatgtaagggctgtgccactggcacccaaggagcctggagcccagctctgccccaggccactcccagcagccccacccttctgagggggccgaaagctggaggccctgagcaccatctcccctgaaccatgccttgctcactgctaaaaacccaccttggagccctgcccttcaaccagttttgccactcattgcttagggcttagggctcagcccacccagatgggttatagctgggaggggttaggtgctctgttatgtggaaaaatcacccaatgaaatgtcaggagaccattcccactcctccccgacgttcacttgaaatatgggcatgctttggatttcatagatggaagggtaagggcattcgaggtgcgagaaactgcagggaggtgaggagcaaaggcacagaaatgggaaaagataaattctgcttgggaaatgccaactgcaagatgactgtgatgtagggcacctgaggtgggtgacagaggggctggaagggggagtgggggcagaattcaggctgtctgggatgccagtctgtaagagatggaacaatggttttataagaaatgattctatgtcaattgcagagattctccactgatgcatgttgtttgtacatttttttatatcacaacatcgtttattatgtgaattttttacaatacaaacaaaaaatacagaaatgcaatatatgattacagctaaatgcagaatggtgacttttttctcttcaagaggccgtgattcccatttctagtaaaattaagagactgcatataggtagaaacaggttggtcattagcttcacaattttgcctagaaatgatctataaatgcattttccccctgctacttaccataaagtgtaaaaaggagttaaagaaagtttccttgttggttcctaccatatgaaagatgctatattctatttcagcagggccaatatgtgaacactatctaaattaaatgttattacaaaaatgaagtagtaatgagattctggctaaagagtgcactaaatgagaataatatatatttaaagaatccaaaacaaacaaaaagaagttgttataaaaaagctctaggtgcactgtaagcatatagggttttttttccatgtgtatttttaaacaatggaagtgtcaaaacatagggtcaactgtgttagactaaattacattattgtatatactgcattgaatggaacctttgtattataattatcatagagaagcatagtttgcatcatattatggccttttatcctcaatgaaaaccttccagagtccttttattttggaatatcttgtaaacaatcaaaccgtcagaacatgattatacaacagtaaaatgttatcttgcattcaactgaagataatctgtttaataaaaaaagaaaaagaaaaagtaggaaaagtagagctgttactttctaagtacacaacaccctagacaattgacggcatcttaatctccatcaagaacaacaacaacaaaaataatgtgtgtcatgctcttaaatccatcattatagataaaactggctcaaattggtcaaacggatccaacaaacactgatgtccaagctggcatattggcaactaatacgtaactggtggtcaatagagagtttaaaagatcttcctttcttcttgttcttttccaaggttctcgaagagttcgttgttctaaaatacgttgttgagcttcccagtttgctttctcatcctctaactgatgacgtttttcctctaattgtttatgctgtgcttccaaattccttttcatttgctcatggtgccgctggagctcagcttcagagttcttcagttttgaactttttctttgaccttcatctcaaacacctgctccatctccagctccatcttcttcattttagctacatgctcccttctttcttcttccatttgtgccggagggctcttggtcagctgccctttattcttgttgttatcaattccattataagtcacagctgccagttttctgcttctgtagttctcatagtggacattattagtaacctctttcaagtcctgcatgtgtgttcttatcaacatatttcttagaattgtaaaatcacagtgttcaccattttcaacttcagcaataccccaaggatgctgctttcctctgatcattttgccattaactttgatgatagtattactacctaccacaccaacaggtaaatggtcctttatctttttaacaagtttattttcttctttattatgtttctagaaattcatatattttaattttatgttcttgggtttctttcattatctgttttttaaactgttagcattcctctggtgtgagtgtgtcttctgtggcaataagtgagatgatactgtttcatgcaaacgcttcataaactcaatattcaatggtttaagtccatgtcctgaaggagcaatgaagtataaacaacgctacaccgttatcaggcatctgacgtccgttcacatgcgattctgcatttacgtagtcctcaagtttattatcaatgtagtcgattgtaaggctgccagcaattactattatccactgcatctccaaatcctggggtatcaactattgtgagcagcaactgaacaccaccttctttgattaaaactttggattgttccacccactaccatagcgtgaatcaaaaccagatctcttaactgattttctgtatacttggtttgggagattggcaaatcccacatagccttcaggggtcttctgttgagctaccgagcgacatggggcgagcagcggtttggatgcaggcggagccgcgggcaagcaggaagaagatgattcttaggtctgaatgcctaggaattcatgtggatcaatcagacctcccatggtgctgctgtggacgcttctctcctcagcagcagtggctctcgcactgtttgtactttttttttaaaaaaggaaagttatcataaaaaaatgataataggtcaggcacggtggctcatgcctgtaatcccagcactttggggggccgaggcgggcggatcacttgaggtcaggagtttgagaccagcctgaccaacatggagaaatcctgtctctactaaaaatacaaaatcgaccgggcatgttggcacatgcctgtaatcccagctactcgggaggctgaggcaggagaatcgcttgaacctgggaggtggaggttgcggtgagccaagactgtgccattgcagtccagcctgagcaacagagtgagactccatctcaaaaaaaaaaaaaaagaaaaaaaaaagataatagacaccacagtgcttctgatgtgccaggcattattacaagcagtttgtatgtatttaccctttaaatcctcacatgaggtgggactgtaaactagttcagccattgtggaagacagtgtggcgattcctcagggatctagaactagaaataccatttgacccagccatcccattactgggtatatacccaaaggattataaatcatgctgctataaagacacacgcacacgtatgtttactgcggcactattcacaatagcaaagacttggaaccaacccaaatgtccctcaatgatacactggattaagaaaatgtggcacatatacaccatggaatactatgcagccgcaaaaaggatgaattcatgtctttggtagggacatggatgaagctggaagctatcattctcagcaaactatagcaaggacaaaaaaccaaacaccgcatgttctcactcataggtgggaattgaacaatgagaatgcttggacacaggaaggggaacatcacacaccggggcctgtagtggggtggagggacgggggagggatagcattaggagatatacctaacgtaaatgacgagttaacgggtgcagcacaccaacatggcacatgtatacatatgtaacagaccacgttgtgcacatgtaccctagaatttaaagtataataaaaaaaatcctcacatgaactcgaggagaacagttccattatcccgaattacaggtgaagaaatgggatgctacgaggttaagtgatgtgctggagtctcatgactagtctgcttatgtcacgcagtttgaagcctcagttaaagaaagatgtgaatgtgcagggtatcctagaggcactccttgccatagccccaaatggcagcagcagtccctagacccttagaagatccattaagaaaaggaagtgggcccctgaggaatcacggtgattgccgacctcaagctgggcttgtgggtttccccatcacgttcatgtgggcatacagtagctctgtaaggcaggtgagagtccgtagcctgagatacagatgcaagcttagcctcagggtggcgagtggcccactgcagatctgcagtaccgtcctggggaatggcagcttataccaaggccaccttgctccaccctttctgaaaatccccgtgttcatgctgagagctgtgctccccttgttgcctccaagctctggggctcacagcacctgagactggcagggcaggtgcagttggaaacctgacctggggatggctactccgctgttgcactgtacatccctgtggaggcctcaacagaaggagaggggcattgctgccctggtttcgtctcatgggcacaccctgacttgttctgccttttggccttgccatgtacgtatcttgtctcctggctgatggcagcttccatgtcattaggggtgatgtgggtgggagaccaggagggcagggaccacgtcagccttggctcttggtccttagctctggtgtggtgaatggcatatcatgagggctcagtcattatttactggatcagggaaagaatgattgactcctgggagatgaggggtctagattggagtaccagccccgcaaacaactagttgtgagtcctcaggaaagccacttaatctctccgagcctcagtttgccattagtaaagtgggtgtgataatgtttgttttgagtgttacagatgactatcaaggggaaaatgtgtgacatatctttgtaacctagaaagggccttatataaagatctttctcaccagcattatgattcttatgattaccattgttgtctctattagtatgagcatccagccagcattaaaaacaaatgcatatgtaaggaccaatcttccagtgagtgttccaatttatgcaggtgttggtcaatcagtaagcaatttctgaggccctactctgcccagccttctacatgttgtgggtagaagggaaaagcatgacaacacaatcttctggaacaaaagcaaacattcggagcccaaaggatggctggtggctattttaggaagggtgagggcgatgttggagcagagaccaagacactgagaacttcggtgaacctgcagtctgtgactccatagagctgcatggatgtcctgtcctgcagaaactgttgctcaataaagccgatgaaatggatgtgtgtgggaggttgggtgggggaataagcaaagctccttggcaggaaaatgagctggcgtctcaaactttagtgtgtacccggatcatcagggatgtgtattaaaaatggagcagccctagagattccggtttggtaggtctggaatagcgcttgggaagcggcattttaccaagcccccaggtggttctgacgcagtggtctgcatctttgaaaagcaccaccctgtgcccgggcgggtctccaagcctcagcttccagctgtcaaaacccagccaaacagagctacttaaaaatgcacagaacacaatgagagagcacacatctgaattctaggtgatattttcagatggaacgggacgttatttttgtccatgttggtaggaaggttcttggggtttagtgaaccagagcggagtctgttgctccatgctgctctaattatggtccctgaagctctcagtgggaagtaagaaccagaatattctttctgaagatcttgtgtgctaccctggaaggtctgttttgcaaaattaatcagctttgggccagtttcttatcttgaaccgtttgagatttctgagctgcagttgcagaaagcatgctttgggaaaatcacatctttgtgtctttgtttctctagtgcactggtggagcctgacttgtgtgccaggcccagggtgggaggcaaaaatcagagaggtgatccttgcccttgagggaggacaaaaaaagcaaacgtagagctggagcatgaaggagaataaaagaagtgttgttggaaggttcagtaaggatcttgagagaataatatcaaccaaggggaaactggataagaaatcaatttcaaaatttccaggatgaaactgctccctaaaaagtaattagcgatattaaattcctcctctctctagcatgaatgaaccttggccattgaggaaacacagtggaaaagttccagaccaaatcctttgcctgagaatgtccacccagatcttagttgtaacaggacaatgaggaagttgctggaagaatgatttccagcctttggggatcttgtttatctttctgaaacagggaatgccttggcaaatgaaatgaggtgctctgtaggagacggggcagagagagtgggggtatttattgacatgaaacccatttctctcttagtccaaatttgctgagcattcagtcttcttagcaacaacaagaataccagcagtagtcccttgggggtggccaagtcctcgtgtttccagagcctgtgttttcctgtgtctgccggccctccctacagctagataaggaatcactacactttatagataggattggaaggcccagagaagcaaagtgacttgcctaaggccacacagctgaacccaggccatgtctgctcctgcctgtagcatactggactctccagtacagactatggccccacgttgtggaatccagtgaatgtttgggtgtttcagggaagactgtgacaggcacaaggtagtttgctaaaaaaagaaaccgagcatctccgtgagaacttgcactctctttcctccagttttctcccctcccactgaatcaattaacaatttcaaattgttccctagtgcttgggcaggtttgttttaggattattatgatcatcgttattgcagggtgtgcttcctgagcgatattaaaatgaggagttgtaggctgggtgcagtggctcgcgcctgtaatcccagcactttgggaggtctaggagggaggatcatttgagctcaggagttcaagaccagcctaagcaatataatgagacatttaccatttttttttttttttgagacagagtctagctctgtcacccagtggtgcgatctcggctcactgcaccctctgcctcccgggttcaagcgattctcctgcctcagccttccaagtagctgggattacgggtgcctgccaccacgcccagctgattttcgtatttttagtagagacggagtttcactgtgttggccaggctggtctcaaactcctgacctcatgatccatctgcctcggcctcccaaagtgctgggattacaagcgtgagccaccgcacccggccaccaacaattaaaaaaaaaaaaaattaaccaggcatggtggtgcaagcctgtggtcccagctactcaggaggctgaggagggaggattgcttgagcccgggagggtgaggctgcagtgagctgtcatcacaccactgcactccggcctgtgtgacagagcaagactctgtctcaaaaaaataacaatgaaaaaataaagagccgttcaagtaaaatctttctaaaaccaactcagcaactcagctaagggtcttccctgtggtcacattgtttgtgctgtacttgactttggcaatcgcaggcagctggggcttgacatccactaccccacacttgcatctccaggctcagcctggcagtgcccacctgaaagtcactcacagcttccagtgggagatgggaacaaaccaggaaacattcacaatgaccagcccttggcccatactggccttaacagagcttcaagagaccatggtgccctgaggaaaataagggtaagtttttaacagagctgactttgttgttttaaagaacacccttcactttgagatggtgccttcccttccctcctcctccttccttcttatgtcctttaaaaaattaaattgtggtgatagcagacattaggatttgtttattgatttatttatttcatttattattttctttttttaagagacagggtctcgcttcatcctccaggttggagtgcagtggcattttcatagcttactgcaggctccaactcataggctcaagtgatcctcccgccttagcctcccaagtagctgggactacagatgtgcaccgccatgcacggctaatttcaaatttttctgtagagatgaggtcttgctgtgttgcccaggctggtcccaaactcctggcctcaaatgatcttccctttttggcctcccgaagtgttgggattacaggtgtgaaccactgcacccagcccatgttttgttttttaatgtctttacttgagaaaataaaatttgacaatctacattggtattctgatacgttttgttttgtttggaaattgtgtgttttatgacagtctgagcagcactgttattgttgtagaagtttgtatgaggtcagtggggcacagggtggaagtggtcagtcctgtttactgggatcagggaggatttggagcagaaagtgacatgtgagctgagccttggaaagcacagtaatagggtgctcaccgggggaccagagggccatgaaagccttttgatcagtgagggacatgataagcttttcattttagggagatcactctgaagggaggtgaccagcagaggggaggtagcaggcctggaagcagagtcacctgccacagtgaggccagacacacgcatgtggcggtgcggtgcagaggctggcacggttccgtggatactcagtgagtagaacgtacgggacttgagactggctaggtgtgaggggccacgcaacgatggagtcttggacggctcccagttttctgccttggggaacctgcagaggtgaacgttgatactaacatgaatgcaaataacaatagtcatggtgacagctgatgtttactgagcccttctttgtactgggcacttgctgagcaccatgcctatgcagaaggcttatgcagagaaagcaggtttctcagagtcagaatctagagcccctctctcacccagtcacatctgtattctgccttctgggacactgaccacattttaggggaagatggccagtccaggtttggacctgtgggtcacccaggtggagatgtgtggtctggagcttcagggaggtggaggttgggatttggggtcatcagcctacagatgatggttgatgctattggagcggggaggtcagctagaaatactccctgggaagaagtgctctgcccagcagagaaggaggagctgttccatctttgcagccctgatgcctgtcatcttagctgtgatttgggcctctggttgtatatttcctgcagatgtgcctggaatcattgaaatgagaaaaggggagatttggggggctgcacagcccttccttgttcttcttattttttcttgagctttttatgatggatgatttcagatgcatgcctcagtagaaagagtaggataagctgcctccatgagcccatcccccagcttcagcaattagccagcgcgtgcctgcccctttcttaattgactcttcgcattcccactctctgcatccaggcagtttctattaatactgtggagctcctgctctgcccatttctcctactgcctgctttagccagaccgggctggtcagtcctcaaactgccttgtacccacccccatctctccctggcattcctacctcaccttctaattcagacactgtgctgtccccctcttctcaacttggccaaagcctcctggtgccatgcggggtggggtccccaggtctgttttgtgtcctgagtttacacctaagcctccttgggcaggtcactgtatacccgcatgccctgctcagagcccgtcagcaccactgcatactgtgtctgaggggcctggggccacatgctccgtaggacagaggtggccccctcagcctgggattgaaggtcatgtgtaattcaacctccatcaggtcaggagaaaacactggcccctcaccctgtgttgaaactttaagattcccctggtttcttgagaggttttgttttgttttctctgttcatttgctaaacaggcctggtatgtccattgcaggtcccaggttgagaggacccaaggtgatggagtgaggcccagccactatggcaaggccctcagggggctgctctagtctcctggtgttcattgttctgcttgtctacagaaccttccattccaacaaaatgtgctagaagcccacatataaaatctccagaagggaacccttctggttaaatggtggtggggactcagagccttgcccagtagggtcatgccatgtcagtctttcttcaagaggcctcctgaggaactgagtttgaagcccctaggttggagtcctcaccttcaaggccaccaaagatcccacccaggaatgaggccttctctgccattccccacagatacagcagctgggggtgcccgtcttgtctcccggtcagcctgagctcagtgccaggcccaagaaagatggcacaggcatggttcttgccttcaggtaggtctacttcagagggctaaggaggtagggggcaggggagccatttatgtctataagaggcttgttaataaaagacagagtgaaaaccatatagaggacatgtggtgtactgtgatggaacagggaaaattctgcccatctcacgtggcctgtaggtgggcttggaggctgggttgctgtgtgatgccgcctcctaggtagccaggttcatgctcgctggatgagcttttaggtccaagtgtctgccagccatgtggaagcccgttccagatgcttgatctgctgtgtgcgcacccctggttgggtgctgctgtgacagctgaagacgaaagtcccaccccacccgccccaagttagatctgtcgtacagacactggttacgcacgtttggggattttttttttcttcttctttcctatgtgaagttttagtttttcagtaaacagtaattaaaacaaatgtacacagagacaacaatgccgcattttaatttatttatttcagctgactgcacccgccagcctcctagcaaaattcctttgttttcttctttatgcacgatattaacaatagatctccctgtgtagttttgtgttcaccctgtttctagagagtgtggaggatgcaatgggtgtggcgtatgaatctcatactttctacctgtagagtaggtgatgcacttcctgaactgtggaaaatgaagacgctcctgtccttccttttcaaaagcctgctcctccaagatgtctctctggcctcctcagttctagtcactggcctcttctaagaaagaaatttttcaggtggatgttgtcattgaatgagcctagcttagggcacagctcctagaacttgcttataagtaggctgggcgcagtggctcacacctgtaatcctagcactttgggaggccaaggcgggtggattgcctgagctcaggagttcaagaccagcctgggcaacatggtgaaaccccatctctattaaaaatacaaaaaattagccggaggtggtggtgcacacatgtaaatcccagctacttggaaggctgaggcagtagagttggcttgaacccgggaggcagaggttacagtgagccgagattgcaccactgcactccagcctgggagacagagtgagactctgtctccataaaaatgaaaataaataaaataaaaagagcttacttataagtgaatactctcttccctgctcttcccaatcatctacccttcccctccccagcattttttcttattgctctgagtgcattgctggaaatttccttacctgtgccctcaccccaggtggctctggggattctgggaaggcagtgatgcttgctgccacttcatccttgagccctccaaccaccaagattcatgaggttgtgggtgagtgcacagacaggctggcctcaagcccagcttccctcctgctgtctgtgtgtcctggagttggttatgtaaactctttgagcttctgtttccaactctgtaaaatgggggttgctgtggacatgcagcttcatgagatgatgcttgtgaagtgtgcaggattttccctgccacatagcaagcttcaggagttcagtgccattattattatttctggctgctgttattgccaccctagtgggcactcagcccatgcatgttgtccctggcatgttgtccctggcatgttgtttgtgatcacaaagttcccagcataagaataaaattctgtatgctctgttgtgcaggagaacacacacattttttgccatctattttagagcaacatgtatggaatcttggtggggtggcctgaatcctaggctgacgggtgggggcctgcagatctcagataagctgcaccacttgggttcacaatgcagtgcttggcccagacaacccctgggatcccttgttgacctaatatttcctaaaatatgagtatctggagactgagcacagcataggggtgggccttatcagctcctgctagggaaggcgagtcagccctggggtttcatgcaaagcttcgaggtagtcgcctggcctccctcagtgcttgcctaaggcttgcaggctttggggaggggagctgccaattcccatgcatattgggagtagggatgctggtgggaggtcttacctgctgcctgctctagctgttaaggggagggggtcttgcagaatctgtgactctgcccctccaaacgcggaggcagctggtgaatggaggctgtgttttgcagaatgcaagcgtaaggatggaaacagagccctgggcggcagggtctaaaagcctggttgtcatgtcaacagattggcccaaaatagtgagaaatagcaaggggcaggtccccatatggtcctgtcgtgaccacatcgccggctccttccatggcagggctgggctgggccaggctgttataggaataaaattgggaggggggctttgaggatatccccctaccatttcctcaggagggaccagagagggcaggtgtggtcctggtccttcttagctatataaatgtgaagcccgagaagggaacccataagccagagcccccacccccaaggctgtgctgtgactgcctttatttcccccattgggaaaattcagcaaacaggtaggagcactcagtgtgtgcaggtgcaggggtcctgaggcagtacatggaacagctaacatctcccaagtgttcaccggtgccagcactctttccagccctttgaatgaatgaattcatctgaccttcaccataacagcataatgtaaacactattatcatcctcgtttatgggggaggaaactgaagctaaaagtttgcccaaggtccttcagctagtaagtgggatacttgaagtcagacacctggctcaagccagacccttgaccattaagctacagagatgtaggagacagggtctccatgggccttccccaacagagggtgctggctcagcccatggaaggggcatctcacctggcaaagacttccagaagaaagcaagatgcatggacttggccaggcaaaggggatgggacacaggtgtcatggcagaagccatataccctcttaagggtttggggacctgtggctggggaaagaggacttatggctgtgggaggagacccagattggctcatctccattgctgtgtactctgggcaacctccttctctcacgcaactcatttccttataaatacaacctccagcctcctgtctatccaggaattggccctctagatatggggccattttgtgcttttgtatatcattatttagtttcattttgatttctctttagtttttttgtttttgtttttttgtaaagtatcatttggaaaatgctttcctgacctggcagagaacaaaagcatggattctctctccctaccaagctcaaagaatagggaggaatgggctggccatgtggctgacttctccttaagcatcaagactcagcacaagtaccaagcaccccgcccctgcaggaaggcttccctgattcctggcactacatctggtggccggctctaggccccacactctctgctgcccctttcatcatatgctctcccatctgctgcagtctaaaagtttcctttcccccaagagtcatatgttgaaatcctagcccccaaactgatggtattaggaggtagggcctttgggaaggggggtgattaggtcacgagggtggagccctcatgaatggattctgccttataaaagaggtacaagggagcttgttctcccctcccaccatgtgaggacccagccagaaggcgctgtccataaaccaggaaaccagccttcactagacaccaaatctgctggcgccttgatctcaaactttctggcctccagaacggtgggaaataagtttctgttgtttctaatctgtccagtttgtggtattttgtgatagaagcccaagcagactaagacaccattctctgcggtgactgtgccctctctcatccccgctggcacgtgagctccctgagaaccgggctctgacctgtttcctcctgtttgccaagtgcctggcagatctcagcctgaaagagatcctcagtaaacgcctagcacatcaaactgaataaattcagcattcatggttagcaaagggctcgagcttctgccccatgcagctccctcgagtgccatggttagggcttcccagcattacttccctgttatacaaagggaggaccaggcttgtgagctcccctatcagatgtggactttgactttcacctctggggatgggctgccctgtgcaggtctgcacctccctctggccttccaaaggctgctgctcttcagattttgccagccatcttgttgaggggtcctgccgaggggcttccccagaggcggttatgctcctaaatgcactggtcccaaactgctgcctcaatgagccataggaaccttccctgggccccacccctccagcaaattcctctcccagagcccctcccttcccctcccctcccagcacttggtggcatctgtttgctggtctgtccgtctagcaaggttccaagctgaaacccctttgccccctttcctaggcagggagaggcctcacattcttccgtgaatccaggggcagcaccaggcgtcaccccctgcgcaggcagtgtcgtgatgggcttggggaccccttagcaggctctcagccacggggtgggaggcgggccagaaatgagtcctggggctagacactgggaaggtgcattagggcttcagatgtagaggagctgggacctgggagcaggatgttgagatgggaacacagctgtgcccaaggctgcttgtgcagcctggaccccagaacccccttacaacctccaagtgtgggcgacactgtgcctgtgggatcagacctgagatgttggggtgttggggaaatcgcctctgggatgggcctctgaaaacaggtgcctgcagcagcttgtgatgcagagaggcggaaggacttatgccaggcttggagaattggagcccttgagtagagtccctcatcacagtgatgtgtgacagtagcccagctctcatctgtcaggtgggggagtgaccaccatgtccccagctggaggacaagcgaggcacataattaactccagctgagtcgctgcagagggagcatgggcacctgaggaatgagtgtggccacggtgacggggtgaggacccaccctacagccccccttcatctgtgagcaggcggccagtgggtgtttgcacatgggggagctgtcgggatagctctggcccgtgtgctaggaaggactgtcagattcggggacatggctcccaagggaaagtcggtagcgtgggcagctggccagtgcctcaccagccttgtgcccagtgctggactcagcagtgtcccctggacccagcaccccctcctggcttctctacctcagggggtcctggtggcccagactcacacagcccctgaaggaaactaggactcccctctctcctagaggctactcttcctcttgttctgatctgaccccttccccctgctcctgccattgtccctggaccactgcactggtctctcacccctccccacgccctgcccttcctcacttgaataacgaccttcaagtggctgccagggtcgtcgtccctgtcctcagctctggcgatgtcatgatcaggtcgaagcactcttgagaagccccagggtttaatgggtgcagagcttttctgtttgggataatgaaaacattccggaaatagacagtggtgatggttacacaacatggtgagtgcacttaatgccactgagttgtacacttaaaaataattagaatggccaggcatggtggctcacgcctgtaatcccagagctttaggagacctaggtgggaggctcgcttgaggccaaggaggtcaaagctgcagtgagccgtgattgtaccactgcactccagcctgggcaacagagtgagaccctgtcttcaaaaaagaaaaaataaataactaaaataaagtggtaaaacaaaacaaagggaaactccctatggactgaaaaataaggggcaacctccttaagctggcactggctggctcagggcctaccagaggctgccccaacctccttttccagtctcacccctcgcatctaccattcacccttttagtgctccaacctggagagttactggacttgctgttctaagacatatcctcactttccctggctctttgccttcccttatggattctcaggattagaatctattccttcacttggtgaaataatcatttctacaacactctcctgatgacttattactgctttccaaggccttttacactatctctggccagctctaaagagatggccttatttctaagagcataaggtttggagtatgatagcctgggtttgagtgcaggcttcatggcttaccagtcatgtaatcttgaacttgtcagttaagctccctgaacctgtctttcctcctctgttaaatgaatgctaataacagtatctaccccatggagtcactgcaaatattaaatataaatagtaagtgggctaatgcgtaaaaagaatttagcttatttcctagcacataggtcagtattaaataaatgttagctggatatgtataaattgaaccaaaatctggccttgagtgcagacaaaaacacacactggtaggctggaagggatctgagagatcatctgtggcagtcatagtaggctcccaggtatctggttctctcctcacttagtaagttgcactttgtgtcccttatacttgggtggggccatgcctgtctcatgggccatgtccagtcaatgaggtcaatttaattgctggctgagcctctccagagttttcattttccttccccattagcaactggctgcattcaagatggcggttgttccattagcttgggctcctaggtgtctgggatgtgtcaagtgccccccttgcttgagagaggaatcaacttttcctggggtgacccattgacatttagggtttgtttattgccaaagtatagcctgctttgctttgcaaactctgctgaatgacaaatctgctaactcaacatttttgttttttaagtgaagcatagatgaggtgggggtcacagagtgaggcagtggcaggtctggagctcatatcctatgcctgacatagctggtttattctttcttcgatctctttcctcatcagtctctcccatcattgacctcccatgaaggagactactgagatggactcatttgaacgagtcttgttgatatcatgaattggtcaaacccacgcctcacaggcctttagctaatgaattccccagtggacacatgtctctcctaggggtgctaggccaagttgcttgccaagccatccaccagcacttcacgcctggaccaatgcacccacctctccctagcctccttcctccccattgggtcttcctcctctgccccagctgccagaggcatctgtgtaaagcaagtgcctcttccctctcggcactcccctggtgaaagtgctgcagtgacttcttactgcctgaaggaaagaaaaccacacctacctgtgttcagtgttcccgacgcactggctcaagccagtccgaacccacccatcccttctccatcctgtgctcctgctagtgaacacgatggacctcttctccaaggtgccccgcaacttcctatttccaagccttcactcttgctggtaactcagcctggtgtgccctcccaccacctcagtctcttgttcctctcgcaaggctcagctcaaatgccgcctcctccaagaagtcttggcagaatatctcagtgcaatttgaatattccttccttttttgcgtgacttttgtctctgccattgctcccacttctatcctgccctgtgttatggctttttgtttgaatcttctcttccctcctgaatggaaagctccctgatggccaagactgtatgtcactttttatgcgtcttcagcatctaccatgagacctggttcttcatcacccagggtgcgtttatgggatgaatgaatattctctaactccaggtccaaccctccattacaccatttactacatgttgctaaattatttccatgtctctcacccactccacattataaatcccatgagagcaaggacccagtcttacccatctcatcttcccctacctagctcaggcgcccagccaatgttgaaccaatgtgccccacaaatgtggaatggaaaggagtggcgatggcttggtggcacacgtagttggagtttggtatctcttaagagggcgatccagcccccacccccggagaagggctgccaacatgtgatatttgcacaaacctgcagaaaagagcacccctctcctgatcggcagcccgagtacactttgtgtttgtgaccctgacttttaaaaatgtcacacctgcatatgtggggaggcttactgacagctaattaggaaacgcagtttgtatctcccagtctttgagaaacattttgtaaattgggtaattggctttaatagtgcagaggagagatgtgtgctatggctccatcatcttcaaataacacagtctgcagccggccaagaattcagagtgacagcttcagggagaatacagaaatgccagtttttctcagtattcaggatggacagcctggctctctggagacttttagaagcagatggtctgtccatcaccccggggaaggggtgtgaaaaactcaagatggctggagttaataagctgtttgggacagagctatggatatgactacttttatttcaggctctacccaccagcagtgattgtatctgccaggcagcagtaatttagtccagctaggatgtattaaacacctgtttggggccaaactctttgataggcaaagggggacagaggcgaataagataacctagttcagcagggcatgatggctcatgcctgttatcctagcactttggaaggccaaggtgggaggattgcttgatactgggagttcaagtccaggagttcaagaccagtttaggcaacacagtgagacatgtctctacaaaaaattaaaaaattagtgtggtggtggtggtgtgcacctgtggtcccaggtactcaggaggctgaggtgggaggatcacttgagcccaggaggttgaggctgctgtgagccatgatggcaccactgcactccagcttcagtgacagagggagatcctgtctttaaaaaaaaaaaaaaaaaaaagacagccaaactcagcataccttagttatatctggctgtatccctgaaattctggtttgacgtaagtgtcttgaatgataggagaacactttttaaaatgtaaggcatatatactttgtaccctttcccataatcttttcttgtctctctcaactgtctttacccttctttaatagttccccaggtgtgctgattctttatgtttcaaaatgcttacagcaggcgtttaaggatgtttgttagatgatgcggcctctctgtagtgactacacctctatagcccagaagtttcatgcatgaaagttatttcttgcttatgtcattgtcaagtgcagcttgaaggggtgtgttggttggtgttctgggaagcagatgctcagagttagaggggccctggggaaattcctttgaaaggatatgaagagagatgggcagggtgagccttcagactgtgcggtgggtctgacatcagtaaagggtgtggggaaggaaagaggctcgggtaggaacagtccctggcagcagcactgctctaagaaagttccagctggaccagtgggctcagagatcacctgtagtcaggtcttacactggccagaagtgaggagcccttgttcctctgccatgctcagtccatggttggtggggtctgggaagagggtgacctcctctgaggcatacccaaagacgccacacctggaggctgtcagctcgtgagactgccctccttgggatggtttctctcgtgacatagtggtgtccccttccaggcttgccatagggatttgggatctggggggtttcttcctgtttcaggtccttgcattttttccccactcacactgtggatggaaaagagcacagaatacccatggaatggttttacaggccaacctgggcatggcacacatcgtctttgttcatattccattgcccaaaactcggtggtcacacctaattgtcggggggaggggctgggaaatgtagtcttaccctgtgcccgaaaagaacagaacatggatatgatggagcatggactctggaacctgactccatgggtttgactcccaactctgcccctcactcactgtgtgcaacttggggcaaattactcacctctctgatcctcagttttttcatctattaaaatgtggataataatgggacatggttcatagggttgttgggaggattaagtgagttagtgtatatacagcaattagaatagtgcctggcacaggcaaatgctatgtaagggctcactgtgttattattattactattcttgtttctaaatttaacacttcagtaaatgtttcttgggtacctgttctgttcaaagaatttttagaggtcacatgaacttactgtttcctggacagctcctagtacttagtaggtgactgaaaatgtttcaatgaattagttgcaatgacaaaacaatatagtgtatatttaattcagttggatatggtgctgggctaattttgaacatgatttagcaatgataaatgttaaagtctgttcttaggttcagaaaatcacccacagatgaacagaaagagggaaacttcagtgattgagaaagcaccctgggtgtggaaagcttaccagtttaaaaatgactttctgtctttataaaagtaatctgtattttttttatttaagtaaaagaagcaagtaacaaaaaaccactgaaatctcataacctttaacattcgatgattctcattccagacatctctctatgcatatattataaagaaataattttataaaatgagatcattattacatcctactttagatcgttgttgaattttatttatttgcatataacagaagaaaatgaggaaaagtaaaatagaaggaattgctcaccattaaacaattttgcctttgctacagaaaatatttgtttccaaaatgtctctccaagggtaataaaagattatgaaaagcagtgaggttaaaatcctggcttttaaactacagttttcaattttagatggtattgattaaagcccttctatggaagaagaggaaattaacaatcttacaacttctcttccctcttctgcctcctgcattttatgttccattattatcttcacattgccagttgtttcatgttaaatgggtctggctctcactatcactccttttttaccacaagtcctcctccattcctgagatttatatttttgattcatcttttggttggctggattttatccagtaggttttttctcccctgggcaccaaggaaggattgtcggtgttttgctacccaagataataggtgctgatttagtagtttttactgacagcaagctctgtatgatgtaggagcccaatagaaggtgtgcagactgaagccgcattaacagaagtcaatactcagaatgcgggaggtgattgtttcattcagcttggcattgtggctgggagtgctctgaacaaatcaataaggaaaagacaacccagtagaaaaatgggcaaagttaccagtccaaaagaggaaacacaggctataagcatatgaaaagatggcttaacctctttagtaatcaggaacatacaaattgaaatgtgatatcaaatacccacaagactggcaaaaattaaagctggcaaggatatggagcagtgagatctctaaaacactgctgttgggagtgtaaatggatcaaaccacttagagaacatgcagcaaacgctatgattcaacaattcaatttccaggtttataccctagagaaactcttcatatgtgtgcaaggaggcgcgtatgcaaatattcgaccatcttgcttacagcagcaaccaaacacaatgctggaaacagcccaagggtccactggcagaggaatgaacaaacaaacggtggcatattcacacaatggcatattacacagctatgaaaatgaatgaaccacagctatattcagcggcaaaaatctcacaaacataatgtggagccataagggcaagtttcaggtgaaatgtataacacaattccacttatatgtatgttcggaaatgagtaaaattaaatgatacagtgtttaagaaacatgtacatataaaactgtaaagaaaagcaaagaaggggctggcacggtggctcacttctataatcccagcactttgggaggccaaggcgggtggatcacttgaggtcaggagttcaagaccagcctggtcaacatggcagaacctcgtctctactaaaaatacgaaagttagctgggcacagtggcatgtgcctgtgatcccatctactcaagaggttgaggtaggagaatcacttgaacctgggaggcagaagttgcagtgagccaagatcatgccattgcactccaacctaggtgacagactgagagtctgtctaaaaaaacaaacaaacaaaaaaaaaaaaaaaaaagaaagaaaagagaagaaaagaaggataaatgcaaaattcaggcctggggctccccctgggtaaaggagggctatgtgcaggtgtgggcgcagaggtcttcaacatagctgtgatgctggatatactgtctgttcgcattactatttttcatacttaagttattgtatatggaatattttctgtgagtgaaatatttcacagcacattcttatttaaaatgaaaccgtgctctgaagttagactacctgaaattgggcaagttattatttctgagcctcaaattccttatctgtaaaagggaaataacagtacaggttgagtaccccttatccaaaatacttgggtctagaaatgtttcagattttggggtttttcagattttgaaatagctgcattatatttaaagactgaacatcccaaatccaaatattcaaaatccaaaatgctccagtgaacatttttattgagtgtcatatttgtgctcaaaaagttttggattttggagcattttggatttcagatttttgaattagggatactcagcctataccttttaataatattgagaggcatgaataagatccttgacatcaagttcttagtactgtgcctaacacatatatatttttttaattttattattattatactttaagttttagggtacatgtgcacaacgtgcaggtttgttacatatgtatacgtgtgccatgttggtgtgctgcacccattaactcatcatttagcattaggtatatctcctaatgctatccctccccactccccccaccctacgccagtccccggtgtgtgatgttccccttcctgtgtccatgtgttctcattgttcaattcccacctatgagtgagaacatgtggtgtttggttttttgtccttgcgatagtttgctgagaatgatggtttccagcttcatccatgtccctacaaaggacatgaactcatcattttttatggctgcatagtattccatggtgtatatgtgccacattttcttaatccagtctatcgttgttggacatttaggttggttccaagtctttgctaattgtgaatagtgctgagggcacagtatacgttagctagtgtcgcttttctgggcagggtagatggaggtatttgggggaccattctaggtgctacatgcccaaaaaatctgtcctccaaaggctgtttgtgaaatgactcgtagataagcaggctgtaaaactatcctgtatggggatgattggaagtgctaagggtagtttagcctgaagacatctctcggagtcactctgcggagcttagctatctgatttccaggccaatgataggaagaattttctaagaagcagagctggccgaggacaaattagctccctagtgagagagtgagacccctggcactggacggacagacgtgagcagatactgagtgctcctgcgtgggagacccagaggggactttctaacgggggcaggttggacacattagcttttaaattctctttccattctgaaattctgcatggagtaattcccagtttcagatgggttgttattaactctgacattttcttggcatttttacattttaactctcagcaacattttctttgaaatttttaaatcaaaaaagtattttaattctttaaaaatgagatttaaatgaaaatggatttcatctggagcctcactttttcatttgaaaattgattttcatggcttttggatctgttcccatgtttaagtgctgaattttaagagcctatatgtgccaatggtgatttctctgtgacaagtccttatagggaaggagaagcccttggcagtggaacagcagacaggagatgtgaggtggtgaccatgagctacagtagaggaggagtcaaaggaaggtaataacaaataccagagagaagagggagggagggaaggcagcatttattgagcacctactatgtgctagagccaatctccaggtggcaagactgaagacagaggctaggccagtcatgaagctttgagttattgcatgacagtttgaactgtgattaattacttcctgcctgctggtcaagttgtggccatgccaaccagtcagaatatcctctagaagtgagtggggtttccggtgggggaggtgtggtggggggaaaggagagcatgataaagcccatagctttcttccaggacacagacccccacttagagtggctctgagagcaattcatcaaaaaccaaatcacagaaagacaacttgctgtaaataacttctcagaatgatggttttgcccagtgaacatctcactaaaagctgtcagacagacaacttaaatggggtattgaaaagcttctggcatgttcctggctcaggccagggctggtccacaggaaaagaagggtaatcaacagccctttagggggacatcttcacgtgcagcatttgagaagggaaaatgtgaaatacgcataacattgactttcacctgagctggaaggacagatcctgtgaaatggctgtggcaatgtgtctgcaaggagtccttcaggaaactaaaacctagagaagttccccagtgatttggtgacttgatcatcaggtacattcatgcacagtggattaacttggagtgagtagcctatagcgtatatgccaaaacgccttgcttatgagacattcacccacccttcctgaggccagagacaaacactatactctgtaaggacctccagggtcatattggtggttttcaaacatttttgctgctagcaatgaagcctgctttaaaattaagtgttctgtggagctctgatgctgcagctgaggcagttgggagaggagctgctggttgaagtgaaggtgaggagctcagtgcttctttcactgccctatctgctgggctttacgcccctgaggggctgactgtaaaaaactctaagctgatccagcccccaaaattcacctttggtgagctggaaagtccatctatttgggacgcgaatcatgtcaggtaagaagacacagcattagaaattaggataagggaaaatagcatcgaaaatgggacagatatatccatgtgatttattttgttattcactgcaaagttgctccctttaggggagccagggaagcatgcttggtgcccagtacgttgtttctcttgcttttagccaagagctctgatctggaggagacctgggcttgcggcattatcctgggggaaatggtctttttttctagaatgctgttagctttaaccttctcttcggttgagtctctagactattggaatgctgagagactgggaatccagaaatccctctcctaatcctggcaagacagtggacaaatcccttctctctagtcctcagtctctgcatctgaaaatgagagtgtggggctagattagcaatgcctagatgttgggatttcacacaccaagaaggggagggccgtggaacagaaacttacatagtgtgaaaattttttctattttatcatgtcaggacattaaaaacaagacctctctcatttctatccttttgtaacagaaaaatatttcaacaccattcaactacaaaggaccttgtctgtaaattaaggatcatttttcaaatggaattaactttaaggaaaaccatactgtgtcattcttatttttcacattttacctgagtgtatttgctttctatgctgctgtaactgatcaccacaaatttggtgatgtaaaccacacctatttattgtctgacagttctatgccagaagtctggacacagtgtggctcccctgggtcccttgctcagggcttcatatgaccaaaatcaaagtgtcatctgggctgggttcgtatctggaggctcaactggggaagatttgcttccaggctcattctggttattggcagagttcagtttcttgcaattgtagaacagaggtccctgctttcttgacacgtggacctcttcatcttcaaaccaacaatggcatatcaaatccatctcatgcttccaatctctgatctcccctctgctattaggtaaagaaagatctgcttttaaggacttatgtgactacactgggcttacctgtatcataatttaaggtcaactgattagtaaccttcatgacatctacaaagtcccttttgccatgtaacataaaatattcatggaggtaattccaaggggtgaaggtcaatggggccaaaactttgcccgccacacccactctggtgaaaattcagtcagataaatatttgggaacgttgtaagattctccagctccaatactggttgtcaaatagtctcagatattttagttgacatatcccagtgttttgtatttgtgagaagccgtgacatcattactaatacagaatcttgcatgggctggatattcagaaagtgtttgctaagcaagcatgtattaataaattcattgttgctaatattatttaatgcaactttgattataaatcctgtggtactgtagtatcgttgtcattagctacagattagaaaaaaagccaaagtcattacagaaatgtattaaaactataaatgattcagtaaatcatggtagattccaaaaaaaaaaatcatggtagaaacaattaaaacatgaactactctgttattatctgctcgtgctctgttgggggtgagaagtgttgctttcaatcaaggaacagggataattaatagagggccccagaagcagtaagaacttaatctttcctccctccctccctgtctccctccctccctccctccctctcttccttcctttcctccttcctttctctctttctttcttggggaaataaattaacttggccagtttttaaattaaattaaaaattttaaattgaattatttaccgaaaatctgtagtattcaaactccctaccctgatgttgagagctctaagccttctccctggccacctcatccttgtcactcactgttgaagcaagctgggttgtttctgttcccgtctcacttttccacctccttgcctgtattcgtgctgcttttccgcctacgattcccgtctcaagtgttccctcttccagagccctccctggctttccctgcagtgcccacagcctggatctgcctctgtcccacagcaccagccaccatcccccacgggaggtgactgcgtgccccggcctcactgcctccaccatcggtgagctccccgaggcccaggaaccatgtcggactgagtcctctgtccctgttggcacagacatgggtcacagatcagaggagtttctcaaataaatgaagagggagcaagaaatcctagttcactctgctcccatatagcggtcacttaaggggaaggtggagaacaagcagaaaaaaatgaggaggacacagaatggagagaaagacaaaaataaggagagaacgtggaagtgtagagcaaggaggaggagagcagatgaagggagagtgtccaacagatttgtttgttttgttttgagatggagccttgctctgtcaagctggagtgcagggcgcgatctcggctcactgcaacctccgcctcccaggttcaagcgattctcctgcctcagccttctgagtagccgggtttacaggtgcatgccaccatgcctggctaatttttgtatttttaatagagacggggtttcgccatgttgtccaggctgttctcaaactcctgacctcaactgatctgcctgcctcagcctcccaaagtgctaggattacgggcgtgagccttcgcgcctggccccaacagatcttactgaatctttactgaggcccctctccaagctctggggagacagcagtgaaaacgatgacaaaatccttgcccacctggggctttcattctagttaggaaatcagtcaatctacaagtgaacaaaaagtagacaagatgatttcagataattttaggaactatgttagggcattaaatagggtggcatgtcagggagggaatgggggtgggaaatattttggggagggtgacctgattgatgggaaggagtgagccatgctgagaaccaaggaaattgtgttcccagcagagaaaacagcaagtgcaaaggcccagaggtgggaaggaaaatgcttttgatttcagggaactggaaggaggttggtagggcttcacttggtgagcaaagggaagagaaaagggaactcaggccagattgggagtcagcagctggactgagtggcttccattgtgataaggagtcttaagaaaatgaccccaaacctgtacatagtacaaagatgtgattctgtgaccctttaccctcatacttagagcattttccaacagtcctgcctaagggtcatctgactgcgggaatagaactttgctcaatcaattaagacctaaacattttgcaatcctctaaaacagataagatatgctgattttcagtgattttctttctatccccaaaggttgtggttttattgccctgtaggacattaaccagttttgtatctaatttggcactcttatcttattccttttttcagtcccggttccttaaattctcttttgaatccactttgccatcctgcagatctccttattaatgagttaaataaaactttgacatgtgttcactatcgattttcatgagaattatgtttttaaccttttgagagttatattgtgataggagtttgggttttaagtgcatggaaagcaggaagagtgagaagaattcattgatgtttgacaaaggaccctcagacagctagatggtggaggggttgaacttgcccatggggaggtaagacacccagtagaagccaaagccactgtccaggggagagatgaccacagggtttgactgagggaggtggggatggaaaggcgctgagtgagccagaactgaatcctgatactcgtcgtgggcccctggcctctttccattcctatgctgggtcgccgtgaactgtttccttggccaacttttctctctaatacggaagctccttggcaggggctgcatccaatttttatgtttcctcaacgtccagccctggactgaacacagagtagtccttggcaagtgtttgctgaatgaatcttctctttagatttatcctcatcatcatttttttaagactgtggtaaaaatatacataacctaaaatttgccattttaaccatttttatgtgtacagttcagtggcattaagtacatctacattgctgagctaccatcaccatcatccacctccaacacacttccatcatccccactgaaactctgagcctgtcaaacaatgaagaccccttccctgctccccccagccccgggcaaccaccatttctactttctttctctatgaatttaactactgtagataacctcatatgagtgggatcatataatagctgtctttttgtatggcttattctatttagcataatgtcctcaaggttcatccacgttgtagcgtgtgtccgaatttccttccttttccaggctggaaatattccactgcatggatacactactgttccattatccattcacctgttgatgggcattcatgttgtttccatctgttggctatcatgaatgatactgctatgaacatgggtgtacaactatctcttcaagtccctgccttcggttgttttgggtatacgtctagaggtggaattgctagatcatatggcaattctgtgtttaacttctccaggaaccactatactgtttccacagcagctgcaccatcttacattcccactaatagggcacagcagttccagtttctccacacccttgccaatacttgttgttttctgtgtgtttttttaatgatagccattttaatgagtgtgggatcatccttaaaatataaatggccatgaaaaagtgagatcccagggcgaggcattatgggacttttcctaagtgtgctctaaagggagatagctggggtgctggagagaggtcctagatttggagggcacttagcgggagcagagacaggatagtgggtgccaagaccacactcctggagcttacagcgtggactcagggctggcttaaggagactccccaccatgggagaactgaaacccagaaggtttccatgaggaaagatttgtttgttgggctcatgcccctggggaaaagctgtttctaatttggacctttctttctatgtgttgcttcccagtgcgacaacgcaaaagggttgaaagccttctacgatgcaataaaatacgggcctaaccacttgatggtgtttggaggcgtctgtccatccgtcacatccatcattgcagagtccctccaaggctggaatctggtgcaggtaaggtctgagctaccttcttttgtggggaggtgtctttggttggccctcagtcttttgcaggaattattccttgtacaatgtggtttctatgttgcctgggtcaggcctcctggactttctcctgggtgatagcacagcctttcactgctggcctgacttggcatggcccccacagtaggtctctaaagggcagccctgatgctatcaccatgtatttgaaggcttcagggctcaccactgactccctagcccagctttcagagccactgatgccagtccaacctgcctgcccagtgttatctcctgctccttccacttgctccacagcacagccttgccagacaccctgcctttccacacatgcgccctggacctttgggcctcagagccctgctctcaccgttcccttaaccagatgactcctcatcaattctctgccaagtctccctttcccactgagattctcttttgttatctacgactgcctttgtcctcggttaagtctttcctggtctccttgccaattattcactctttgccctggcagattttatacatcattgaatgctccaccaacatatatacagtctattgtaggtgagactttccagtgttagctgttatttgggatgggaaagaagagtgtagaactatatgaccaccaggggtgagtggtggcccatacacatgtttacttttttgctccatccatccatccatccatccatccattcacctatccatccatccatatgttcacccatccattcgcctaaccatccatccatccatccatccatccatgcatccacccatccacccgttcagctatccatccatccacacattcacctatccatccatccatctgtccatccatccatccacctatccatccatctttccatccgtctgtccatccatccatccatccacccatacatccatccatccatacatccacccacccattcacctatccatccatccatccatccatccatccatccatccatccatccatccaacaaatattttaggcaacttactctgtgcctggattttggtaggcacactggggatacaatgctgaacaggataggtatggttcacattattctggagcttacattctaggaggaagacaggcaagaagcaagtaagtaattaaataataatattattaaggttgtatatggagggtctgccatgtgctagacactgttcttagtatttttctgcgtgaactcttttaatttttaaatccactctatgctttaggtaccttatccccattttatagataatggaactgaggcacagaaaagctatctaacttgcacaaggactcacagctagtaagtagtagggccaggattttaactcaagcagtctggcccttaagataagactgtagtaaggaaacttggcgatgacagaaggaaacagggtgatgagatatatagtgactgccttggggtagtcagaaaaggtctcttggaggaggtgacattcaagctgagacccaaagggtgagaaggagaccactgggtgaagcgcattccatgtcagtgaatggaatagtaaacggaggaaggcagcttgtgataggaaaggacctggtgtattcgtggaacagaaaacagggaaatggggctggagcatgatgggtggggagccagggtgaagagagtgagtgacagggtgagcaggagcctgaccacatagaggatctgtttcattccacttgcactggctgaggacttcctctgtgtctggtgctgcatgcatggggtgctggggtggagcccaagcttgcagccacgaggggtggtgggcacaagctatggcaggtgtgatgaaagagaggtggggcccgggcgagggcccctcacttagccccgggtcaaggaagccccagggcaggtgctatggtaggtgcatgaagctggctgctgaaggaggagagggcgttggacagctggagacatgggggagagcgccgctgcagaggaaactgggcgtgcaaaagcgggaggtgggaaagtatgtgggcttggggagtgctgagtcattccttgtggccggagcaggccacactgattgtgggtggatgcaacaggaagaggagaccagaaaagcagccatgtgctctggtgcaaacctaaccacaaacctaaccacacacctgaaagccagcatggctcagtgtgccgtgggagcctggcctcatgccctcagggtgcccaggacagctgtggagaccttggaccagtcacttagattctctgggcttgagcttgctttcctgaacattgaggagcacattctctattagttagagccatgtgctgcctccctgagcctcagtttcatcatctgcataatcaaggtagtaataggactgctttcattggtttgttgtgtggatggaaagactgaaaaaggattagagctgtgtctggcacacagttagtgctaactaagtgttctttgtggttagtcctgccctgtctcctcccactccccaagttgagtcccctgattacttgtcattcctggtctttcttgcattcccaccttttcttacactgttcctaccacccaaaacatcccattcttcctatacccagtgtatcaagtgctgcccattctttaagacccagcttaaatgctgcctccttcaggaagcctttcctgcctgctcctagggggctgctaaagtagggccctagaaagcctatcacttccccttgtttaattctagcagagcttgtgcacagcccagtgtcccactccactctgcctgtctctctcttagggttttgcagatttgggggggggtggtggtgtttataaatgtttgtctctccagctgggctgtgagcttcttaaggacagaacctggacttttctttttccctgtgcctatcatttcacagtcttcattagaaatctgctcaatgatcagagggatggagggaggtgggaagggatggaaggatctgaagatggacgctttgtccaggcatgagaggctgaggtcccagggaaatcccctgcccagagaggaatccagctgattccactgattctcagtgtcacttggaaccacctgtccctcagaattccctgaggagctgcaggaacaagcacaacgttggaaactcccagcttgcagaccacagctacctggcctctccatgagcaggacagccctccaacctagaggagatgataagacatagaactgggttacaagatggggactgtgttagttatttaccactgggtaacaaatccccccaaatttagtgtcttaaaacagcaatattatgtattatttcattatttctctggttcaggaattcagacacactgaatggcttgtgtttgctccatggtgtttggggcccagctggaggatttgaaggctgggggctggcatcatctgaaggcttgattagggccgaaggatctgcttccagtgtggctcctctccatgtggaggtctccatagggctgcctgagtgtcctcatgacaaggcagctggcatcccccaaagtgagtcacgaaaagaccaaggcagaggtgacaaagtcttttgggacttagctttggaaattgcatactataagttctgctgaaatctgtggatcacacaaattagctcttatttagagaggaatagtaccaaggtgtagtgggaggtaagctcactgggtgctagcttggagactggatactatagtgactaatgtctggaggaaggcaggaactccagttgcccagcaaggggcacttgatgctgaggccctgccctgttttgcagaactcctgctcatccttcaaaaccccggataccacttcctctgtgatgccttccctgatctccttcttttccccctttccttcagtgccgcccattccccgctcaaaaagtaaattaattatttcttcctccgctacaccctgcattcccaatagggggtgatatcttctccaagggagtaaacattggttcttgtggcgaggcaaaaaaaatcttacttttttaatgtataaagcatagatatagatgtagtacacaaacagatctatgcatgcctgtggtattacaatttcaccagggggcaagagtaggaaaaaacagccagaaagacttcttaggagactaacagtgaaacgaaggttgagaaacactgttctacatccttctatattgtgtacagtattctcttattaaataaatttcatgtcaatgaattgtacacttaaaattggtaaagatggtaaattttatatgtatattttacctcaattaacaaaaataaaatttaaaaaatgggctgggcatggttgctcatgcctgtaattccagtgctttgggaggccaaggcaggaggatggctttaagccaggggtttgaggccagcctggggaacatagtgagacctcatctctacaaaaaattataaaatttagccgggtgtggtggcacactcctgtggtcccaggaacttgagaggctgaagtgggtggattgctcaagcctaggaattcaaggctgtagtgagctatgatcatgccactgcactcctgcctgggcgaaaaagcgataccctgcctctattaaaaaaaataataagtgttgtgaaaaataatttgttctatatgccagtcttccatatcagattgtgagcttcttgggggcagcccttccccaccccttccttcatctcctggttcccagtgtctggcgcagggtctgggctcacagtaggtcctcactgagtactgaaatgtgctaagtgcagaggataggtggacggaggggcctgagatgctgcatggcggagcctctcacagtgtggccctgactgtagggcagggagggcggtggaccatgcagaatctcagcctccacctccacagaatcgctctgcattttcccaggctccttgtgggggaagatgctcacacccagacaatactgccctagcattcactactagacactggggctggatcaacggctgcaactggacgtggatggggcatgctgggggggcttggaactggagggtactcaacagtttggacttctctgaggacctgggaggcagaatggtagatgagcccaagagagtggatttctcccaggcttgtgcagccaggcaaggaagatataagaacaaagatcaggatcttgatctgggagtagcctgggagcctggattcctgcctccttctcactctcaggaaacctagacccatttattataagccagactctgtggacctcccaagccaccccaaccccaacacagggaggctaagcttgtttccagagatggtgaaggggtggatgggtgggtctacaggtgcccaagggatttgataaatctcttaacttactcaagactgggcttcaaaacagagcttcacaaatggaaaactgcatggaatttgtgtaattgaaaaggagctctggcggccctttttggaggagcaatgcttgctggacagagacagccaggaatgcgtaatcagttgtttctgtttccttgtgtcacaaaaatagggattcacacaccagaggggtgaaaattcaccctggtgctgaaacgggttaaatttaacttttgccttttgctgggcctcttgattcatagctgctgcatagagaggctaatattgttttagtcgtgatgtgagtcacttagccactgggaacctgtttctccctctatatgcaaggaccttcatagagtccagggtctgacatgcaggtgagattggttctgtccctctccaaactgtcagagcctgctcagggtgcagggctctgatctgggcctcatgctgggaggaacccactagggcatgacccaggaaagcatcagggaagggtcaaggtctagacattggagagctgagggtgttcagcctggagagcacatggggcactggggaggagggaggagtccaggcctccagcattgcatggctgtctttgatagattttgctggtctctggtgcaagtggggagaagcaggagccacggccaaagttatcagggagcagcgtttccacctcctgcaagcaagccctgcctctggaagcttccagcatggagcacgctgcctggctgtgaagtcatgagttccctgtgggccaaggttccctgagaagtccagtttcagccaggcctgctgttggggaaatttaatacacagagtaggcatagaccaggtcagtggctctccaactatatgggaagagtcacttacgggggttcttggtaacagtgcaaattctagggctccactctgagcaggtctaggttaggggatttatcagatccctctaggactgtattccccgctgatcaaaaccacagccatttcagtaccagtggctcaggtgactgtgatgctgttggcccctggagacttgccaggccaggagctctctaaggcctgttcatcccccagacacctgggctctttaacaaatgctgctggtccaaaaaactccaactgatgctgcccgtgtgggaaagaggacatggaggcggtcacagggggatgctgccagggcaagtatcccagtgccgctaggatgaagctcacagtccatggtggggcacagtccatggagtgcaccatcaccttgccgttttcccagcccacctcctgccccttcatgctgccagcctcagtacaggctgctggcaggactatgctcattcttcctggtgcagcttgggtgtcccttctttgcaaagccccccatggcctcccctgtgcttcctgacctgacctgcacatccctcccagggtgtttgctatgtctgcccacccccggcctgcagctgcctgaggttagaattgtgtctcattcaccctgcccctcggcctggtacaggcctggcagtgatgccagagcagtgctcagggcgtatttgctgacggagagccaggtgcctgccttctaggccttgggttggtcccctaacaaccaagggcacgtcatcagagtgtgccagacctaaagtcacccaaggactctccagctgcagcctcttgttaaacggacacagagggagccctaacacagccttgggctcagcctcagcccgcatctcccatctcaggaacccccgccccctggttttctaactgataagtttcctttgcagtttttttcagtcccacccagaatcctgtcctcagagacctaagggtggcttgtgtttgcagtttttggggcagtcctgcagatctcccaccagcctggtttgtcctgaaagcatggggcctgggaaaaaccaggagaatttggagctgggtggggaagatggagacagagcatgggaaaggtccaagagatgctagcaagagggagttagacatcctcagagaccaggaccacactccttcctgcttgggagtgagattatcgcagcttcagcttgcagacagaaatcatcttgctgatgaaaataaagtcagattcctaaagggataaagggctgctcgtaggaaaacgcaaacactatttcctcaagaactgcatcccacagagcttgtcctttaaaaggcagccgtggcagattattaaattgtagatgcatttctcccagcgctgtccccagccgcccctcgacagcccaccctgccttgtggcccaccttggcactccccacgaggaccttcctgggaaggaacatttcggcttgtgtcatggggctgtctccttggagaagttcatgtgagggagtggaggcaaggaggactttcagatgggaggatgttgactctatgtgtgtagaggtattggcaatggagtcccaatacgtttaggacttgatttctgaaaactcgaaagcatgcctggttttgacatttaaaaaacaaatcagtgagaacccccaaatcaggccttttgctatttactgaattctggcatcattctaaacggtcagtcaatgccattttgtttcataggaacagaaattttgtgatctgacatgattttctcaaatgattattttattaaactgtaggctgtctgagaaatcaaaagattgcttgttgcttagctgtggcttgtggaatttgaggtagattcatggaatggcagaggtcgtagaggcttagcaggcattaggtccagtctccctgttgtacaggctgaaaaacagagaccagatggggtaggggccttgccaaagtctcacagtaacagcgacactgggctccgtggctcaccctccagcactttgcagcatgtgccatggtctgattttctctcccttagcctcactttcctgttatgtaaaatgggaatagcaaacctgccttctatgttttatgcagttgttttttctccaagggaaagcgcttttataaactgtaatccagtagctgctgttatgatgcccaggactcctttactagaagcagatctctgattacggccattggagtttaaagctttgcatggacaacagggttttttactttgacactgcagactctgaaaataaggagtcagggatggaatgggggctcttcagcaagatgctcaaagtacacacaacgtctgcctctcagcccccaacagtcaaaacccacccaggccagaatcccgccacaacctggcccatgtgactgccacacccttccacagagcacgcaagtgagcctgcagccttgattggaaaccatttggaagtagcagtacgatgaggcacagctggaaactgttgctgctgctctctaagaaagagaatagaggccagtaatccagcacgggttggagccatttctttgcactggtctccaggggggccatttagcacattaataatctatgagatgcttccaccttctggattcattaaaaacaagaagaaagggaagaggagaaatgatgctaagggcatgcactatgggccaagcagagagggcagaagagaccccaaggacctggggactttggagagtccttcctggctgtcatcagatgcccagtgcagtcaagcccagtgttgaaagtgggcagcatgtcacacatgaggtgaggaaaagcttggtagctttttgtttggatacaattggtagaaggaagaaggaacccacagaagggttttcaggacagagaagtctggtagttggcttgaagcgggacccatggtggccatggcaacagcattcctaggacacagggctgtggggcagctgaaggccactgcaaaggccagagggatggagaggggaacatgtggcaggctctgtggtggacaaagtgctggctggtgactgcccctcccacctcatttgccccaaatctcccagctccagcacccagagtcccttgaagctgctcagctgctctgtgctctttgaaggccccagccttcccctgagtggtcccccaagcctgcaggcccgtcctctccttttcaccttgaaaaccacgtccagcctgtgagagctggcaagtgagttgctggctcttctgagcctctgggcatgttacgccatgtgtccagcatcccttgttacaggattgtctctacaccacagtgtcatcattgtctccatttctgcccccccatttgactgtggtaccctaaagacagtggacatgtctgattagtctctccatgcctggtgccacttacagggacccaataatgtgtgtgagggatggagggggaggttcattccacagctttgagttggcctggggtatcactgcccttcatgatccaaacccccactcctttggtggaaggggtggagatgtggtccccgcatccagcctggcttgcgtggatcctggcagcaccctccgatcttcaggggaagagaggttctgttcttactcattcatccatccatccaatcattcattcattcactgactcatgctatatttattcattcattctctcactcaacaagtgcagcgcctgctgtatactctcccaggctctcctgaagcagtgcaaatccaccacccaacaccaccaccccaaaagagggagacatggcaaagaggcagtttgatgcaggagactgaacagaggactggaattccgaagctccgggtcattttccctctgatgcctctcactgacagagggaacttaggcgaattagcagccccctcagagcctcactgaactcacagtatcaaggaggtaatcccgtccacccttctggggctattgagagcattagatgggacagggatgctggagcatgtgggagcactttgcagaccatcaggcccactaagatctcaggtggtgatgttaccgcaactgtgatgccaaccgggccctgaaaatgtataggtctccatttgtcttcagatctaaagttgtgtggatgaaattaactctcaccgaccatgaagatgattcagaacagtaaaattaaaacagagaacttacaggagaggcgaaagaagccccaggcagctgttagagggcacacacactctttctggttttcagagaagcagaggtaggttaaagaagggctggatgctatcgagggcagggtggttcccaatctattcctgcaaggacataccccatgtctttcctgttggcctggtgaaagattcaatttaaggttctgacccctatttttaattcaagatcatggtctctaaagtaatatcagttcccaatgtgtaagtccagtggcctcattgtttatgcgtctttcaccgccagccacttcaacccttttctgggaatatgtgggctgtaaataattcattctaaataaataaatcactcgcgctacttacggtacagctggtgctgctagtgatcggcacaattgtagattacacagagttgagtctggaattacagattgcatctagaaagaactggagagggaatttgaaaatgagctccctctggggacaaacatgtaaaatgggattaacaccagcctaataaggttgggatgagagatagaaataataaatgtgtcacacagtgctgggcacccagcaggcatgtaatcttcttcttcttctttcttcttctttcttatttctttttctttgtcgcctttttttttttttttttttttttgacagtgtcttgcagccttgacctcccatgctcaagtgatcctcccacctcagcctccctgagcagctgggactacagacacatactaccacgcccagctaatttaaattttttttttctttttgagacggagtctcagtctgtcacccaggctggagtgcagtggcacaatctcggctcactacaagctccacctcctgggttcaaatgattctcctgcctcggcctcccgagtagctgcaactacaggtgcccgccaccgtgcctggctaattttttgtaattttagtagagacggagtttcacagtgttagccaggatggtcttgatcttctgacctcatgatccgcccgcctcggccttccaaagtgctgggattacaggtgtgggccactgcacccagccatcaatattattcttaaaacatcattcctgtaattcatgagtgaaggttactattttgttgaggaaaattgactaaaaatgggctttttttatggcagtggttctcaaacttcatgagtatcaagatcccctggaaacttggtaaaatacaaaaacccactaggcatagggtgaccaatcatacctgttttgggattgagagtgccccaggaagtaggactgtgagtattcaaaccaggaaagtcccaggctggccgggacaagttggtcaccttcgccagctctcgtcctgcttctaggcgcctcatcctctgtgctgtgtgttagcaccctgggtgattctgaggcacagccatgggtgggaaccactgccttagagtgtgagactgggaagatgcctgctgagccgctgggcaggtgctctgcggacagacacacgggtgcatgtggtggcatggcactgactgccccgtccagtgttgtgtttggtaaggtgtgtggtgctcacctgtgcagatgggcaaatggagggccagagagccaacataccaataataccgggtacgcgtctcaggcttgggcagataggctggggttcacatccaggctctggtgcttgttagctggtgcctggggcaggttgcttagcctcttccagcctcggttcctggtctggggcttggcagtggcattatactgaccctgggtgctggtgcattgccttccttcttcctcctgtggccatccactcaaggacatagtcacccaggtgacatcttggcctatctgtgcaggtagagacagagccctgggatctggggtcacctccatgggatgagctatgtggtcttgggatatctcttgctccttgtgggcccctgtgtaagaggagtgggttgggccagttgatgggccttgataacctcgataatgttgtgtcattatgacctgtggctcagagccatcagtgcctgccttaagcctggcatcgtccctcttgggcctctgcatgtgatttccctgggctcataaggcctggtttcccctccatgtctagaagctgtgagaaggaaccaggcaagtgctcaggggctgaggccgctcacacatgtaactccacacagagtagaggagcagccttgcagctgtgccaggccttcagctttaatgtctcttgatctccgccagagctttccaggtgtaggacaccccttctgcaggaagtgaggcccagagagctgatgtggcctgtgtaaagtcatacctcaggtagggcagagagctgtggtgccagcctttctggtggccttccccgtctggtcctttcccctcatgctaaggcatagaacctgctccccacagctcaagagctgttgcccatgttgttctcactgcacgatgccctttctgctccccctcctccccggctcagtcctctgtatttcctgatatttagttcaagtcttacctcctcctccaggaaggcttcctagtcttccccaaccctggtcccagctggaggaggtacccagcgttttcctcacttcctttgttttgcccattcctcaatatattacaatccctgatgaggtttcagtgtcacctgccaaacaactccttcaggcccagacagtccttgcccatctgagtcttagcagtaccccaagggccttgcctcaagtaggtgctcaggaattgtgactggacacacctgtagggcctgttaaaaaactaatttgtcacatgtctatagcctttgccatgggccaggcatggttctaaacactgtgcataaattaactcattcacttcacatgccaaccctaagaggctgttattctcctcatttcacagatgagaaaactgaggcacaaagaggttgagtgccttgccaaaggattgcccttcttaaatggctccggagtccctgcttgcaaccgcaagtctacactgcctgtcacacagtatcatgtaaccctcactgcactacttggggttgaagagcaggcgttgtcccagttaggcctgttctcagattggggaaaataagattcaaagaaagtagagtctggccctgcttcctgctgcaagcaggccacaaggtgaggtctcccgaaggcctctaagagtggcctctctgggggccatggaggctccagactccgggtctctgcctccctctccagctgtgttggcgaggaacttcctgcctgtccatggaggacccaggcagtacgtgtcccctgacacaggctgtgttctccctgtaaatcattcatgacccccacacacccacacatgcacacacacatgcatacatagcacttttaaacttattactcattcagtaacttgtgtataaaaaataaatgattccttcaaactcagaaaatagatcgactggttgttggtgaaaatcaataactatgctaagtatttcaagaatagtacttatagtcctactctggatgattttataaagaatgagctgattttttttctaaatagagcatagtctacattagttgtgaattatacagaaggcttttgctttgaatctgtttcctaagatgattacattatttattatttccatgatgaagagattgagccttatacagtgggaagggttcaacttgagaaaaacaatcctaggttagataacgatctagacattcataaatgctgatttaagcataattttctctattttccccatgttcccataaaagctattacatagtactgtcttagcctcttctaacatgacatgttggctttgcaagtatgagggaatgacttccttcacatccggggtgtcttctgagactctgggcccattcctagaggattgggcacagggacctttggcacagcaaagctgttttggcccaatcctctggcccacgctaacaagaaggcttcagcaccacttgtttgggaagcgtttccagggcgtgcctccggtggatgcgtccgtaaccggtaaccctcgctgcccacagcatgctcacttcctccttcagtgcagtcttgcctgatagttactgttctctctgtgaagtcgaggcagcgtctcctttgtttgccgggggaaccttagagcccagctcatggcccagaatccaggagaacctctgtgaatctttggtttccattttggttttcggtgctctcaatctttctctttaatgtaagtagcatcatgaattcatagattttcaaaaatatattgaatgtactgtatttcagtaagttggagacattatttttcatgcagacagtgtttttgctgctctttttttttttttttttttttttttttggacagggtctcgctctgtcacccaggctggagtacagtggcatgatctcagctcactgcaacctccatttcccgggctcaagcgatcctcccccctcagccccccaagtagctgggattacaggcgcacaccaccatacccggctaatttttgtattttttgtagagatggagtttcgtcatgttgcccaggctggtctgaaactcctgacctcaagtgatcctctcacctaggcctcccaaagtgctgggattgcaggtgtgagccacaatgcccagcatttgctgctctatttatgtttctacctttcccccaaaattctcctccaattttgttattttgaaagttactttaacctgcaacaagaagttaaagtacaatgaacatcatttaccctttatctggattgacagttgtttacattttgccatatttgtttttgcttttcctctctttccctgcaccacccccacacacacgctcacacagtcactgatttttttgttgaagcatgtgatattagtttgcacacacaatgacacttcacccctaatacattagcatgcatctcctaagacaattatatcctcttacataaccctaatataaccacatctgaaaaatttaacagtgatacaataatattaccaaatatatggtccatattgagatttttccagttgtcccaaaattgtccttattggaatttatttggacacaagcaaggaacatgcattgtctttgttgccatatatttttggctttcaggacagtgatcttttttttcagaaaacccaagccagttgttttataaaatgtcccacaattgtcatttgtttcctcatgattagattcatgagttttggcaagaatactacattttttatgctgtgttcttcccagtgcatcgagtcagggggcccaggatgtcaatttgaactattattgatgatactaaatttgatcacttggttaaggtggtatcttccaaatttattgtaaatatacatttttccccctctgtaattatgaagtaatctatggggtgaaacgctgagaccgtatgactatcccatttcctcacaagcttttactcaatggttttagcatcaatttatgatgcttgcctgcctcagtatcatattggtgttgcaaaatggtaattttcttttctttctttttttgagagacagtctcattccatcacccaggctagaatgcagtggcacgatcatagctcactgtaacctcaaactcctgcgctcaagggatcctcctgccttagcttccccagtagctgggattataggcacatgccaccatgccaggctaattttaaaatttttttgtagagacggagtctcgccatgttgctcaggctggattcaaactcctaggctcaatcgagcctcctgcctcggccttcccgaagtgctggggttataggtgtgagccactgcacccaacctcattttctaattatattccttctacatttaagcctgcattcttctctccagaacagctttcccttttttgactctttcttctcctcctcctgcttctttctgtttctcttcccctactaatttgagcacttaatattttacctgccttagtcttggaatcagccattcctccattcctccattccagccattcctccaaggagccctgattcttcctggtaggaaattgtgttaagaaaccaacatttgggtactaggtatacttgttgctactggggttcattccttcacggtttttttttttcagtggaatgagcttgaaaatataatttttaatatctttaaagtgtttaaactgtaatctatgaggagataatcagacaaatatgggtcattctataatttacctggcctgaattcttaaaaagtccatattgtggaaaacaataagaaaaaccatataaagccaacctaggcctgttgtaatcaaaaaattaaaaaaatgccaaccaaaagcaaggcgtgaatattgactggatcctgaatttttaaaacaaaagggcatttttgggaaattgaagaaatttgaatatggactacgcattagatgatactgaattattgttcgttttcataactgtgataatgacattataatgatataggataatttcattctttccaagatgcactctgaactatttagttatgaggtatcatgatatttgtaagctaatttcaaatgcttcaaaaacatcattaagtgtatgtgtgtgcatatatgtatatgtgtgtctatgtatatatatatatatacactactatatagtatatatataatactaaatataatatatactatatatttaaaaagagagagaggaaagcagatgtggaaaatggtgaatctaagtgaaagtattcctcatgctattgtttcaacttctttgttttaaatatttttatttaaatatttttggatttataggaatgctatacaatgttcctcgtactattctttcaacttctttaaatatttttcaaaataaaaagttgtgaatgcgcctgtgtgtgtgtatgtgtgtatgtgtattttgtgtgtatgtgtgtgtgtgtatatgtgtgtgtgtgtgcatgtatatatgtgtgtgtgtgtatgtgtgtgtgtgtgtatgtgtatatgtgtgtgtgtgtgtatgtgtgtatgcgcacacgcacgtgtgctgggtggtgggatagtggagaggaagaatatgtcctccttggctggacagtgaaaatgtgtccaaaagtctctttacacatttttctccatgtgactctattagaaacttaatatattcctagattcctttgtcctggtttgttttcactgtttaggggttgattttttttctccttgttgattaattttattttaaaaactatacacaacttttatatgattccatagtcaaatgtatagcagagaattcttggctccaatctaagctctctccattctgttccatgccatccttatataatgtgaccattgttattagtttttaatttatccttccagtttttcttattgaaaatatgagcaagtgtgtgtgtgtgagtgtgtgtgtgtgtgtgtgtttgttcctcatttcttctttttatgcaaagggagcatacagtctacactcttctgcaccttgcttttttttttacttaattttcccagatttcactgtattatcactgtagaaaggcattccttattttttttttcacagatgcacagccctgctttgtatggatgtactgtagtttgtacagccagtcctctactgatggacatttggattatttccaatctcttggaataaccttggccacattgtcacatttgtgccagtgtaaactgggtatgaattcctagaagtggaatttctgggtcaaaggataaatgcatctataatttttctagaaaataaatctttgttaagaaaactaatgaatgaacttgatttaaaagagctgaaagtaaaaggctaatatctaaatggagacataaaacaattagaataaataaatctctttgtgaaagaggctgatttaaaacctttctggtggcattatctctggttcagcaattttcattttcttgcccaaagacagaatactttctctttggtttgtaaattaaacatatggctcacgcctgtaatcccagcactttgggaggccaaggtggatggatcacttgaggccaggagtttgagaccagcctggccaacatggcgaaaccccatctctactaaaaatacaaaaattagccaggagtggtggtgcatgcctgtagtccaagttactggggaggctgaggtgggaggattgcttaagcccaggaggtggaggatgcagtgagcagagatcacaccactgcacttcagcctgggcaacagagtgagaccctgtctcaataaataaaataaaaataaattagttaattaaacatataattactaaatcatgaaattttagagctgaaataaaaactacctagaacagtcttcttcaggaaaccgaggcccagaaaggggaaggaaggaacagaaagactaagaaaaaaaaccaaattgagtccaattccatgcaatttaataaacagtaagtgaaagagcttctttgtaataaagcatgatgcttgttttcagtttctacgaagagtcaaacatagaactgtactattgagatccctggagataccctatcagcagcatgtggttcagatccctgagtgctttgctgtcacagtgacaactccttcaacagaactcggtgtcaatggactttgtttcacatcttttgtgttattctagggcatttcagtgtagtcatgatgagacactggatcagctggagggtttgagtggctgtgggcgtcctggctgatgatgtgagtggtcatgtttgctcaggatagtctgaagttacataattgtggcactggaaggattctgtttagattctgagcaggcaatgtggagaagcgaatgggtttagccctgccagccatgaacttggggggcaagactgggcaaatcccttctttctggtcctctgtgtataaaatgaagagttggacaagcccagaatggcacataaataaatggcacccatggtattattttatccttctatgctaattgtagacataactaatagatcactaaatgctcattcttcactcccttagcccacttctcagtagcccccatcagcccactggtgatacggcataggttcagccctttaccacagctggcctgaatggttacttagggttagcaggtagaatacaggatgcccagttaaatttgaatttcagatacacaaaaaggttttttgctttgttttttaatgcaagaatgtcccaaatgttgctaaatctggcaaagctatcgcttaggccatttccattatttgtttttttttctatgtagctgatttctcttaagatagctaccctctcttcttgacacttctgatagtgcctattccccagtgcccagataaaagtctaactcattctgtaattgtttaaattcacattatgacctaatttaattgaaggtgatagagatttgggtaggagacgtttatttctaaggaccatatattctggtaaaaaactctttgatgaacctgtaatcccatgtatccctgacgttatcattttcatatcactttcttgactctgccaatgcaagtacaacttgtattattaacttaattagtatgttcccttaaactgactcataattttatctaaatgccatgaatgaaaaatcagtatcatttactaagaaggtagtataaaagcaaattaaggaaaagcatgtctcttagggtataaaatagtcatctgggactcacttgaagtcactgagtatgctccctgggatacaaagcacaccactgactaattcaactccctgctgatttgggaatcccctctgtgactctggcagatgatccctgaggatcttcttgaatacctccagtgctggggaactcagtactttgcaagattttgattcactcttgaataccttactgtgaacggtttcttcttcatattgaccgtatcagcctccctgaaacagttacacatggaccctggttttccctctgagaccccacacagtaagtttgctccctctgcattcatttattcaacacatagttgagtgcttattctgtgacagtttggatgcaatgacagtacaggtgataaggtctgatggaggtgcagtaggggagacaccccctgcgtagactggaggtaggaaggtgttcagaaaggctttttcagaggggagtgagggagagcctgctttgggaaagagaaggctggagtgagggggtgagagaggacgctggagcaaaagaggtggagagggagcaggccaagtgggcctcataaccctcatctcctcatcttctattatagcactaggactcacttcctataaaacatgttcatattccaagttctcagtgtgtttacttatttatttttgaagtagggtcttgctgggttgcccaagctgaagtacagtggcactatcacggctcactgcagaattgacctcccaggcttaagcaattcttctgcctcagcctcccaagtagctgggaccacaggcatggccaccgtgcttggctaattttatttttttccatagagatggggttttgccaatttgcccagactggtctccacttcctaggctcaagcgatccgcccacctcagcctcccaaagtgctgggattcaggcgtcagccaccgcacccggtctcagtttatctttaacagagccctggagagttagtcagggcaggacttattctccccattttacagttaaggaaactgaggcctagcaggttggtggcgggtttgcagctgaccagaggagctgggtctgtgtgttctacaggcacacagcggcactcacttccgggtgctcttgcccatgcgcaaccccagccccgccccagccactgatcctggatgaccccctgccccatggaataaaacttctcgttctgggaaagcatctttgaatctttgatcttgactcagctaagtttcctctggactgaccatgaagcacatttcagaggtgtggagtctcgtgctccactttcttgcctgtggaaagcgttggctcacagggtaaactgaacctaggatgaccccttcttctcgagccccggtgtccctgggattggggctgtgaggtgcccagtgactgccacactgaaggccctcccatgtcctctgagtgtcagcgggcaggtggctctcaggcctccttggcaagcttggcctgtctggttgagtgattccttggtacgagtctgccgctcagagctttgcctgagctctatctactcaaggggatggggcgcaaaccctgttttcctcagccagagaaaccagcactttccttcctcctctgttctgttttgtgtgacaactgggtgagttcctgtctaaagaagacaagtgtgaaggcattttgtgaccctcctgtctccctttcccctccatgtctcccatggctacagagcaaactcacagacagccctcaatgagctcatagagcagtcagtgaagtgggcctggctgcccatcacttctcagtgcctcaccacaaagggaagaaacagtgctgggagaactgagggagagcagggaaggctccctggaggaggtgtctgtgagtaggcctggacaaatgagtaggaagtatgatcccagaagtaagaaatgctgcatcctctcccactcaaagactcgagctggggccccagcacccccgacccctgacagatgtgatttcaacttgtggactgatcagaggtgccatattgacatgaggagacatgatttctgcagtgaggtaattaaaaggcggttggcttcacagctgtgatcacacgagaacacttcttacccctaaagacatcagctgaaagccaagtgcaaaggagccgaggaaaccaaagaggcttctaatgtaatttgttaatttcctgcatttgtcacctgcacagctgtgaggggaaaatggaacattttaccagaagtttaagagaaaattaaagacatacattctaattgtacacaattagacaagcaatacaatcataattatttgtttaattaacaaaccattttaaaataatagattaggatttggacatcctgctttagaatgatgtccctgcctggtggcagccacttgagtttgagcaaatcctttccttcgctgaggcttctcatctgtaaaatgggtatgctcctcccctgccttccctagggaggtggaatattgcaggaaagggctttgtaaattaaaaggccctgtgtgattgtaagaaataccatctaattctcctaacttagttcttgtaacttttaagtctagaaattgtggtctactgtaagccatcattaattgggcacttgtgctattccaaccctcacgacagccctgaaatgggaatgtgcctgtctgaccccagtccatttacagaggaggagactgaagttcccaaagttggaggagtcttctgaggttgcacagggaggggcggaggtggcattcagacacagcctgtccaaactgaaacccagcattcttacccttatgagccacactgctttctcagcatcgacttggttttgccatttctctaatttactcccatttttgacttaaaataaaaggatttgcggaactaatagttgttttccaatcttctttacgtcaaataataatagaaatgttaaagaagggagtgaagaaggtaataaagaatcatagaatgccatatagcaaaaacaattatatcttaaagagcaaagcattaaatgacttcacaatttatcataataaataaatgctgtctcttaaactgggtgataggcagctggatattggttttgctattattctttaaaagtatctaacgtgcttatgtatgtagtttctatttgataatagaagtttaaaaagaagaacgtccaggatgaagaatgtttttaaatatacgtacgatttttgtttcatatgttttcattggaccatcttagagaatcaaaagcatactaacccactgatgaagtattattgttttttcttttaaataaattttattttttcttttctttcttttctttttctttctttctttgacagggcctcactctcgctcaggctggagtgtagtggcatgatcctggctcactgcacccttaaatcctaggctcaagcggtcctcttacctcagcctcccaagtagctgggactacaggcacccgccaccatgcccggctaattctctcttcttttaaattgccctggttgctttctagtcttagcctcagatgcctccctgagaagcagcccagaaaattggagcgaggacgtcattctaagaaccaaagtcccaaaccctagccttgccatttgttaacatgcggctttgagtaagtcacctgattttgagtaagtcacctctctgaacatcagtttccttatctaaaaaatgagggtaataataaagtctactctactgatatcatgggtttttgtgaagatcaaaattagactagagaagtaaatatgttttgggaattgttaaatcacagagaagaatcatagcactctgcagaatgagcagggacttgtgacattagtctccctgctctgccagttgcttgcggagtgatcatgtgcaagtcacttatcctctccgaggctcagtctcctcatctggaaaatgcagatcagaatcacatctacttcatagggttgttttgcacattaagtgaagaagtgaatgctaagcccttcatgcagtgcttgctccacggtacgtgctcattatttcataatttcaagaagtcaaaatatctaagctcaggtcccagctttgcctcttttttttcctctttttgagaaggggtctcctctgtcacccaggctggagtgcagtggcacaatcacagcttactgcagcctcaatgtctcagactcagttgattctcctgcctcagcctcccgagtagctgagaccacaaactcgaaccacaatgcctaattttttgcatttttttgtagagatggggtttcgccatgttgcccaggctggtcttgaactcctggcctcaggcaatcctcctgcctcggcctcccaaagtgctgggattacaggtgttagccaccgcacctggctgctttgcctcttactagctatggggccccaggcaagtcactatacctccctgagactcagtttctcccacaggaaacaaaggcactaatgtctcccttacaaattgtcacaagttcccaataagaatatgctgagtgcagtggctcacacttataatcccagcacttttggaagccaaggcaggaggatcacttgaggccaagagtttcagaccagcctgggcaaaatagcgagacccctgtctctactaaatataaaaaataaaaaaaatagccaggcatggtggcacgtgggtataatcccagctactcaggaggtagaggcaggaggatgcttgagcccaagagttccgggctgcagtgagctatgatcatgctactgtaccccagtctgggtgacagagtgagaccctgtctctaagaaaaagaaaaagaaaaaaaggactggccacagcagggggtggtaaaagctgaactgctgtgcatttgatgaaaaactaaacctcattaacagaaaggagaaatgattgttccccaagaggttctagcccaagctctctctgactaaagagatttaaaatcttacagccagtctatgcacgataccccagaaggccttttgttggagtggggcttccagaactcactcaaatgccaggcattcattttcccttgttaacttgggaaatgctttgcagccaccccgcatcacattaatctcaccggcatctatgttgaggcactttttgtccaaacagtttttcaccagggcttgagcacagcggcgacctggcgcagacctgaagtggacccgagttcccaacacacacagcctggggcctttgtatacatcctggcactggccacaaacagtgttttgtcagaagcttcctgagaaagttgcgttccattcatctcagctgaaaggaaccctagatgacaaatacctccctcatttaattacagaaacagtcagcaaagtcgtggaaaaagattaaaccaacagagaaaagagcaagcctcaatcattttctcatccctttgcatttggcctgagttccttacctaggacttagcaactgtggtcccccctgcccggttatacctgcctcctgaaaaaaatggtttatttttgcagagaagctaaactcggatgccccaaaacaggtgaagaatgaattgcatttaggcaagaattcgtcaatgccttggaatgtcataaagatcctgaagctgggagatgagtttacatttttcgtctgggttcgtatctgcaaatggaagtgaggcacaatggcagttatctgaataaatcagattaaataaaacacacacccacacaagaccaagaaactccttaatcattttcttcaatgttcgcgaagcatagatttttgtggttgcagagaacctttgaaatctttggtccaatccatcactttcagagatgagaaaaacagacatctaaaaggggggaaatgacttacccttgttctctcagtcacagggacagggttaagcctaaatgtcccggctccctaaagaggcctcgtagctgcatgagctcaccacttctctctgcattcaggtgctgcttgttaaagtgactcatggttcagtatgcaggccctgaacgctcatgaaacatatcacggcaggctagaggcctccagctggagagagatgctcatggctctcttcccaccccatgctgctggttaaatatgtctcctccaaaacttgctgtgtttgagaggccctggaagccatggcataaattgttccctccctggtctactggatgacctttctgggccacagttttttcaggtataaaatggatcataatttctaccttgggtaatctgtctgaaagtttttgttttgtttggtttggtttggttgagacaaagtcttgctctgtttcactcgccgaggctggagtgcggtggcatgatctcagctcactgcaacctcttcttcctgggtttaagcgattgttctgcctcagcctcctgggtagctgggattacaggtgcccaccaccacgcccggctaatttttgtatttttagtagagacagggtttcaccatgtcggccaggctggtcacaaattgccgacctcaagtgatctacgcacctcggcctcccaaagtgctgggattacaggcatgagccactgcacctagccctgtctgaaagtattaatcaccaagtcagacgtgtgttcataaaaactctcctttggatggcttagactgtggctggccgattgggtggttgggtcatttctccattcattcatctatccactgtcaagcaggctttactctcaggcatgttagagaatggattttttttttgagtgagtgtaggatgaggaaataaaaacaaaaatcctgtcccccaggaagattgcaaaggatcccccgtgtgaacagactctccacaaatccagtatctatgaactctctggcaatcataatcacagggaatgcaggggactttatgcatctgtaaagcttcagagtccacaaagttcttttacatcctgccatcacccctccaaagcaggcagggcagagcttacaatcttagttctacagatgcaagaaggactagtggcctaagtttgcacagctgggaaaagacagcgttgaggtccaaatccaaggtctttggagtccaggggtctgaatcacactcagctgctgcccgtctttgccaggatgtctctgggattcagactgaggggcttgtatcatttctgaggggctgtggtggtgaggatggaggcagtatgacttaacagtactggttccactcctccatttctaagttgcatgatcttggacaagttccttttttctttttatattgtggtaaaatgcacaagataaaattcgccattttaaccattttaaagtggatgagtcattgtcattgagtacattcacaacgttgttcaaccatcaccactatttagagctgaaacattttcatgctttcttgggcatgaaagcttttgtgctttcgccccaatttgctttgttgggcaagttttttaacctctaagcctcggttttcttatccatacgattactaacggcacctgccacagggttgttgtgaggatcaggtgggataactgggaagacttggcatagataaaaggtgatgggtggggggcagttatactaaatttgtatactgagaactaggttataggatttggacaggactatcttgacgctccaggatgaaggtcaaagctgcttcaccttgcccatatgctggcttcaaggcaaccactcatagtgcttaattctttgtgaacttggtccttgacaccaagattctggaggattttgccactcctctggccaggtggccatggatagttcaggggagccatcaggccctgtggtctggtcgtagattgggtagtacctggatgccatcattatcagaagcactcaggtcacttcctggggtgggagtgaaagaatgagatgctatttaaggatcttctgtgggccaggatgtgctcaagactccctgggcaactgctcaaaacaaagagaatgctggtgatccaggtttagcctggctacagactggggcaagcagggcggtgggcaaaaaccccattcagtgcccagagctggccagtatgggatgagctgggcagtcttatccaccagcccccaggggcatggcagcaccaccacattagagagcagtttgatggtaccaatcatgaaccttaaaaaccttcacaccaccttgtggtttaaatggcatctgaacaacgtgaaagagggtgccaggccctgccacatatttggttaagtcagactaaatttattcgtgatttttctaatacttttactaaactgacttgaactttatttttgcaatatttgagaacatatggtttactaaataaataaatggcataaaccaaaaatgaaaaaaaagggtatttggctactcaataaaacatttggtacccaataaaacatttttttagctttcctttgaaactatcaaaacatggaaaagaagccaggcacagtggctcacgcctgtaatcccagcactttgggaggccaaagcaggtggatcacctgaggtcaggagcgcaagaccagcctgtccaacatggtgaaacccccatctttactaaaaatcccaaaacaaaaagaaattagctgggcatggtggtgggtgcctgtaatcactgcttgggaggctgaggcaggagaatcgcttgaacaatcgggaggcggaggttgcagtgacctgagattgcaccactgcactccagcctgggcgatagagcaggactccatctcaaagaaaaccaaccaaccaaacaaataaacaaacaaaaaaacatacacatacatacactctcaaggaaccaagagaccccaatactcattgatattctagatgtttagaagcttcattaattacaaagtagatggctctagattgagaaaatcctaagctttgcttcctagcattccaaaccttgcctcataaaataacaattgtgttgaaaattaacaggtagaccttttcctttctcccctacaatctgagttagactcaggactcatatcaactagaaaattggatagctattgcctctacctaacagttgctgatctctgagacaaccaaattgcttttttctctttattctcatctctctttcactaaactcagacagagctatacattcctagggggaaaaaaaacctggatgagaagaggaggggagcacactagatgtgaattgcattctgggaagcagagacttcccacatgaaattttttaggcaggaaagaaaaaccctagcagcagtgcaggaagggaatttaatgtactgtgttgatctagagtattagaaaattgggcactgagggtaaaagatgatgtcacttatttaatgtagaccagcctaaggtgaaagcctactagacaccaaaaactgtgcttaaatacttattctccggccttctgagaagtatatgcaattaaaacgtaaatagaaaacagggccaagtgccgtccacatgtgtctcttgataagcccagcctgaaaacacttgctttgcttttgaggattaataaatttaaaacacctttgaaaaagtacttcaaaaataatgaaaaaaagcagagtactcagaagaagtggaggaagagtccatctctgaaaatgatctattgtaggataaagaagaaaactttagaaagatgtgtagcctccccaatcatatgcagcaaagcaggctccatgaaatagcctgcaattggaggatggggcgaaaagggagatgatcatgaaaaattcataggaaactaaaaatgtcaataacacaatacaaatatgttaaagtcaataaggcttaaaactgaggctgttgaaaagcaagtcaggcaactcacagaacaaagaacccgaatagctaacatgtctatgtatcaccactcagccacattccaggcaaagcactgcaaaatcaaacaataatgaagtaccactttatctctgaaagactaacaaaaattaggaagtcagataatatcaaatactggccaggatgtgaagaaatgagaatacttatgtcctacagctagggctgtgggtacagccattttaccagaaaatagtgaaagctaatatgcacataccttgtaataaaatacagtaaaataagatgctcttctagattgaggaggacaaggactaagagatgcaattatgaaaagaaaataggacagatatggatttagagaatgaggagacaacatacagataatcctgtggcccagaggagagacaagaatatataggaatataatataaatatatatatgataaacatactacatatgctatatttattatgtataatatatacaatattataaatgtatatgtaataaatatgttaaatatattataaaaatataaatataaaacaatatacacaatataaatatagcatagtcattttatatatatatattaggtttttttttactgagttggaaatacttgagtgtatggattgtatacaggtcgtgtatagggctctctttatcccaaataaaatcaagagtgcgatttttttgaattccaggaataaggggaaaaaaaatctttcaggcttccaggtagaggaaactgggtacctacaaatgaacgacaatcagtgacaatcaagccagccccaaatttctcctctgcatcactttgtagtttcaaaggggagaaatggtagcccaagaatttcatgcccagccaaattctgccgtgtgtcagtgcaacacagggccatcctcagtaagttgtcaaccctttatccttctcaaggtacctattaaaaagtactccagcgggctgagacctgaggcaagattaattcacatagccagaatagagaagaatagatacaaagttgaaaaccagcgggaacaaaaggaaacaaaaaaagggaagcattaaaaaagaagagatggccaatgagatgataaatgcaaggccaaatatttactacagcaataaacatacatattttaaaatctgtccatatgctcttttcaagatgtgtatttaaaaacaatcttaatagaatatgaataaaaggaggataaaaaagtgacaggcaaatgcaagcaaaaatacagtaagggttgcagtattaataacaagcgtgatacagtatcaaacaaaaagcaataaaatgacaaacaggtttattttatcttgataaatatttcaatcttcactcgctcaatgaatatctattaagtgcctgttatttgcactaggcaaaagtatatattgctgaaaaatgaagacataattgtgatgaacatttatgctcaaaacaagataaaatgaacacataaaaagcaaaaacagttgaaatacatgaagaaatggtcagagacaatagaaaaaagtttaacaaacttctcagcctttgatagatcaagtaaacaaaaatacaaagcgtatgataatataattagtttggttatatctattatgcataagtagtctaataaagaattctatagcttatgactatagatttcatcttttttccagccaccatggaacttgtacagaagttgattgtataataggccacaaagaaaatctcaataaattccaaaagcagacactgcacttgccaaattctcaaaataatgcaataaaactagaaattataagaaaactagaaattaaattttaaaatactctccgaaataaatccttggctaggaattaactcaaagcctcaatcacaatctgttcagaaacaaacttggttatgcgaaacaaggcaggagagctcagaaagcttggtctccaagttagggccctaatgctaacagccctggtgatgccagatgctgggtgactgtgctaggggaagaaggcctggggagcatgtaggaggcaggtagatagtcatccatgggagaaagcgcactagtgttagggtcctatagacccgggttcaagtcctgcttctacctcttattagctgtagtggaattttgatatcttatttcggggctgcagtctacttattccaaaccaggggtgtggagctgtatctgtggtcctcaaccctcactgagcatcataatcacctggaaaatttttaaataatactgatgcttgggctagatgcccagagattctgattcagttcgtttggagtgggaccaagtcatcagtattctttaaaatctcccccaaataactccagtgtgccaagaaccccagagctagatgatttctcagatgtctgttagttttgaagtccagcagtgctactgggcacctgcagtttttgcccatggaagaaagtttcaggaggctaaagccagagtaaagccagagaaacagtgacgcaaagcaatctaatcaaagcgtgcattatctcaaatggtgcagaaaatgtcagtgccagttaatattttgcacccaacatgatttagacccggggcacatattgtactccaagcctattgtaaacccaatgggccatttattcactgaacagtaaccacggtaattacccacagggaaaacatgaggttgttcaagcaacaattaattgtggacctggaactaatgggacaataatggtaaagtagcaaccagagtgtgattaagaaatcacatcagaaagccaatattttccaaattgtattagataaggatttttggggatgtgatggtatatataatgtccctgtcctgaaatagttcctcccaggtttttctaatagctccttctcccactggtgagcataggaggcttgcagtgtttttaatcttgtgagaagaatcacagacagtaggtttgaggggactatagagagctttatttcccgcactcactacgggacctaaatgtcaactgaaggcaggtgtgcagaccttgatttggttggaatgatcctctttgtgaatatgatggaagccactgattctttttttcagaaaaatgtgcatgtctgtctgcacatacatggccatgcaaatcctttcctacagttttcagggggttcacagacactttgaagcccttctgttctcactaggttgtggtccagtctttgcttgcacacctccagacacagggatctcactacttctgatggcaggttttccaaggccagacaactctgatgtgaatgttcctcaatgtgtccagttgaaatttccctctcattagtcctcgtctaccaagaatctttgaacactgacaaaagtcattctacctttgacctttaccggtcttggggtgtctctctgttggatcttagaagatggtttctacgggggctctgtagcttcaggtaatggctgaattactgttgtgtggtcagctccaatagataggagatccagcaattctagagagtggctgtctaccctctgaaacagacatggaaagggacaaatctctactgccccccacaaacttttgtaaggggaacgtggttctagggtgacagaagaagcggtaaagcaactttagctggaggctgagggtaccaggatgttatttccctggatgcttaaattggaacctaggatggatcaaatccagagctgctgctgggacaagcaagggtttggggagatggctggtggcagcaaagattgagcttgcttcatccatgccctctctggatcaaagatttgaatgaaacaaaagaagagaaggagggagggagggagggaaggagggaggacagacagactagaagaaaccatggagaaattattttataatctcagagtaagagaggcctttcttaaatatgacataaaacctgaagtcataaaggaaaaaaactgataaattcatcctcattaaaaaaaaccgtgattacctggaaacggcactataaacaacatcaagaaacaaagtacaaactgggagaaaaattagcaacttatatcataaagggctaattttcttaatataaaagatcatttctataaactgataaggaagactactagtcaaattagaaaacaagcaaaaaatgtgaacagtttccagaaaggaactaccaattacttttacacataggaagaagctgggtgcgatagcacacctgtagtcacagtgactcaggaggctgaggccagaggcttgagcccaggggttcaaaaccagactaggcaacatagtgaggccccttctctgacagatttttaaattagctaggcatagaggcatacacctatagtcccagctaccccggagactaaggcaggtggggatcgctggaacccaggagttccaggctgcagtgagctatgatagcagcattgtactccagtctgggcaacagaatggaccctgtctctaaataataaataaatatatatataaataaaattaatataacaaaatagaaatattcaacttcactcactctaagaaaaatgcaaattagaactataaccagataacatcttttcaccatcatactgcaaagatcaaaaactttgataactaccttctgtggctgaggctgagggaaggaacagagatcagaggaagtgttatggaaggggtggcatttaggttgggccttcaggaacagacaattaaaatccaacttaacaacttaactggcacttaaaagaaaaagaagaaataataaagagaacgatggacagctttgactatcgagtgtaaattaaaatacacacacataaaatgtaaaggcaaactgagatatttgcagcaactataatagcctgagtttgaacgctatatatataaaatatcttcattaaattcaatctgaaaagcattagaataccactcaaaaaataaacaaaggacatgaaaaagtaactcctaaaataggatatgctactagttaataaccatagggaaaagttcagcattatctataaccatgaatgcgatatgattcagggttttatttggtgataaatcattataaaattagacagaataacattttttactccctgtgttggcaaagatgtggtgagactggccctctaatcattcctggctactaaatttgcaaaccgataaaatgttttttggaaataagtataaatctttaaagactcatattctttatctggaaaattttacatcacagactctatcttatggaaacatcccaaaatataaaacaaaaatgctatgtacaaagatgcctgtagaataatatgatgataatgacaaattagaaataatcgaaataaccccaaattagaaacgattcagtaaatttatggtatattcatatgctggaatattgtgcagctattataaggtttacgaagagtttttaaggataccgttaaatggggaaaaacagttcaattgtgcatgtagaatgatttcaggatcttttttaaaaaattcaatcactgcatagaaaaaggactgggaaggaatagacgataacatgaatgatggttctttagggaggggtagatcattggctattttttcccttcttcctccttattttgcatttttaaaccttcccttccattatgatatgttactcttacaataaaaaagttttaaaaatatctgtccctgtgtgtttatgctctaagttgaagctaacagtctctattccagtaggaaagatgctgggtcacagctgtgaggctcatcagtaaaaagcgttgtctcttttgtgtttttcagctttcttttgctgcaaccacgcctgttctagccgataagaaaaaatacccttatttctttcggaccgtcccatcagacaatgcggtgaatccagccattctgaagttgctcaagcactaccagtggaagcgcgtgggcacgctgacgcaagacgttcagaggttctctgaggtacgctcggcttgtgtggacacggcctgccttactgcttgctgctgtcatctagcaaaaggcaatgtggtttagtcagggatgggtactgtcacagggcttttaagcatgtgttggttagtgcgatcaaagctgtttcaccgttgacaaaatagagctggtagctgaggaatttcactgtgcataggactggtggaaaccatcatcaggagtgaaccttccctttcattctttttattggctacctcgtgtggcttattccctcagtggccctgtgggcttgtctttgttactgatgctgtcgtgaccatctaagatcacaaagttctaccagggggtgtgttcatctgtgaggagagttttggggaagggctggcttggaccgaagatgccaatgtcaccttggatggggtacagagttttgtttgttctaagtgacttacaaacacaccttaatatatggtaggcaatttttttgttttgtgtatgtgttttgttgtgggggaaaaaaaagccaaaatatgggtagtaaaaaatgtaaaagtgttgctttgtcctaagccacctgaatcatgctttctctctgaaagttaactcctgctttcacttaggggttcatctgcctagaactttttcaatgtatttgttttaaagccaaatgacttcatatcatgtatgtttcttttttcactttacaacagatcttagaggtcttgattaacctcatggtttaaagggacctggtgttctgtcagatgggtatatcgtaacttaccgagccagcccctctgaacgttgaccacttttcaatgggacaaccatactctcatggctaggtgtgcgtcttggcagtagacttctagaagtggatttgctgggccatttaaaaatttgagaaggactgacttccaaaaaggcagttctaatttctagtcccaccaacagcatttgaaaattcccattttcacatatccttactaacagtggatattaacaaatatttgaaacattagcctcactcagatgagtacaaaatggcctcctgtcttttttcccatttgctttgtgcctcctcctctcctttctattcccatgtgtgcttttgatacttggagcctccaaaaacacaagacaaaccaagtgttcttagcagcccaagagaaacaaactttagccgtgtggaggatttccatgtgtgagtcaggggtctagacagacctcagccggagcggtgggggcagacacacagcctcttgccagcctgggaatggggaaaggccgggcagggtggcaagaaagttgggagtagaacagggctggtaatcagcagacctggtttccactgcagctctgcacttaccttctgaggttcttgccccctgtctcttccatgggaaggagagaccacttcatacattggctgtgtgaccttggagacgttaccttgcttctctgagcttcgattcctcccctgtaaaatggggacaataacttcttgcatgcctccctgcagggcttctgccaaaatccaatgagtaatggatctgaaagagcttcgtaaactgtaaagttcatacacagagagggttgtttttggaggtgcgtgaaaagtggaagtgtttggccccactgtctgtgggtatccaaacaaggcaagcttttcccaggcaagactgctcgtcatcttcccacctctctgtttctcagcccctaggaggaggcacaaagggaacttgacctccagcgggagtgactcattgccaaacgctgaagaggcttttgctgaaaggccgccttcatagagaagcgagaaatgttctaaaatgagagtgaaacaagtggatggtggaggataagaaggacccatcccatggccccattaacactggactctactaggatttagagagacttgctttttcctttttcttttctttttctttttttttttttttttttagacgaagtctcactctgtcaccaggctggagtgcactggcgcaatctcggctcattgcaacctctgcctcctgggttcaagcaattctcctgcctcagcctcccgagtagctgggactacaggcacgtgccaccacacccagctaatttatgtatttttagtagagacggggtttcaccatattggctaggatggtctcgatctcttgacctcttgatctgctcacctcagcttcccaaagtgctcccaaagtggcatgagccaccgggcccggccagacctgcttttttctaatagcatctttggctgtcagagcctgaaggacccttagagacatatctcctaccctcctcattttgtagaaggggaaactaaggcccagagagggaaggggacaaagttcaaggtttcaaggcacctctgaagtcatgaaagattgttcacagaaaagtcaggactaaattttggggtcctgaacccctcagttcagacttcccatttctccttcttttcttctctagcttcctggaattgcataggaactacctgcatatagcctaagaggtttgaaattcccaccagactggttctaaagggggtaaattgtgagccctgacattggttgtgtgccttatagattcccaaaaactctcacagacagccaccctgtaaggaggagtgatggttcccattttacagatggggaaactgaggtttgcagagggtgggaggtctcttgccccagggcgcatgctggtaaagagcccaggcagggctggaagctgtaccctcaggctgttgctgtgtgtcctcgctacatggtcctcactgggtaatctcaggtcttgactgttgggtagcacatctttccccttgcacagccgtgtcggggccctcagccagggtttcagggcatctcagtgggaaaccttttttcccgaggacaggatgctgcttgctggtattgctggcaaggacctctcttgatttaaatctctcagcccagctgactcctctctgtgcccaagggctttggcatccctctctcaatgtctgggctgcatcgctggagtgcaggccctggaaactcgccaggggctaacagcttttcatgagtgcaaaggaaactggattccttttatgaaactggtcgatcagcaacgtcaagcacttctgttccggactggtgcactggaaggaatgtcaagtgaaagaaatcctgaagtcggagggggtggtggaggggctttactcccacggagcttattactgtggcattaggactatggaagcgggtagaaggctgagggccatcccacctggggaccagctgctcctgtgagcacctccaacctctgagtttcaaggtaagcccatggtaacccagaggctgctcaggacttgggtctgaggtactgatctctaggcccactttggccaagcatggctgcgtgaccccaggcaattcactttcccatgctgaccctaggatgtatcagatctagagctgctgctgggaccagggttccatggagagaattggctactggaaagtttcagcttgctctgccatgccccctctggatgaaagatgtaaatgagacaaaagaaggaaggatttggtaccaggtgggctgatctctgagcccatccttgctaagtgatggctgtgagatcctaggcctcatagagatccacttttcccttgtgtaaaatggggctatttatcctaccttgcaggtactgaagatgagatggttaagtgagaaaacagaaatgaaagatctctgtgtagtaggtgctcactaaatagccatttgcttctccagtgattcatggggcaaactgaaaatgcaggcccattcactcaaaaaatcagtgtggcctcctatgtgccatggtctgtgatgggccctgtgctgtggaggaccagagatcaatgacacagcctgggggtgagtggtgaggcttcctgcattgtgttctcaactctggctgctcgctagaatcaccagggaaattttgattttaatacaaaataaaatgtacatttttggattttcttccatttccttttcttcacttttaatagccttattgagatataatttacataccatacagttcatccgttgttaatgtacagttcaattattttttataaattttttatgttggccaggtgtggtggctcacacctgtaattccatcactttgggaagccaaagtggaaggattgcttgagcccagaagtttgagaccagcctggagaacatgacaaagccctgtctctacaaaaaaaaatacaaaaattaactgggcatgatggtgcacacctatagtcccagctacctgagaggcttgagcccaggagttcaaggctgcagtgagctatgattgccctactgcacattttaacttgggagacagtgagaccctgtctcaaaaaaaaaaaagtatgtgtttgtgcaaccatcgccacaatccagttttagaacactcttcatcactctaaaaattcccatgtgcccatttgtagtcagttccaccccccagccccaggaatagttttaccttttctggaaatttcatataaatggaattaaagaacacgcagtcttttgcgtctggcttctttcacttagcgcagtgtttgaggcacatcatgctgtggcatgtggcggtggtttgtttctttctactgctgagtggtaatcccttgtatggatggagcatctggggagctttgaaaatcctgatgcccaggccatccccagagcaaccacactggacgaccctggtgttggagcctgtccaagctctccaggtggcttcagtgtgtcgccagcgttgagaactcacgtcctgcgtaattggctcagagtcaggagctcagggtggaagtgacgccctctggtggtgggagaccttgagctcaaagtagccccattctacctggtggcctcggtctacttgtggccctcagcaggcctggggactgaggagcaggatggagaaggtggagggaggccttggtccagtgctgggggccctgccagatggaagacaacagtaggggtgtgaagagttgggtggtccacgaagtctgtgttggagagggataggcaggcaggtaacccgtgtgcacattgaggggctgcggtaaggaactggagggttgttgggaggctgtggacagagccagaagaggggcataagtaccgagagtccagaccctggtgatgtgtgaagacccattgtggcatggaggtgcaggtcactggaatttagggcaaggagctgagaggccagagtgctgagtgatgtcacatgggcactgcgggcccaggagggagatagggcttggggtggagatgaaggcagtgggcaggggatgcctagaaagacagcagagggaggcagagacatttgggtctctcccccttttcaagtcttatggtctacccaaccatcctcaccaagttattctttgggctctcaattctatgttgcagctaaccaactaagtgcttaagtacccgtaagccaatcacttgctgtctctgggtctcagtttccctttctgtaagctaagagaattgggccagttgacctctaagatccctcctagctcaaagaattttggattctaggatgtgagcttatggagacctggcctttgaccctgatcctgccactcccagggacatggtcatgagaattacttgcctctttgtgcctctgctttgtttgtttaagagactaattttagaggattttaaattcatagcaaaattgagagtaaggtacagagatttcccatacgctccctgcccccacacaggcacagcctcctcattctcaccatccctgtcagagtggcccatttgttacaactgatgaatctacattgacagggcatcatcacccagactccagagtttacattagggttcactcttggtggggtatattgaatggttttggacaaatgtgtaatgacatgtattcatcattatagtatcattagagtattttcaccaccctaaaagtcctctgtctttttactgatccccatagttttgccttttccataatgtcgtttagttggaatcatacggaatgtagccttttcagattggcttatttcccttctttaatacgcatttaactttccgccatgtcttttcattgcttgatagcttgtttagttttagtgctgaattaacacagctgtcccttagtaaccatgggggattggttcccagacccccatgggtaccaaaatctgagaatcctcaagtcactgatataaaatggtgtagtgtttgcatatagcctatgcacatcctcccatattctttaaattatctctagattacctttaatacctaatacagtgtaaatgctaggtaaatagttgttatactgcattgggtttttttttgtgttattttttgttgctctgttgttatttatttatttatttatttttaaaatatcctccatccgggctgagtgtggtggctcatgcctgtaatcccagcactctgggagactgaggtgggcagatcacctgaggtcaggagttcgagaccagcctggccaacatggtgaaaccctgtctctactaaaaatacaaaaaaaattaactgggcatggtagcgggcgcctgtaattccagctacttgggaggctgaggcaggagaatcacttgaacctgagaggtggaggttgcagtgagctgagatggcactactgtccttcagcctggcaacagagtgagactctgttcccccggtgcccccctgaaaaaaaatatcctcaattcatggttggttgaatccatggatgaggagcctgtggttaccaagggtcaactgtatccattgtcaggatgtaccacagtttatccattcatctgctgaaggatatcttggtggcttctcatttttttgcaattattaataaagctgctctaaacatccatgcgcaggattttttgtggacatcagatttcagctctttgggtaaataccaagaagctccattgctggatcatatggtaagggtatgtttcatgttgtaagaaaacgccaaactgtcttccaaagtggctgtaccattttgcattcccaccagcaatgaatgagagtttctgtgactccccatcctctccagtatttggtattgtcagcgttctggagtttggccattctaatagatgtgcagtggtatcttgttgttttaatttgcattaccctcatgtcatatgatgtggagcatcttttcgtaggcttctttgccatctttttttcatcttgagcatgaggataataatagcacctacctcttagggttgttgggaggattcaatgtgttaggatacttaaactactaagaaaagtgcctggcttatcctcagcaccatgcaaggggcagctgttatttttattaacatccagaatcaggttccttagcccgtggctggcccctattcaggagccccactgcatggctgagtttctgtgcctgccatgagcatggctgcctttcccttttctccctccaagctccaagctccaagactccccacctagtcactggtcctcagtgatctcgaggcttctgaagctgacctttctgtactggcgacctctctcaagtggcaggccccactgaggtgaggcccttaatctgcccgagaccaaaaggtcagcatctgcagagcttcctcttcaaagcacctgccctttcaggccctccagggccctgcctggccctttgaaacctttaccccttgctaagttgccatctgccccaccaaaagggccttgggtcaactcctctaaagttgctgcttactcttccagagtagtagcctgggagacactcctgcaggggaggacggggagaccctgggcttgcatctaatctagaagccacccttgttagaatcatcatcctctcctgctgctctgagcaggaacaagctccttagcatggctcgagaccctttatggtctctctgaggcctcctcctctgtctcacctgcagtcacttcttcctttgcccctttggtccagccacacctccatgctggcttctctcttggcaggaacatcctgccctccatctggctcaacctccccagctggctccaggtgtgccgtctctgtgttcttcctcctcatttttctccccataccagttctttgcatgatgcagcacaagacaccatttgcttcctcatctctcacccactgtcactggatgggggatgagatgagatgatgaatgagagccacagcagatccctgtgtcccctcaccctgcatgctccctggtgcaggtatgttcagtgaggatttcagtacatgattcttgatccattaggccagattcttagggacaaatgcagttctttccctcctgttttcctgagtccacctgttcctgggatggtgagatgaaggtgtaaggggtgcagagaaaccccagccccagcatccaggcttgtgaagagtccattccctctcttgactgcctcctgcctgagtcacccgggccatctggaagagcagcagggaatgacggatgattctaacaagggtgactcctaggttagatgcaagcccagggtctccctgtcctcccctgcaggagtgtctcccaggatactgctctggaaaagtaagcagtaactttaaaggagttgacccgaggcccctttggtgggacagatggcaacttggcaaggggggatcgttgcaaagggccaggcagttctggcagagtcagcaagtctgactcctgcagaattccactcaggtcatgccatcatttcttaacttgaagtcttttttggatgtgacattgtttgttggtggaaattcttctagagatctcagtggaaagttctggaccagccattggcatcaacaatccccaggaacctgccacgtgcttgcttatagatgatgtaggtgttgggctttgggaatgcacacacggtagtttgtgtccaagttaattttcctgaatttgtcatcctgggagaattttttcctgagttgttaatgcttcagaatcctctctcttcaggattgggcaatactgacttctacaccagtcgttctcaaagtgtggtccctggaccagcatcatcagcaggaccacttgggctctgtcctagccccagtgaatcagacactgtgggatgggctcagctttatgattttgatgcagctagagtgtgagaaccactgcactgaaggaatgggcagccttcaggtgggaccactgtgctcccaagctcactttaactaagaacaaggccaagcacacttggagggctgagccacctctgagctctgcccttggcatccctcctggctgcaggatcacctgggctgccagcgtatctgcagatcttttatcattaggagacagaggggactccgacggatcagattctaatcctaatggtactagtgccccacctcgggccccaacttttatctgaagaacttgccaatgcttttaggtgacttggctgcctgcccaagcaagcatcctctccttctctgtgctcttcccttgagctctgcaaggggccaggcctgtgggtcagccagcaggaaaagattcttatctgtcctgtccagaccttggtggttgtttgtggcagcctctttggcatttgaagggttagggtaggtccattatttcccagagaatggtttaaatatgtgatatgatttttgtacaatcttaatatctctgtatttgtgttattatacactaggaaaaagtaaaatgatgactagcacatcaaaactgtacttcatggatgttattgcttaagatggaatccctgtttaaaaagtgacaccgttcaattgaaaatactaattaatgcttacacgggtggtgcacagacatggtgaaatggcctctaagaggtgcaggagtgactgaagtttggggaccactgggatgaataaaaagcacttagccgcctgtttatttaactcatgaggatagatgggtgaagggtggggagtgggactggcaatagacttctccttgaaactctgatctaaagcagataatcaatgggaaaggcatttgatcaatgtcaagaatcagccccacaggccttcagtcttctgctgaggctccatagggacagatcctggggttcaagcaacacttgttctttcatgtgaatgttccctgtgggaagtgcagcccactagcagtgctctgtcctacccacccctgcagagtgggaagaccccacctaggtgagagccaccgcctgtcaggggctccagtttctagtgcttctgccatcttggagcagtgtgtgcacatctggagcatttccaggatgttttgctcagtggtggctgccatggctaagcctgctgaagacagatgtccgagcttggatgcctttatctggctcagagctcctgccctcgggacagatggcccactagtctcctcctccctctactccagagcagagagaagatggctgtcccatttttggttcaaaaggaagacctcaggacctagtggatggtcccccataacactccacaccaggtcctcagagtggagtccttctccccactccacatggaccccgctcagagaggctagggtgactggccgtgggtctgtggtgccaacgccaggctcctgaagggctgggtgagtgttgtactctttgctcaagagggcatgtgatattagataaatatatcctccactcaagctgtgaggatcctggaacatagcgttgactgagtgtgccttcttcaaaacagtccacaggagatccttcaggtctctgggggaaaaggaccatccacagtgacctcagcaccctcaccagggacacttcctggtgccacctgcccagccccgggccaggctcccagggcaggactcaagccttgcgaagcaacccttccccctctatacacacacacatcaggaccttgggagtaggaaaatgtgattaaaatctcatctgccagttattgagaacctactgtgtgccaggtagttatgttcaattattcagcatggtgtggtctccctattttttttttgagatggggttaccctccatcatccagattggagtacagtggtgcagtcgtagctcactgcagcctcaaactcctgggctcaagcgatcttctggctcaggttcccaaatagctgagactacaggcacacgccaccgcgcctggttatttttattttattttattttttgtcgagacagagtctcattttgttgcccaggctggtctcgaacttctgggctccaatgaccctcccaccttggcctcccaaagtgctggtattacaggtgtgagccacagcacctggtgctgtctcccttttagagagcggactcactcagggagaattaagtaatgccagggtctcatagccacgaagtggcaggtatagacatgaaccccggtttgtgcctgcccttgtgaagaagaggaagccaggagtctggggccaatatccccccaagtccctgtaccccacctaccacagaagcagggaggtgaatatacaggccaatcaaccatgtctcaaggggacctcttcacagtcctttggaatttttgccatgggatcctgcatttaatttttattattttctcaagttgggaatctcagaacagagcactgtcccttcacgctgctcctaccacccttcccgggacacgttgtttctgccggtcctcttggctgacagggcagtgcatcttgtagtgtgtaggttccctagagctattctggtacattctggctgtggtttctcccccaaggcccatctgccaggcttgggtagtgccagagccgcatgagcaaaggagtggagttgggaaggtgtgtggaaccttcaggaaacagcaaagagtctgttggggctcgatagctccatgaacagaatgagaagtggaaggatgagctaggaggcaagaaggatggcgaagatccctgcatgcctctaagttgagactttacctgtcagcagttgggagccatggatggtttttaaatgagaagtgagatagtagcagtcctgagggccaattgggaggagcagaccagaggctgtgaaagcagccaggaggttactacagtaattcaaaggaaaaataataagattacagttactttcttaccataaaaatgtcaagttcttttttgtggttatttttattttaaagtactaattattgttttttaattgtaatatggatatgaactcaatgcagaaaacttggaaaacacaaaagagcacaaaggaaaatttaaaattggccataacctacccactgaaaggtcatcattaacatctaggctgatgtctttaccattttttcaatgcacataaatgaatgtgtgtaaataaatacatgctcttgctatcgaaatggcttcttagcaatgcagggagaatgttttcccaggtcagcaaatgttctccgtgactccgtcaccgtgactcctaatggctacagtgcttcttgacttgaccccaatctgtgccatagccctgatgtgttttgaattgtatttgcctccagtcatatttatcctacagtctgttccctttcttcctatattccaacaattctgcaaataccctgtccatgaacggtcttcttcttttttccaaaactgttgggatttttttttttcttaacatttttttggccggccatttcaaggattcggggatgggacaggaggtagatgtgtgtttgctctcaccatctttatccaattcctgtttaaactattctaccctgtgcgtatgccatcagttactcaagaaggctgccgttattgaacatggaggtagttgccaatttttactgattataaataatgcagtaaactcatacttgtacttttgtgggaacatctctgattattttctgaagttaattcctagaaatagcatatgcacatttttgaaccttttgtacatattgccaaattgtcctccagaaagatcatgccaatttagagtttcatagcagtatacgggaccattccctgccagtattgtgtattattcttttctgatttttggcgattgctattttaatttgcatttttttcattactattgagattgaatttcttttttactaagaatatttctcatttctgtttctccttttgtaaattggctgttcatgttgttggcactttttcccattagactgttcttttttttactgatttataagagctctttataaagtaagggtatcagatcagccttttgtcatatttgttaagatatttctccatgtttcatgtgacatttaattttgtttttgatattagttgatctattgaaaaatttagtgtgttatacagttaaatttatcaagaccatttttttcacctttccattatgcttgacaagctcttcccatctccaaaatttttgtaaatacatacctatgttttcttctagtatattttttacttcattcttcactttatctggaatttcagtatatggtctgaaatatcagcctttcctctcctgccattatagtcactcaatttttctttcagcacttaatatatctttttctgatttacttaaaatgcctatgctaaattttatctttagaaaataatatattacacttttgcttatgctttaggccagttctgtatgatcgaaatataatgcaaaccaacatatataattttaaattttctagtagccacattttataaagtaaaaagaaacaggtaacattaattttaataatatattttatttaatacaacatatccaaaatgctatcatttcaacatgtgtcattaggatttcaagcgcttgataatcacatgtggctgatggctactgtcttggacggtgcagcttttgactgttgctgagtttttacattttgttccattaatctgtctatgctggaatgggtacctcagggctcctttataatatagtttaatgtgcagctctcctttctttcttaacagttgccttcattttcaccagtttaattcttggcatttttgtttgaattttagttactttaattaatttgtagaagagttgacatctttatataccatgtcttcccactcatgcatatggaacgtttcttgttggatcctcagcaaagttttgtcattttcttcatacaggtcctttccatgaacggttaggtttattatcaggtattttacatttattattgctttggggaatgggatctagtttgcttgatgtttttaagtggttattggtgggatatgagaaaactattgatgtatatatccacatcttatgactggctacattgaactcctattatttctgctagtttttcctctcttaattctcttggattttctaggtagatataataacatctggagcaagaataaacttgctttctattttccagcattatggcatctttattttcatcatttttcattgaggcggtactgcatagtggtaaatgacagtcatagcagaatgaccgtctgagttctaattccaactcagctacttgccagctgggtgactttgggcaagttgtttaatttttctgtgtccctgataatggggaaatgctaatataaccttaggtgtcatgagtattaaaacagctaacacatgtaaagcatttagggcttagaacagtgtccaaaggagtgaatacccactattttatatatacatatatatatataatatatatattattattatatattattaacatatgaataatatatgttattgtcgttaatattgcttcattcactggatgttctagagttatattttaaaatagtgataacagtgggtattcttgtcttgtccttgactttaatgagaatgctcttagtaaggtttgatgtctgttagaagagcagatattcctcctcatctcaagggatgttctatttttatttactcagtgtttgtacctatttagctatgcatgctaaaatgtcagatgcctttttagaatttgtattgatagctatggatttttactttgatctattagtgtgacaaattatagtcatcagtttccttgtacccatttggtaatacattcattcatttaagacatatgtattgagtgcctagcttgtgttggtcaccattctaggtgctgtagacacatcagtgagtgaaacaaagtccctgccctcaaggagcttacattctagtgggggaaacaaatgatttaaaaaaataatgagcaaataaatttaaaatatgtcagatgataacaagtgctagggagacaaagtagagttaagggagtaggaaatcccatgcagagagtggtgaagtcaagcagagcctcaaagaggtgatgtttgggcagccacctgaaagcagtgaggggcaggttataaggagacctgagagaagagggttccaggcagagagaacagatgcacaaaggtcctgaggtgggagggactctggaagtgctggagcaatgtcaggaaggctatgatgactggaacagggtgggtgtgggagaagtagagtggttggtgtggagtggaggtggggcaagagatctgtggttcttttaggatatttgtgaagactttggcttatactttgagtcagttgggaaactattggagaatgttttgggttttgtttttattgggaaaaaattcacataccataaagtccaccattttaaagcatacaattaaatggttttcagtatatacacaataatgtgcaacaattaccactatgtaatttgagaatatttcatcactccaaaaagaaattccacatccattagcagccactcattttctccggcccccagctgttaatctactttctgtctctatagatttgcctataatgacatttcatataaatggaattacaaaatatgtggcatttgtgttaacttatttcacttagcataatgttttcaaggttcatccacgttgtagcatatatcagtacttcctttcttttttatggacaaataatattccaatttgtggatgtaacacattttatcattcatcagttgatggacatttcagttgtttctacttttgactattatgaataatggtgccatgaacattgtgtacaagtttttgtggggatgtatgttttcatttctcttggatttacacctagaagtggaattgctgggtcatttggtaactctacgtttaacattttgagaaactgccaagccattttctggtttgcatcaatggatataccatttacattcccaccagcaaggtatgagggttccagtttctccacatccttgcaaacacttgttattttccattttagaagagattataaccatcttagtgggtgtgacatggtgtctcattgtggttttgatgtgcatttctctaatgaataatgatgttgaacatgtgttcatgtgcttattagctatttgtatatcctctttggagatatgcctattcaaatcctttgtccaatttttaattgggttgtttgtctttttgttattgagttgtaagcattctttatatattctggattagatcatatcagataggtgacttgcaaatattttctcccattctaagggttctttttactttcttaatggtgtttttttgcacaaaagtttttaattttagtaaggtcaaatctatctttttttcttttgctgcttttacttttgatgtcatatttaagagaccattgtctaattcaaggtcatgaacacttcagcccatgcttccttctaagaattttatagtcagatacaatccctgatctttgatctcttttgagttaacttttatatttggtgtgaggtaaggttccaacttcattctttcatatgaagctattcaattgttccaggaccatttgttgaaaagattattatttcttcattaaatggtcttggcacccttgttgaaatcgactgaccattgtagtatggatttctttctggactactggagagttttttttttaataagagggattttatctgacttaggtttttaaaagtggtgcttttggcaccaccgagtagagggtggtggtgacttgaactagatagtgaaaatcaaccagattctagatatttttgacagtagagctgacaagatttcctgatggaatgaatgagtgtgtgagcgataaacagtgaggcatcaaagatggcgccaaagtttttgatctgagcaactggacagaatgagttatcacttctcaacttgagggagagtgcagaggagcaagtttccatgaagggggtcaacagtttagatacgcctgttgaatatccagatggagaggttgaataggctattggataaatgggtctggcattcatatttacattaaaccatattggcattccactgtttgttgtgctgtttgtttttcttttaaccaattcatctatttttttctgtaagtacgtatgataatttatattttgccgtgattgtgctgtctttgtcaggtttagttgtcaggaatattctagttttacgacaagagttggaaagctttccatgtttttaggtgccctatacagtttatagatacaaattaactgctctttgaaaataaaaaggtgtgtctatgaaaccatccaggattttacatttttcagtctgccctttttacaagttatctttgtagcttcttccatgcttattgattttggctttatactccttaaatggatttagtaacatattttctcaaaaatagtccatttctttgggatcttcaaatttattagcatatatttcaggacaatttttaaagcctctgtttttttgttataggccctttcttgtttttcccacttttccccttgattagatagtttgcttcttttattgatgtaattgttattaacatcttaaattctgtgggaaagaaatggttacattttttattattttttcaaatgaaattaaacctggatcaagcactccatctgccagatacactagggtcagtgtctctgtcttgaagtaccacccctctctaaaatgaccaacaactctggtgggttttctaatagaaagctgggagagccagcattctgcagcccttgcttcctgctgccacttgagtgtgctgtggacactggtcccactggttactgctgctaatctaggttcccggttgcacttcctagcatcctcaagcccctcctgtagatctagaacttctgttggctttttcttttcggatatccacatccccacaggtcagagagggttcctcttagagctctactcccaaatggtcctgttattccattttgctacgtaatagagctacacgtttatcctccttcttaaagcagctacttgattgcttgaggccgtgggggaggtctacttgcttctcctttaaagattactcatcttttcagacatttctcttgctaaagaagatagcagaaaaacacaagttaagtcttcagtagagcatcccattatcttgttttttaaccaaaggaccagctcttggattcttactggctgtgctttgatttatctacttcttaatttattttcttctgcttttctcctgaataataccttccctttatatgtaggtttctttcaccattcttcttctaatttcttaatttgcatatttattttttactcttgttttggttgctattaagcgtagttaagcatataaatgtctttgattacagctttgatgaaatcctatagtttcagctaaataatatctcatcctcattataataaaactatgctacaattgtactttaagtttaaaatatcggtcttctacttccctaagtgccaacctagaaatgcaacaatatctattgtaagttacataaatcagtacacttgtttactctccatccctcactgcctctaattctgtattgttataatctgagttttaatttgattttactctttacattgtggatatgcttttttcagttgctatttgagatgttcactttattttgaaactatactacaataactatgattttaagattcaaatccatatttacatgactaatttcttctgacatgagtcagtttcatgagttatgtcttttgatttatctctctgtggcatgagtacatcttttgtttttcaggaaggtcatatgagttttatatctatgcccttgcataaatcacaatttctctctgtagctttgcctatgaatgacaagttatctaagtataaatttctatgatcataagctctctagacattacatcaatgttgtaataaagtctgatgcagtctgatttggttcctttggagataaagttttttagtcgcctgtaccagttgcttgtaggattctttctttatttttgatactcataaagaaaaaatggcacatagctgatttttgttttgtctaaaatatgattacatttttattcgaagaatctggtctttcttctgattgcattagttttcttttattatatctttaattattactcttttgttctgatatcttttttagaaatatcaataattcatgagtgagcctttgtagtttattctccatatttttgttttctctctggtcattttaatcttagtccttttccttcacattgtgagagaacatctcaagactgtcctccacaatattcatcagtttttttttacaattaaattctgctccttgttgcttctaatgcttcttaaaattctcataacattattcatttccagtcattattatattaactatgcctggtttcttttatctcagtttcttttctcatatattttattttttagatttagaatccagattttatttaacctccatgaaatacaaaatgggtattacaatttacctttatttcctacagcaattctttttagagatgatattctttctttgcttgaattccttgtttgtttcctttatgtttcagaaagttttcataggttccatatgcattttatgccttctatgacctggtattcgcttacagcatgggtgagttcttcttgagtcccctcattgttttatctagatgctgttagattcttcaccttggatattcatctggaagactggatgataacattttatatgaccagcctagggacaagcagccaagggattaggaaaccatttggtggtgtgggcctttcttgtttaaatggtttcttcatgagtttgtcaaacagctgctccagatgtgcagagatccccctggcctctgactttgtttacttgcctgctgtgtctgcaaggtgcctaggcctgtcctggggaaactggacttcaataggctttgcttgttcgtagatctaatgacccagccactcctgaaggctgttgggttgcagggtgataggtggactccttagtgagaggtaggccctgcacccttctgtggcccagcctcccctccagtacttactcacccatcagaggctgtgaggtcagtctcgtcagcacatccaccctccctgcagcaccgcactactttctcaggaaggagagccatgagtcagtcttcaatctggttctgttggcactgtacctagcagaaattcctcaaagttggtggcatattgatggcactctttcctattttccaaggctgaagcagattcccccctatttttatattcccttggtcctttctgtcactttcagaaggaggtagcttaggtgggagttggacatctgtgcttagctttaccatctttctcaaaagtttcatagttaacattgtttcctatactttgtactttggtatatagacatatgagattccctgagcatttcctgttccatggccccccttttaaaattcctcatttatattggctttcttcatatctggttttatagtttttcctgggcacttttcctctccttctcaagttccagtttagcatcctctcgatcagatggagaattctcctgccaaacatggtgttgccagtcttggggcagtgagttctgtcccttgccagggactcatcatctggcgtcctgagccacatcctggccttcagcaatattgatggagtttccccacatcctcccttctctgccaaagttatgccctttaagtggaaacagaagaaaccattcccctgcctccaagtttccatcccctttgaaagccttgtgcttcactagagagccattttggatttcttctggcatacccagaccctcctgggtgagtcagcagacgtgggcagcaggcgttgtggggagggggttgcagaggctcctccatcactgcttggctgcctgccccaggaagacagcacatcacacaatttgccatatcaagtctgtgaacagctgcctccctaccctccgtggggagtcaccaagctccacacatctgctccttccgggggtggtgaaaagatttctcccatcacaggcacctatgaatcccccttggggtttcgtgaggtatagagtagcattctcctgcagaaagcccatagccagccttcatgagaagatatacctttcaggatttagtatcagtggcatcaccatcacttcctctccttcccccaatcccatggcatgttttccacacctccccttcttgactttgtcatttctgataatgaacactgccatttattgaaccttagccatggtagacacttagcgtatattagcttaccttttcaagaactcaaagacaagttgtggttatgcccttttaacagacaagaaaaaaagctcagagagtttccttactcacccaaggtagcccagcagtggggacatagctagcatgctagtctagagtcacctgactcgagttcatgcttttgcctctctcccacagccttcctagagggaaaaatagaaccataggctctttatcctgagtctagaacaggggtttgcaaactgtggcctatggaccaaatgcagccccttgttttcataaataaagttttattggaacatagccacacccattcatttgcacattgtgtatggctgcatttgcaacgttgttgggaaaaaacatgtaagtcctgcaaggcctaaagtatttactatctgaccctttaccaaaaaaaaaaaaaaaaagttgccggctcctagtttccagcataggctattgtagaaagagatagactttgaagttgaatcccaggctccctacatcctagctgtgtgaccttgggcagttgactcaacagctctgaatctcattttatttacccataaactggtcataattgtaccttttgggtttacacccatgcccgcaaggagtgatatacgtttgagggctccacatatgacaggcactcagtaaatgagtccccactgttgctccggcctttcccgtctatcacggatgtgcagacttctctaatttttctcttcccttctggagcattctggcagttctgcctaagaacccttgctcttctctgatcactggagcacagagaaagcacagatgctcctcaagcctcccccttgaaacgctgggcaccaggtgttaagtgacacccacctcaggcagatgcatagggtgtcctgtggtctcattcattccctcattcagccagtgctgactgagccaggccattatgccaaaatctgacaggggctcagacagagccttcaggcccttcagttgctcacagcccaggggcagatggacagattaacaagccgcagcaataacagtaatcttggtgcctctagattttggtcccctttggaaaattccattcagactctacagagtaaatacctgttccctggagtctctgagtactgctcgtaagaagatacattataaaatctgcttagtttagcacagtttcagaccctgctcccaggctggcagcctgctcagcactttggtgcagtgtccaccccaagacacagtcggctcacctagaccaccgctccctcccagggcacacactcagcacctctacaggatggggctggctccatgggcttcgtgggaggggaagcgcagactgtctttcctgaccttgagggagctgtccagagtttagatcctctccatacatgagcaacccagcatcctcccccagacacctgggctggctgtggggctgaggggacctcatgctctgtgctgctgtagtggattctctgggctgttgatcactgaagatcgtcccagttactccagagcagggccgagaaagcagggcctgggaggaagaagcaggggatgccagtgttcacaaggggtgagtgcatctcattggagaatccagaaggacttcatggaggaagggctatttaccatagggcttaaagggtaagcaggacttagacataggagggctgaagtccgaaacttaaggggattcgcgcatgcatggtcagtggtgaaatgaattacaaagtgtatcttataatcttaggtgaaaacatatggatataaaaaattatactttgataatttctacctgaaaaacttatatctacagtattagcgtcctggcaagaaacagacggcatcttcagagctgaagtccgatttagatgaagtactttaggcagaggcaatggaaccaaccagggctactgcagctccaggggctagcaatggctggagtcacgagcatcaactgctctggaggacaaggggaggggcagagctactggaattgggaggagcagccgcttcacacgggctctaaccaagccaggaagcagccaaggtaaaaaatacccggaactctttctcgccttctttctgactcctcctggggcctcccattggctctctttcactgagctcccataggctccctaactcctactgggctcccattggccctctgactcctgctaggctctcactggtcctctgactcctgctaggctctcactggtcctctgactccctctggactctcactggtcttctgactcctgctgggctcccattggccctctgactcccactgggttctcattggtcttctgactcctgccgggctcccattggccaagcccagctggaagttagaggaccaggccactcacgtgctgccctatctgaaagttctaattccatgaaaaaagcagggcagggcagggcaggctggcgcatgtggatgaaagcaaatgggaataaccaacatgatgagatattatactagttggattagtgtactgggcacagggatagttttatcactttactcctttcctcacttacaatgaagtttagacattattttgaaaagcttaaagtctttgagtcactatgagggttctacagcaagcagctgcgtttcgggctctcagcaggcaatattgtcatctgataacttggtggcaatgtagtggtttggtccaagctgacacatatgtgggtggagggcgagcctgttcaaggtcagtttcgccaggagagggactctcttggggctcagcatacaggagatttgttagccagtgcccacaggaaggggtgggaaaggtgggactgggtgaaggaagaagctgacacacaatgaggttgcaaaaggaacctcagccaagcttgcccatggggagctatggagctaggatggcccttcagagaagtcccaaatagagaccagaaggctgggccagtcactgggtgcaggcggtcctggggaaggtgtgtgaccttgaatgaggctgcctcctttattcaagggcaaatccggaatgagtgcctctgttctggcagtgcaccgtagtatctccatcagagggcccttaggaacaaaggagtttaagctaaagggccactcagactggagcacactaaaagggtgtctctcaaatctggtcgtgcaaccaagatctcacagcattttgtgcaaacacagattgctggcctccctcctgtaccagtgtctgaatcgctctgttggggcccaggaatctgtatttctacaaagctcctgggaagatgcagatgcataagcatccttggaagctgctgccctaaactctgagcccaagggtggttgatatcggggagatttccaggtctgtttagcgctaccaggcaactgctctgtgccaagccttgtgctgggtcctggaacccaggagctaggagccaggatcaccaaagatggtgccaccctcggggtcaggaatggggctgggtactgcgtgggagcagcgcctgtcttggattttggaaagggtcctgaaaggtctgcaactggtggctctcttgggggcttagtgttctgttgctgccgttaaataaatggctttgggcaatattggtctagaggcaagaaactgggtttgagtcccagctccgtgcctagaaagttgtgtgatttggggcaagtttctattcttcttgggacttcagtttccccagctgtccaatgagggctggtgagttggtgtgtggcagcctggttctgatggtctgagctcagcctctctcagacatgaggagtgggcctgagagtgtcagcactcactctgcctgctggacagagggctccctttgcagaccttggggccaggaggtgaaggtggagtgcatcctcagtgttcttgtctccttcttttattaccattctctgattgtgatgcccttgcttcctggatatgtccagttctgccatgcttctctttcccgtgtgtcctaatcgcttgctttttgccaggctttatatccagcatggatacacagagaggccccaacacagtctcaactccccagggcctgccagtctagagagggatgctcaaggaggaaagccactcactgggtcctctccctgcaggaaccacctaggggccaggccagtgccaccacccaagctcttcctctcttcttcctctactctcccctcctggatgtttggaagtcagagagacatgagtatcagtcttgaccctctgacttactacttgtaaggctttgggcaagtgacttaatctttcaagtccctcatttgtgaaatggaaacaagaatgggatctgctttgtaagattgttgaggatgaaattcactccagagtcaatcctggtgtgtcgcctgtggcccccttcctccctgagggcttggagtgagggatgggggtgggagagggggagtggagggaagggaaggaggagaggtgggctctgggagcagtttgcacctatgccttttgctgtctgtgccaaggcgagtcccagcccttcagttcctcacctcattccacaccccaaatctgaagccctagaagaagggagccagtggaagccaagaaagggggtttgcaaatgctaggggcttaggatgttagagcagaacataagttgaggacaaatcacccactttggaatccagaactggaaagaaagctgctaataaaaagtgcagtgatttcccagggtctcagaaaagagtcctttaaactccaccttgaagtgcaaaggtggacaatttgatcgcactgctcgtccagcttatggagcggcctgaagctgtcctatttctgcaggggtgagaacaggtaccacctaggcagctccccatgggcaagtttggctgaggcctctcttgcaacttctcaggtttgagaatttgagacgttccttggagatgcagcagtctcgtctgcccctccatctgatgcctgaatcccttctacagcctgtgcaacccacctctgcttgcacacctgtcatggcggggagctcagtcccacctggggaagggtccatccttccttggctcattctcttgttagaaagttctgtctctgagggagctgaaatctacttcctggtggcctcccccactggaactggccctttccctgaggcccaggtgccacgccagtcccctgggtttggtggcagttcttcagggatgcacgaagtgatatctcacaagcctagacttccccatgtggccgcctgccatcccctccaccattcttcaagagacaagagcagggatggggctcagacagccagggaatggttttttaattattattattatactttaagttttagggtacatgtgcacaacgtgcagatttgttacatatatatacatgtgccatgttggtgtgctgcacccattaactcgtcatttagcattaggtatatctcctaatgctatccctcccccctccccccaccctacaacagtccccggtgtgtgacgttccccttcctgtgtccatgtgttctcattgttcaattcccacctatgagtgagaacatgctgtgtttgtttttttgtccttgcgatagtttgctgagaatggtggtttccagattcatccatgtccctgcaaaggacatgaactcatcattttttatggctgcatagtattccatggtgtgtatgtgccacattttcttttttattattattattattattattatactttaagttttagggtacatgtgcacattgtgcaggttagttacatatgtatacatgtgccgtgctggtgtgctgcacccactaactcgtcatctagcattaggtatatctcccaatgctatccctctcccctccccctaccccacaacagtccccagagtgtgatattccccttcctgtgtccatgtgatctcattgttcaattcccacctatgagtgagaatatgcggtgtttggttttttgttcttgcgatagtttactgagaatgatgatttccaatttcatccatgtccctacaaaggacatgaactcatcattttttatagctgcatagtattccatggtgtatatgtgccacattttcttaatccagtctatcgttggatatttaggttggttccaagtctttgctattgtgaatagtcccgcaataaacacatgtgtgcatgtgtctttatagcagcatgatttatagtcctgtgggtatatacccagtaataggatggctgggtcaaatggtatttctacttctagatccctgaggaatcgccgcactgacttccacaatggttgaactagtttacagtcccaccaacagtgtaaaagtgttcctatttctccacatcctctccagcacctgttgtttcctgactttttaatgatcgccattctaactggtgtgagatggtatctcattgtggttttgatttgcacttctctgatggccagtgatgatgagcattttttcatgtgttttttggctgcataaatgtcttcttttgagaagtgtctgttcatatccttcgcccactttttgatggggttgtttgttttttttttgtaaaattgtttgagttcattgtagattctggatattaaccctttgtcagatgagtaggttgcaaaaattttctcccattctgtaggttgcctgttcactctgatggtagtttcttttgctgtgcagaagttctttagtttaattagatcccatttgtcaattttggcttttgttgccattgcttttggtgttttagacatgaagtccttgcccatgcctatgtcctgaatcttattgcctaggttttcttctagggtttttatggttttaggtctaacatttaagtctttaatccatcttgaattaatttttgtataaggtgtaaggaagggatccagtttcagctttctacatatggctagccagttttcccagcaccatttattaaatagggaatcctttccccattgattgtttttgtcaggtttgtcaaagatcagatagttgtagatgtgtggcattatttctgagggctctgttctgttccattggtctatatctctgttttggtaccagtaccatgctgttttggttactgtagccttgtagtatagtttgaagtcaggtagcgtgatgcctccagctttgttcttttggcttaggattgacttggtgatgcgggctcttttttggttccatatgaactttaaagtagttttctccaattctgtgaagaaagtcattggtagcttgatgaggatggcattgaatctataaattaccttgggcagtgtggccatttgcacgatattgattcttcctacccatgagcatggaatgttcttccatttgtttgtatcctgttttatttcattgagcagtggtttgtagttctccttgaagaggtccttcacatcccttgtaagttggattcctaggtattttattctctttgaagcaattgtgaatgggaattcactcatgatttggctctctgtttgtctgttattggtgtataagaatgcttgtgatttttgtacattgattttgtatcctgagactttgctgaagttgctgatcagcttgagattttgggctgagacgatggggttttctagatatacaatcatgtcatctgcaaacagggacaatttgacttcctcttttcctaattgaataccctttatttccttctcctgcctaattgccctggccagcacttccaacactatgttgaataggagtggtgagagagggcatccctgtcttgtgcccgttttcaaagggaatgcttccagtttttgcccattcaatatgatattggctgtgggtttgtcatagatagctcttattattttgagatacgtcccatcaatacctaatttattgagagtttttagcatgaagggctgttgaattttgtcaaaggccttttctgcatctattgagataatcatgtggtttttgtctttggttctgtttatatgctggattacatttattgattttcatatgttgaaccagccttgcatcccagggatgaagcccacttgatcatggtggataagctttttgatgtgctgctggatttggtttgccagtattttattgaggatttctgcatcgatgttcatgaaggatattggtctaaaattctcttttttggttgtgtctctaccaggctttggtatcaggatgatgttggcctcataaaatgagttagggaggattccctctttttctattgattggaatagttttagaaggaatggtaccagttcctccttgtacctctggtagaattcggctgtgaatccatctggtcctggaatttttttggttggtaatctattgattattgcctcaatttcagagcctgttattggtctattcagagattcaatttcttcctggtttagtcttgggaggatgtatgtgtcgaggtatttatccatttcttctagattttctagtttatttgcatagaggtgtttatagtattctctgatggtagtttgtatttctatgggatcggtggtgatatcccctttatcattttttattgtgtctatttgattcttctctcttttcttctttattagtcttgctagcggtgtatcaattttgttgatcttttcaaaaaaaccagctcctggattcattaattttttgaaggattttttgtgtctctatctccttcagttctgctctgatcttagttatttcttgccttctgctagcttttgaatgtgtttgctcttgcttttctagttcttttaattgtgatgttagggtgtcaattttagatctttcctgctttctcttgtgggcatttagtgctataaatttccctctacacactgctttgaatgtgtcccagagattctggtatgttgtgtctttgttctcgttggtttcaaagaacatctttatttctgccttcatttcattatgtacccagtagtcattgaggtgcaggttgttcagtttccatgtagttgtgcagttttgagtgagtttcttaatcctgagttctagtttgattgcactgtggtctgagaggcagtttgttataacttctgttcttttacatttgctgaggagtgctttacttccaactatgtggtcaattttggaataggtgtggtgtggtgctgaaaagaatgtatattctgttgatttggggtggagagttctgtagatgtctattaggtctgcttggtgcagagctgagttcaagtcctgggtatcctcgttgatctttctaatgttgacagtggggtgttaaagtctcccattattattgtgtgggagtctaactctctttgtaggtcactcaggacttgctttatgaatctgggtgctcctgtattgggtgcatatatatttaggatagttagctcttcttgttgaattgatccctttaccattatgtaatggccttctttgtctcttttgatctttgttggtttacagtctgttttatcagagactaggattgcaacccctgcctttttttgttttccgtttgcttggtagatcttcctccatccctttattttgagcctatgtgtgtctctgcacatgagatgggtttcctgaatacagcacactgatgggtcttgactctttatccaatttgccagtctgtgtcttttaattggagcatttagcccatttacatttaaaattaatattgttatgtgtgaatttgatcctctcattatgatgttagttgtttattttgctcgttagttgatgcagtttcttcctagccttgatggtctttacaatttggcatgtttttgcagtggctggtaccagttgttcctttccatgtttagtgcttccttcaggagctcttttagggcaggcctggtggtgacaaaatctctcagcatttgcttgtctggaaaggattttatttcttcttcacttatgaagcttagtttggctggatatgaaattctgggttgaaaattcttttctttaagaatgttgaatattggtccccactctcttctggcttgtagagtttctgctgagagatcagctgttagtctgatggacttccctttgtgggtaacccgacctttctctctggctgctcttagtatttcttccttcatttcaactttggtgaatctgacaattatgtgtcttggagttgctcttctcgaggagtatctttgtggcattctctgtatttcctgaatttgaatgttggcctgccttgctagattggggaagttctcctggataatatcctgcagagtgttttccaacttggttccattctccccgtcactttcaggtacaccaatcagacatagatctggtcttttcacatagtcccatatttcttggagactttgttcatttctttttattcttttttctctaaacttctcttctcacttcatttcattcatttcatcttccatccctgataccctttcttccagttgatcgcattggctactgaggtttgtgcattcgtcacgtagctctcgtgccttggttttcagctccatcaggtcctttaaggacttctctgcattggttattctagttatccattcgtctaattttttttcaaagcttttaacttctttgccattggttcgaatttcctcctgtagctcggagtagtttgatcatctgaagtcttcttctctcaactcgtcaaagtcattctccatccagctttgttctgttgctggtgaggagctgtgttcctttggaggaggagaggtgctctgatttttagagtttccagtttttctgctctgtttttttcccatctttgtggttttatctacctttggtctttgatgatggtgacgtacagatggggtttttggtgtggctttcctttctgtttgttagttttccttctaacggacaggaccctcagctgcaggtctgttggagtttgctagaggtccactccagatcctgtttgcctgggtatcagcagtggtggctgcagaacaatggatattggagaaccgcaaatgctgctgcctgattgttcctctggaagttttgtctcagaggagtacccagtcgtgtgaggtgtcagtctgcccctactggggtgtgcctcccagttaggctactcgggagtcagggacccacttgaggaggcagtctgcccattgtcacatctccagctgcatgctgggagaaccactactctcttcaaagctgtcagacagggacatttaagtctgcagaggttactgctgtctttttgtttgtctgtgccctgcccccagaggtggagcctacagaggcaggcaggcctccttgagctgtggtgggctccacccagttggagtttcctgccgctttgtttacctaatcaaacaactaactcagcagtggcgggcgcccctcccccagcctcgctgttgccttgcagcttgatctcggactgctgtgctagcaatgagcgagacttcatgggcgtaggaccctccgagccatgcgcgggatataatctcctggtgcgccattttttaagcccgttggaaaagcgcagtattagggtgggagtgacccaattttccaggtgccgtctgttacccctttctttgactaggaaagggaattccctgactccttgcgcttccctggtgaggcgatgccttgccctgctttggctcgcgcacggtgcgctgcacccactgtcctgcacttactgtctggcactccccagtgagatgaacccggtacttcagttggaaatgcagaaatcacccatcttctgcatcgctcacgctgggaactgtagaccggagctgttcctattcggccatcttggctcctcctccccagggaatggttttgaagtgggcttgctttggtgctctcaggtgtgatttcttaatatccgtcttctagtttggtgtcagaggctcactttgcatattgctgatttcctatagaagtttctattcatcaccttaactatatagcctccctgttttattaatacccagtgtttttgtaaacattggtttggtccctcgagtctggaacaattaaagcaatgggcagtttgtcacaaggaaagcaataaggtctgatggctaatttcattccccaacagctcagcatagcctgacttcaccgactgctcctagagtgggtgaggtccttgaaaaatgagggccaaagggaagactgatggttggggatgcccaacaggaaatttttgtgcattatccaagaaaggtgcttggacctggtcctgcttcctcaggcagcccctgtgctaggcatctggaggggcaagaggtgtcccagatggaaggtgtgtgagatatcaggacattcattctgtttagccgagaagagggatcttgagcccaggactgtggagttcagaggataagtcactgctagcctgggaacaagggaaggcttcaaacagcatgttggcatttcaagatgtatgggatctcagggtgaaagcttattgtatcagtttcctgttctgctgcaacaaatcatcataaatttagtggctttaaacaacacaaattattatcttatagttctgaagatcagaagttcaaaatcattgggtcaatatcaaggtgttcttgattttgactggttccttctggaggctttaggggagaatgtttccttgcctttcccaccttctagatgctgcccgtgagccttggttcctggcctcttcctccactttcaaagccagcagcagagcatctttgaacaaatttcttccctgactctgacttttctacctccctccttcccttataaagacccttgggatcatgttgggccaccaggataatcccagatggttgctccatcttgacatccttaacttcatcctgtctgcaaagtcccctttgccacataaggtaacatattttagggatttggacatggacattgttgggggaagggcatgactctatccatcactgatgattctttggaatttctaaaactgagaaatcagttttccatcagcctggctgatcgaaagagggatttgatttgatttgaaagccagagcagccccagttgccttcttgaaattgggccgagggtgcgtttctcccctacagtatgtggttctgggagacaggcctccgaggagcagtggtgggctggggagaggagcagcctacagcctccctgccctccctctggaggactttcatagtgcagtgatagtgctgacagctggcattgtgggttgggtgtgagggcctgtagctctaccaggtgggatctctgctcccaattgccatgtaggccagctggactcccagcaggtaggagctgccatgaggtcttgatgtgtgtagctgggcaggtctcaggtcacaggtgcctgacactctctgccattgtgagagaggcagggaactgtccccagggaactccagctgccctcaggccccatatgtccccacaggggtgcccccagagcaccacagctctccccagatttcttccttcattggggccctgatagagttccagctagcgctgcccctgggactcacccctgtgtctgcagactgggtcttcagcctcagcatgcagcccagcccttgcgaagttgcctcatccctgcgagaccagctcaagatgggtctagtgggcttggaatattaacctcctccatctaagagtgggtggccatggtgcagcctcagcatgcactcatccatgctctcattcaccacaattctgagcacctactatatgccaggcactacacaggatcctgagatcaaaacaaaccaagtgcttccctcctggagctgacacgtccatggggaagaaaatgttacagcccccatactcatggtcatctctttgcaagtcaactcaaagtcagtgatgcagactcctgagccctccactgaagctccatgaggccagcgcccctgtcccaggcacccacatttccacgatgcacagcgtatggtcctccacttgtttccctgcttttggtaattctggagatgtaagaaataccatatatctttgggacagacaaatggtgccatcaaatagagggaaactggggttccattccagaggccttgacatgtgatgtgagcatctagattggataggaagcccaggcttctccatgggaacctgccccaggtgtattagtttcctgtggctgccgaaacaaatcgccacaaactaggtggcttaaaacaacagaaatgtattgtctcatagttctggaggccagaggtcctaaatgaaggtgtcagcaggcttgccctggagtctctaggagagaatccttgcctgcatctcccagcttctggtggctccaggtgctccttgccggcagatgcatcactccaccctctgcctctgtcttcacgtggacttccccttcatgtctctgtgccccaagtctccctttgcctttctcttataagaatccttaacattggatttatccaggatgatctcatcccaagatccttcagttaattacgtctgcaaagaccctttttccaaatgaggtcacattcacaagttgtcagggttagaacttagacctatcttttttggaggtcacatttcaagccactggctctgcactgtgaacatgcatgggtcacacacgcacatgcacacacacacacacacacacacacacacacacacctggatacagctggatatatacccacaggcattccccaagtacagctattccccttgtgcagcagatctaatacatattcagttacacacttgccctttacatttttttcacttactttcaaatctggttacagatgattaagagcgaacttatttgtagaaatctaaaaagtaggtggctccatttctcagaaggaatgctctcttaatgaatgcacatcaggttggacaggcagaaatacaccacatggataagtttttaagcatatgccccaattctttgaaagacctcactatctatcaaagccaccttctccgtcattagaaagctatggggttttttggcattgggccaaaatctaatttcctgaaccatcttacctgttggtgctccagcaccacgggggtgcgcagaacctggtgccccccctctacatgacagctctcctgtgtttgaagtcggctttggtctacacctctccaggctaattttttaattagcttaaattaatggcagttcctggggagctccagccccagtaaaagtggcctgaattattcaaagatttgagtgtttcaaatgcctgtttatcctaattagcatcttagctacagcggtgccctctgcctctaaggagccacattttaacatgttccatattttaatggattttccttgaatgaactgtttaatcaagtgaagacacatttcatgaatgaatagaagtaaatctataattatacactttagtcaggtaagaggagtgacatttcggcacaattcatggctatatatagcaagtgcatttgaatgacaaagtaggttacctcagcttccataggagagctgagaattcgctttgctctcaagttcatttcgtaacctaattagaattttcaaagagttgtaaagtgcatgtggtgcagccctggttctccccatctttacctggatctgtgcctttctggatggttcctctgctggtgcagtagcctcattagggaagttgtctggggaactactggccatagaagctgagtgccttgagatctctggagctctctgcagcctccagccactggctgtgaatttcacttgcccatgggagccttctctgtgtgggacacgtggtctgaatgcagtagcaagttgctataacaatattctgcttctctcttctccctttcttgctttctgtctcatgtcttcctgcctcctttccttctctccattttctcctctgccatagtcaggttctgctcggggtgctaagggccaggagtagaagggcctgaggattaaagatgagatgtacctactagagggggcaggagagagcaggggagcaatcctggtgccctgggtctggaggagatggggacagggggctcgggggttttcagacaggctggcaacccagctgtaagcttgatgattctgttgctcttaccccaatcagtagccactttagctacacattggaaactcctggaaagctctaaaaatacagatgcctgggtcctatcccagaggttctgattggtttaggaggcagttagggcatcagcagtttctaaaactccccaggtgattccaacatgtagtcccaaagtctttaggtgacggcagccccagccagcatcctaaccacaacctcctgaaagaccctgagccagaaacccccagttaagttgctccccattcctcaccatggaaactgtgggggacagtggatgtgtattggttaagctgctacgttttgggataatttgttgcacagcagtagatgactaatacagattattagttgtcctgaatgtacccccaagccgatcacttcttgccacctcccatatcatatcatctagcctccagaatccctctcccggaccattgctggagcccctccctgcccttcctcttcccctcatgtccctgcccctcagaggtcccacagaagcctgagcaactgtctcaaatcatagttctaataatgtcactccatcacttaaaacttcatcatgggttaccactgtgcttagggccgagacctgatccttcacgtgaactggaaggcctgtgtgggctgccctcacccacctctttctcagttcattccgacagcctccctcaagccctgctttaggctctgcattaagcccgctaggacattcttttagtttctccaccagctccctcccgtcacaggaagtacacatgctgctcctcggcctggaatccttttccctgccccacctcctggcctggggctgacttctctgctacagcctctcccaggagcctgcccctgaacttgagcgtccttgtctcagtgaacatttacacattccctgggacagtcagctgatgaatgcctcttgccctcactagacagagatccaggacagtgaacatttttggtctttagaggcccagtcctacctcagacggttcctgaaacagaagagatgtcaatatcagaaatgaatgagtgggtgaataagtgagtgaatgaagtagtgggactggtagggacaaacagagcccattctggaaaatccaaagtggtgagtggctgctcggaaaggtactcaagttcagaagccaggcagtgactgggcatgagagaatttcagtcccaggaatgaagcaagagctcagattgagagcctgaggtcagagaaggtccctttccaggctgactgggggctgcaccccagggctcctgacctcaggcccctcaccttgcatccatggagggcaggagtgtccagtgccaagcggggggattcataggagccaggggttcactggccctacctgtgggtagcagggagttgcaggggttaggagcctggcagggcatgcagatacagtcttggggccctaaagcagagacagtgtgggtggagagaacaggctggcccacacactgaagcggtgggtcatgcagtgatttgataaacccaaggctgggtgattctagagagagggcagtacccggcgtcctctggcagctgttctgtgtttaatggagaggtgcaggcttcagagcagggaggaggccttgcagtggagtggcactgtggccttctcagaagtggggaccagcctccctgatgggacagtgcagacccacattaggcttaaacaggtcacatggactcaattaaatgctgagtgagaagattcttccgagtcatccgtttacctgcactcccttcccaattccatttgctttccacctttttctctgatctccttttcctcctccaacccctccccttctccccctatgtcttgcaggcatggataaagactgcactcccatgtctagtgtgtggacggaggttgtgtgctcagtcagttgcaggaacgaagccattgtgatggctttattggagtgacaagtccctgtcactctcttcaccacagcaccgtgaaccagctgggagggaggttgtgggcagacgcgctcgtctctgctgttcagacagctgatctgacctggcggcattttctcctgctcagcatgagtgaggctgtccccactgctggctttccctcaaagccatggatttctcctggctcttagctttatgaaaaatgtgggacttcctagaacttgaagtctgagttgaaatattaacattcttgcatttggctgtttgcttcccaaagctgcgtgggagcctgaggagtcattggtctcaccctttgtgacctttacactctccatcagcccgtgcctgtggtctccctaaagggttcttggtccctgtcctagattatcaatcatttacttaaaactgtcctctgagtgtgaaccactttgctgctaccctgataaaggcaagcagaactgagcccagtgctcaaggtgtggtctgagatggacgacagagagggattgtcccttccttcattctagatgtgatatgttttaaaaatagttcctggccacgtgcagtggctcacgcctataattgcagcactttgggaggccaaagcgggtggatcacttgaggtcaagagtttgaaaccagcctggccaacatggcgaaaccccgtctctactaaaaatacaaaaattagctgggtgtggtggcgggcacctgtaatctcagctatttgggaggctgaggcaggagaatcgcttgaagctgagaggcggagattgcagtgagcccagatcatgctgctgcattccagcctgggtgaaagagtgagactttgtctcaaaaaaaaattaattaattaaaaaaaaaaggagcagggggcggggaaggggggggggcagtggttcctagtcttaatcaccctttgttaattgccttgctcagttaatacattctggtctcctaaccgaggggaaaatatccaagccattaaaatttttttctcacaattatcaatcatttacttaaaacttatcctgctttgtttagaatgtggttctctaaacatgtatcagaattacctggagagcttgttgaaacacagggtgctggaccccaccctggagtgtctgattcagtagttctgggtagagctggagagtttgcatttttagcaagttctcagatggtgctggtgttactggtgcaggggccactgtttgagaaccactgcttcagggacatgctttctggcacgaactcacatggatgggccacaccagttcttgtagcgggggtggggaggaggtgtcaagtcaacaactattgcctccaagcctcttatcgcagattatttattccaggggctctgacccatccattctctccatgccgaatgtcttcggctccttgtggatttgttccttggccaggtcctggatccgctgctccagaaacagggagagttttcccctttgggtagccccagaggccctggcctttagggagcccagtccttccttacctcctttccagcagccgttggtgcctgctcacagcactcctcactccctgtcaatctgtgtctcctgccctcctggggctcccttccaggtgaggggcagccttctaacctcccctgcccatcattacccatctctccccatccctcccaggatgcccagagctttcagcaaatcagactcctggtggctgcctcacttggcccaatatgcagattaggcccccaggggcaccccctgccattctttgtgtgtatgtgagtgtgttgtgtgtgtgagtgtattttattgggaattaagagttattcctttcccagaagaatgtacttctatttttataaaggagattaatagaaaaaaggaaatcattttgcagaaatgtagttaatggcaagatattggctccagttttttttgttttcgtctgtttgttgttgctgttgttgtttgagacagagtcttgctctgttgcccaggctggaatgcagtggtgcgatcttggctcactgcaacctctgcctccggggttcaagtgattctcctgcctcagcctcccaagtagctgggattacaggcacgtgccactaatgcctggctaatttttatacttttagtagagacggggtttcaccatgttggccaggctggttttgaactcctgacctcaggtgatccacccgccttggcctcccaaagtgctgggattacaggcgtgagccaccgcacctggcctggctctgttttaaacaagagataactgcagttccagaaggaaacctaggcatttataaattttcttagtaaatcttccatcagtgcactaaagggtctttctacccacttaaggagcatgtaaattgttttcccttgtgaggaagatctattacattatttcttttccatgcttttgtcactttaaaatgccatttataatattactgactgcctccatttgctttccccagaaagtccattaggataaatacttgaggtgagcatagactccttggtgctgagattatgggcggtgagtggctgacctcactgaccatctgttctggcctgttctggttcatcgggcctccgaaactgtccacatctggcagaatccagaagagccagccaggactgggaatcacacttcagtttcctcatctgtgaaatgaggggagggatgagatgacctctagggtgtgttttgtctattcgttttgagttctgaccacctataaaacattttattctgccatgtttatatatagctttcatacacacattaatacacacatgtggataccaaagctactgcagccttgatgccttgccatttgcctgggaatgatcactccaacttctaagtggtgtgtagaactttagagtttacaaagccattccacatattcagtgtttttgctgagccttgagtcaaccccatgagctacttgctgtattgcccccatcttataggtgtaaaaactgagacttgagagtttgggtagtttcttggaatgtgggtgccatgcaagtggagagccaaggctagactgtgcgtttccaggagctcacgcattgagctcctcccaggagggccacatgtgcatgttttccctgtttaataatgactgttgttccacaacacctcgtgctgctcaaaactcatcatggggcccacctgtatccagaaggatttgagacagcagaaataaactctaatggaaaagttaactttttccccccattgactagttaccaatcttccatcaaattgaggtaaaaacgaaggatggacaaggttcacgctgactgtgacagcatctttctttttacaaaacattgatcacaaggcatttcaagcattcagaataaaataaacacccaaggacttgctagccagaatgattacatgttcacatttgctccatttgcttcatatttctgtcaaagaaataaaagatggcagctcccatcacagtctgttttgtctcccttccttggtgttgaccatcctgtgacatttaaggccagattatccaaaatgctctgatgtatacattacaaggatccaccaagtgttgaaataagaagttcttttttattgtgatacaatatacatagcagaatatttatcattttagccatttataagggtacagttcagtagcagtatgttcacatgtttgtgcaactatcactactgcatctgcagaactttttttttcattccacactgaaactctgtgcccattaaacaatcactccccaccccctccttccctcagctgctggtaaccaccattctactctctgtctctataaatgtgactaacctgagtatctcatatgaatagagtcatacaatatttgtccttttgtgtctgccttatttcatgtagcatgatgtcttcaaggctcatccatgttgtagcatgtgtcagaattttattccttttgaaggctgaatagtatttcactgtctgtatacaccacaattcatttatccattcatcgagcagtgaacgtttgggctgcttctgccttttagctgcagtgaacaaatgttcttatgaacatgggtgtaaaatgtctgtcaagtccctgcttccaattcttttgggtacgtgcccagaagtggaattgctggatcatgtggtaattttatatttatttttttgaggggctgctatactgttttccacagcagtggcagcattttacatttccaccagcaacacacaagggttccagtttctccacatcttcaccaacacttgtggttttgctttttggtaatagccatgctaatgggtgtgaacaagaagtgctttaagcatctcctaaagcggaagaaactgaggcccagagaagggaagaatcacacgagagattgaggtcacaagcaagtcagtgatagagcaggacctggaagctggatcccctaaccccagcctagttcttgctactaaaacccaaaatccagtttccattgctatatgtcagagggtgcacagccatggccacaggccagatacagactttaagtttatttggtttgatccttactttcttttttttttaattcaaaatagtatcaacatttaaaaattaggggattttatattttaaaagtctaaatttctgatttctcccctcaaaaatcagaaggtctggtaacccttgacccacattctaactcagcaaccaactattactgtcttttgttttgttttgttctgttgagacaaggtcttgttctgtcacccaggctggagtacggtggcgtgatcacggctcactgcagtcttgaactcctgggctcaagcaagccccccgtcttggcctcccaaagctctgggattacaggtgtgagcccacgcccagccctatcattctgtaatatccttccacacaggctagttcacacactggctggtcctggtaacactggagtttgcagccctttgcttttcacatccatagatattcctcattctgagtgtcagtagacacatagttacgtgtaacatcataggcaggttccatacttctttcctctttcctttactctatattgtctttgaatatcttagctatttcctcaccataaaagtgaaataatgttgcaaataaatagtgcaaaatattaacaaagacacaattgaatagcctgatttggagacagtgtgatgtggtggagaaacaccagcaaaggtgctaatcttgactcttgcaggaactccctgggcaatcttggaaagtcccttccctgtctggcctccttgtatccatgtgtcagttgcagggtgggactgggggatcctcaagtttttgtggggcggtctagttaataatgtaaaacaaaaccactcactttgcattgtcggtagagaaaatcgctttgcccaattgacttccccagggtgacccctcggaactggcccttcctgtggtccccagcacacccaccctctgctttctctttgctgacaggtgcggaatgacctgactggagttctgtatggcgaggacattgagatttcagacaccgagagcttctccaacgatccctgtaccagtgtcaaaaagctgaaggtaggtgtggctagccacagggtgaatggcagactgatctcaatgccctgggtgcccaaattacctgactatgaaagagcctcaagtttggtctgggtctcaagttcatttccaccttggcatcccagacaggagaagctcccaggaattggcttcccttggctttcccttccttgctctccaacactggccagaggtgctggctgcaggtgcacagccactgagcactttcctgatggttttatatctctcaacgcagcctcaggggcaagcagggcacacatgattgtcatgtctgttttgaagagtcacagagagaggaactgtctttcagaaagcccacagcaaagaagtcttcttgttgcaactgaaagcccaggctcctgacccctatccggtgacactctctttaggaacagaaagggtcaacgagaagtttccccagttgtaagtcagtctctaattttcatttgtccattccttctgcatactctctcaaacagcttttacgcaccagaccctctcttgggctcatagacatcatcggccttgaccttgtcctcaggttactcccagcatggtgaagaagacagagacctctcaggggaaacaggaacaaaggggcctgggaacaaagggaggaagtgactcatcccacctggggagagtgctcagacaaggttccaaaaagagacaacatttggtggaggaggaagagagggatcccctcctacaggagcccagcacggtaggagggaagatcagagggtagggtagccatgctcatcatggcttagaatcagcaggaattccacagaggcagaagtacctggagtggggtagaagggaggctgaaacagaagtcagttcccaggagccttgaatgccaagcttagaagtttgatatgttatcctggggacttcctggaggtttgtaagcaggtgccagtgtcatcagagctatcaaattcctctttccctctcctccattccttcaggccctcacttaaagtcattagcatggagaccccagatgccaactgcagatatgtcccttctgtcttgtgtgggtcccaggttacaccagtcagagcaggtagcagcttagagcagttgccttctaaatcctccagttcacagatggggagcccaaagcccagagaaggggagcaagggaagcaacatatcagttgtctaccacctcctccagagcagatacagagcctgcgggtcacatttcagccttgggagcctctgcagatgaggacacagtagtcagggaagggcctgcttgacagcccaggtggctggagccaggtctcccccctgcagtgtcacaggctgtgttgggcctggaggattcaggggtggggtggctgctctgcaggaagcatctggggcagggttgggagaggaggggagggcctgcagctgcgctgacattctcctgccacatgcagaggcatctccccatggtgggcacttgaaatagctccctgagctccagaggcccagcatctatggactttaatgtttaaagaacctttgtgtgcagagcagagcaactggagatggaactggactctctacccatcaaccagccaactccaacagaagtagcaacgacattaaccataatgaaaataacagccgaaatagccacctttccagtgcattgaccacaggccaggccctgtgcagagcccttcacctttatttgctcaattcgtcctccccaaagccctcagatggagggaatttttgtatccctgtttcacagatgtggactcgagactcaaagaggttagcaactaccccaagacacccagctgaaaaatggtgggttgggattcaaacccaggtctgggcaatgtcatggcccagctttctccactgctctgcacgtacttctgagaaaggatttcagtatcacataagccaggagagcagcactaatgacagagtactcatctgttggcaaaggctcccctcacccagacacctgcacagctccttcttgtacctcttgcagtctttgtccagtcatccccttctccccgaggctttccctgaacactttatttaaaaattgaaatccctgttcctccaactcccacttgtccctttctgctaattttctcctccatttcactgattgatatctattttcatttcctgggactgctgcgacaaagtatcacaaactaggtggtttataacaacagaatgtactctctcgaaggcttagggctcttccttgcctttctcttggctgctggcgtcaccagtaatccttggcagtttgtggctcaccactgcatcacaccaatctctgccacacatggcatgtcctctcttctctttatattgtctttttaggacactgatcatgttagataagagcctcccctattctagtatgaccttgacctaactagttacctctaacaatatctggacttctattcattttacctggtgttttatcatctgtctcctcccattagaatgtaagctccaggaagcagaaatttctgtctgtcttggtcactcttctgtttcccatcacctaaaacccaacgtaatttgctcaacaatttgttgagtgtgtgtgaatgaaataccaagtctggacaaagtgcaacagaggctacaaggacataatactcaggaacaacgggaaggtagttacttttggaaatctcagaggaaaagcaagtttctgatttattgtgggataagatggagaaggaggtacagaggacagacaagaaaaccagatatcaaatagtagaactggagtctgcattggaggtagtagagagcagaattaaagccgagaaatataaaaatcagtaaggtggagggcaaacttgagatactttcccagaattcagaggaaatcgccaaatagatcaatccagtgagataaaggataacagttgtggatactggagaagggagttttcctaagggaaaaccaggacaaaagaaacagaatcaaaatccaaaacagtagaaacagtagcaatgagcacacctaacacccagattttggttcctaacaccattctccagtaaaaggaaccagggctccttagacaaatggctggttctatggggcaggaaatagacaagatgattctggagtattttgtaataccagaaggtaaggaataacacacatactggtggggctgtatcaagggagtacagttgccaattgaaagagctcccaatggccaaagctggaacaatttgaacacaaaaaattaaagtagtattagaatataacccaaagtataaaataaatctccacaagtttactattatgtaaatgattgactaataaatgggagaatataggcaaacctcctacacagaagaattcaaaataacttacatagatacttcacactccaaagaggtaggtcataactacacacttcttaagttacttccttccaaagggtacagtaggagaaggggggataaaaaagaataacttgacggtcgagaaacctgacaaacgttcccttagcgaggcaatcaaggtcaacatcagcagtgataagtcacattgaaagctcccttgacatgatatgatgggaataactttacctctgtggtcttcttccccaaatcccataaccccagtctaaccatgagaaaaacatcagacaaattacagttgaaggccatcctacaaaatacctgaccaatactcccccaaactgtctagttcatcaaaaatagagaaagccttagccaaaaggagctgaaggaggcatgacaattgaatataatgtggtatattctagatgggatccaggaatagaaaaaggatgtttgagaaaaagactaaggaaatctgattaaagaatgggtgttagctaataataacatcaatatttattcattgtgacaaatgcacaaaatactaatataaaacattaataatagggaaaactggatgaggggttgtatgggaactctgtatatagtctccacaatttttctgttttcaaataagaattttttttttttttttttttttttttttactaggaaacaaacttaagcgggctcaagacagacctagtactgtagattgggccatacaaaatttccattattctacagtttttgaactacaacaattttatatggaaatgtacagactatatgagcaaactagccagcttctgcattctagcataactggtgaaaagagagtcatacttagacaggttttgccaaaattttgacatacttagtggagaaaatcttacaaatatctaggccaggaaaaaaacaaacttcccatagagatgcaaaaaccaggccactctctgactcctctgaagcattaaatcccagagacagtggagcaactgggaggtattctgcactgtatggggctcacacgatgttccagccaggtccccttcttgaagctaatcctgaagtctgatgtcaaccagccaaaagcgatggcatactttacagctgaggtcatgacagaaacggctgagcagggatcattggaacccatggaaggaaagcaaagtctaaataattgttataaaagtgtatgcagatgcaaaaattacatataattttatacataatgcaaaaatagatacggcaataggcataattgagatataaaaatccaaattaccttcacaggcctaagaagagatgaattttttaaaagaagggtgcttaactcctggtgttaactaggagagggactcaaaagagaccattttgctcatgagtttcataattaggtagatataagctaaagaatgctttgaatgactcagtggtaaatataccataatgcaaacagaacctgaagctgcagaaacacaaaaataaaacaaaggaaatctcatccatgtttcgaaacagaaaacaaacatgaaaaccagaaagcacaaaacagatcagtgcagaccacatataatgattctgaccagaagttcaaataggccaaactcattatcaaaaggaagagactttcagattgtgtttcaaaaaacgaactctagctatttacatcagataaacaaagtgacactgaaaggttgaaggtaaaaggttgagcaaaggtctaccaagcaagtcaaactacagcaagaatcccagtattcatatcagaccaaagcgtgttcaagatacaggtgtcaaacaggattaaggagagtccttttctatagataaggcttcaatccaccttgagaataacatgctcacggactattattgctttaaattacatctcactgaaataaagaaagaaaagcctgttaaaaatagagacggaaattgacagaaacacaatagcattgggaggcataacatctctctctcactcttggacagttcacccaggcaaaaaaaaaaaggcaagagcacagaggaacggaataatgaaattaataaggctgatttagcagatgtgtatcgaaatttgtatcaagaaagtcaggaaataccatttctgtgtgatgaagtcgcgaggccctttaagctcattccaagcctgttctgaacagggggtggctaaagtttagctgtttccaggcggggctgggaagctgctctgcacagagaccacgtcctgggcactcatagggagagttccaggtgtcacatttccctttctggacatttcagttgcttcatgcaccttccccaaagtggccttctgccctatattcatatttccatttgttggaggaatatgtggtacattatttcaaccatggggcatccacagacccttatgtctggaattgacatgggaggggcagttgcctcagttcaatccgggtgctctggagaccaaatatttttgtggaaagagcaggaacttttaaagaaaatcttttattgtaaaatcaaacaacaatttgaaagccacagaaatcaaatgaatgtctaaatgaatcctaaggcaaacagcacacaggtcagagaactttatcagataccccaaaagtcccttctatccacagccccctgcccccaccatcaggaaccctatgccctacttttacagaaatcatcagcagtctttattccttttttttgtcagaactcagaaagtatagggaatgctgttctagttgtgaccctttttttttattgtagtaaaatatatgtgacataaaatttaccattttaaccatttttaagtgttcaattcagtggcattaagtacattcacagtgttgtacaaccatcccattatccacttccagaactgtttcatcatcccagacagaaactcagaacaggggctttgcgtgtaggtgtgttgctctgtcgcccaggctggagtgcggtggcacgatctcggctcactgcaacctccacttcctgggttcaagtgattctcctgcctcagcctcctgagtagctgggattacaggtgccctccaccaagcctggctaatttttgtatttttagtagagatggtgttttaccatgttggccaggctggtctcaaactcctgaccttaggtgatccgtccgccttgacctcccaaagtgctggattacaggcgtgagccacctgtgccaagcataacaggggcttttgaatcaagtagacccggggttggactccgtccctgccttggtgtcttcctctgtagagagggcactgggccatcccaattgtgtgatggtcgccgtaggcagactgttgggctctctcgggggctgaaaaatcagtagttgatattacgttcgaaacttgagagatgctggaatagagaaaagactaaataataaaacactaaataataaaattagagaatttcagggaaagaagccatggaactctctatcttttaatgaatatcttaaaatgataacaaaggactttctaaaatccaaactttgagacagtaagcaaagctgaaagattgtgagcaattcatttagggtctctgggcccacagagcttccctattgcaggtgaatttaccagaggagtcaagagccttgcttgcctgcgtcagcgctgtgccagcagccacctctttccagagggctcctcttctctctctccatcttatcacagcctcttcttctgacctcatccaacgcttctgcttcaacatcaaaggaggacacttttaagcactccctttgtgcccacagattcatgaattcacttcatccccacaataactctacaatagcagtcagcaaactacagctcatgggccaaatccggcctactctctgtgtttgtaaataaagttttataggaacacattcatttaccacaacgtccttggctgcttttgtgctacagcggcagaactgagtaattgcaacagagactatatggcctatgagaccaaaaatatttactatctggacctttatagaaattgtttgccaccacctgctctgaagataggtactattattatccccattttataggtagagaaactgaagctcacgaaagtttaataacttgcctgaggccatgaagctgattaagtgactgagctgagattctagctcagcagtctagctacagactggctcttaacctccacggcatgcctcccagcttcgtgtccacccacactcctcagtcagcatagcctctcaacattccaaggttactcatacccaacatttttaaatgacctgtctccccccatttcttcttagtaacaaaacaggaatgaaagggctttgcaacttacttgccttaagtggaggagcggttaaaaaaaaaagtgctagggaatgacagaaagacagagataagcagaaagctctcatctttattttttatattgatgcaatatttgggccccagtgcaacatcatgaagaccctctaaattgagccaggctttctactcttaaaaaaggaaaagaaaatatgtctgtgccatttagagccatgtttggctttcttttttgagtgactcacaaaaatagcccaattctccaacaatattagtggggatccttatgcctcacattaaggggacagctttgaccagaaaagctactcgactagtcagcaacaactgagtgtcctagaaccccagcagagagaggagggagacaggataagcccaaggtaaggcctttccagagagggaagtgtcttcatttcccattgctgctgtgaaaatctgaacagcttcaagcaacacaaatttatcttactgtctggaagccagatgtcctacatggatcttgacaggccaacatcaaggtgtcagtgcggccaagttccttctggaggctctagttccagtatctagaggccacctgcatccctcagctggcatccccttcctctatcttcaaagtgagccatagtcagtggagcctttcccacactgtatcactgtctctgcctcggccatgtttaaggaccttgtgaatacatgaatacatttaaggaccctgtgaatacattatcacctggctaatccaagaaaatctccctattttaagatcagctgataaacaaccttaattccatctggaatgtgaattttccctttaccacgtgacataacgtactcacaggttctggggattaggatgtggccttttttgggggactgggggagtggggacagggtctcactctgtaacccaggctggagtgtagtggtgtaatcacagctcactgcagcctcaacttcctgggctcaagcaatcctcccacctcagcctcccaagtaactgggactacaggcatgcaccaccatactcagcctatatatatatatatatttgtagagacagggtttctccacgtttcccagactggtcttgaactcctgagctcaagtgattctcctgccttggcctcctaatgtgctgggattacaggcatgagccactgagcccagccaggatgtggctattattctgcctggcataagacaactacaaaggtaggctttgagaggactgcccttcccttgctccatggtaaagtcctagtgggaactgtgctctccctcttgactctggccaaaaaaaagtccttagggaattgacccccttttttcccaaccagataggagagacctgatgagaactgccactcccacaggccaggagtccatcctgactgcctgaaactgaagttcatacaggcaccccaaggggacgcaaagctgcagaatacacatggtgcatctttctcacaggccaggtttgctcagagacatggagacgaaaaggtattatttttaacttacgacatagatatattattagagtgttaaatatacatgaattttcaagatacaagaataaactttaaagaaatgccatgctttccactgggctgctgtgggctattccctcttcgctcccttccttgagagtgaagcgtatgccttcactgcctttacggacagagtgaagcatatgcttctctgcctttatggacatttccagtggggggtggggtctaagtaagacaaattttagctaaataaaagggactactcattgtgggtatgggatcagtttgtcagagccaggagggactttggagaacattctaggctgaacttctagggcccactccaagtctacagccagacagttggggcacaggactggcctgggcttccgaagccttaggcagtgcccgctggcccaggtcatggccagcctctaacagctcagctgccttaggggtttatagcatctcctctctttatatagcattgtgacatttgaattttcagcagcccagcacagtaggtagtctgcgaggctaggctctgagaaaccaggatgccattgagtggacctagacagatgcatgggtggcaggagattccagacaacccagaggtcagggtcaggctcagggtcgagcttgaccttccttgcaagagtccatgctccacaggcaaggaaggctggctggagggcgtggtccctcatcttcctcacctctgctgtcctgcactcttaaatgcacaccagcaatttcagtggctcaggattgcatttgccatttatatcctttcacttcaacatctgcatgacttttctcagttagctgttgctgcagattgagtgctgagctccagcagctcagacccagtggggtttgcatcctcaactgggaggcggtagataggagcgaggagtcaagcactcaggctctgggaccacacccacccggggcaaggccagtgccaccacctcctatttgtgtgacctggcatcttaggttgaagtccctacaaacagagcctgagatgcttgggaaagtaatttattgtggaagtactcaggagaaggggagggaagcaggatgaggcaggaggagctctgtcttggatggataccagtttagcctggccccacaggggtctccggagcacagacagcaccacagagctgatcctaactttcagcaggggggccggagttttccaccaatgtgagtcagttgttggttgctctctgtggggtgtggggcatggagtggctcccatggccaggaagctccccttagctgagggcagttctccagagaagggagtgagctgtcagcagcccaccctcactgcagccgggcgggtgtaccagccccaaggaggggactgcacctgggaagtttgcttaattctttggaccttgctttgctcatgaatctttccaaagtgagcataataacagcgcccacctcccagggtggggctgacggactgtttagcacaacagctcagaaagggcttgagagttgttatttttatgatgttaggattgcttgcaaactgggggtacatgctagttctttgaattgggttatccttgctaagtgtcatgtgcgtgcgtgagtgtgtgtgcgtgcctgtgtgtgtgtgtgcctgcgtgtgtgtatgtgtgtttagctctctttaagcatcccagagacaaagtggttctagatgagggatgagacagggtcaagaaaaagaaaaggaaagctacccagggtttggcaacattagactcctctccagagggagtttagtgggcctctccctcactcatcctgtcactgttgggggtttgggctgaatacccctccccattttcctaccccattcccaccgctgtttccttccacttttgcccctttcttgtgatagtagcctcttgagggtgtgaacataggtctccatgtatggtctccaaccctagacctggccatctcatttgccccaactcaggtcatctgctttcactccaggaagctccctgcagagccaagtccctggaagggcacaggattttccagaccctgccctctgccacgtttccagtcctttgtgatatcacagctctgatctgtcactgtcatcctcagggatggttatggctgcccctccctaccccctactactgcctaaactgccccaagccctttcagcataagagaatgggcccataccctggcagggaggcagggggcttgtctgaaagcaggggctactgctattcccaaatttcttctttctactctctggactttcaggaaaagatacaagctatgcaacattgaaaagcatgattctggaactttcatgagagcatgcacatgtgtggaaaaactattaagattccccaaatccaaaacctttcccctaacccctgaatcttccagtaagttgctactttagaaaggagaacgcagtatatctgcacttcctacactcgggacacctcctcgtgctctagaatgcacataccctagtttgagaagcacctcaaactgtttatactgctctatggtgccccccaagatccccatccagcctcatcccccgtttggcctctccccaaccctggattccgggctgctcctccttccttccagacttggcagcgtctttccccctctttctcaccgtctagaagcagagtatgtgttcacagcttcctgcagcaggcatgacctggctctgcataggatctgtctccagggccctctaatggtcaaggagaaccaaagtgagagctctggctttcattttggttctgtggagccctgggagagcttgtacctctctgggaagagattagctagatgggggatcccacgggccccatccaaatctaacagcctgggagcactgaacaaagtggtccttgcaactcggttgtcatagcaacaaagacaccaaatggttcacaagtggcagagctggttatttaactgtcagcaggtggtcaggaggtcagctatgaagatgtgggtccctcgatctactcaagaagtggacatggtgagcccagggtctagaccatggggttggtcagatattagtgcagtgatgataatggctactagtgaccaaataagcagcgtaggccaggcattgtgcgtgatgctgcacactggattaattcacttcatcgtgcattcaacacatatttgttgacatatgtgtagcgccctgttctgggagctggggacttagagataagtcaagttacgcttacttcagtggggaagacagacaagtaagtggacttgagccacattggaggcaagcacagggtgatccaggctcacagaggaagaagtggccaccaagcctgatggggcagagagatggtttctcagaacagaggagcctgggctaaggtaggaagggtgagtagcagctgtgcgggcaaagtaagtgggaggagagggaagggcactctggagggatagacttgcagaatgggtggggggcgaagtgggaatatgaataaatgaatgaatgaatgcagtcctgttttaggactcactgccaaggcagggtatgagaaatgtgatagagaattgagcacaagtcagttggtaaagactgcataggatctttaccatctctatctttagcacatcttgaatgtgctaaggagctcagtgtttgatctgcaaacctcaggaagccatggacagatttcacacaatcagacttgaatctaggaatgaacccttcctctgctctgtggcgatgggtggatggggcaggattcatggcaagggtgcagggaggctgttgctgttcactgagtaaggaatgatggtaaccaaactcagggcagtggggctggagggttgggactgattaaggagctagttgtgagcagacagaaccaacagattccagttatggcttggatgagggttgaagaagaggagtgagtctaagatgactcccaagttcctgacattgtcagaaatggaaaacacaggaggaggaaagggcctcttgggaaagctggtggattcagcttgggacatgttgcgctggaggtgcctgagagaatccaactggaagagtctggtgggaaactggagaaaatctgaggctggggggagagatttggagtccacagcacacagagaacagttgtggctggggtcatgaactaggtggcccagggagagtgatgggagcaaagagctaaggacagaacaccagcatttagggatgggcagaaaggtcaggagctgatgatgaggagtatgagcaggagtggccaggcaggcacgaggggagccagcagagagcagcatggaagccaccgggtgagtttcattatgatgaattgacaaccactgggcaaggtagataggattatccctttctcagagatgaaggaattgaggctccaggagattaagaagcaaagttttcagctaatcagaggtggagctgtgatttgaacccaggtctctgacttcaaaatctaataagctgtttttaccataccatgtttagcaacacagggtttggcacaaagtagatgatcaatagatacttgctggatgaaaggatggatggatgcatgggtactgtcagcagcaaaaaatgctaaaaatttttaacgaacaagcagaaagatcttggagcatgcctggaagcaagtccacagaacggaagcagcttagaactttttatagcattgcagacgtggtgatgacaaaggcttgccttccttccactgctctgttaacgatcttttaaagtcctttcagagccagtgttttttttcccctcttctttccattcttgcttgcaaacgaaagatgattttagaatccaggccttctttattttgctaaagtacatgatgagtaaaatggcctctcagtcagcactttccaattttgaaagatgctaaaaactgatctttaaaagcatatttttctactttatgcatcaaagggccatgaggcctgctggaggggatggatgaactgcaggaaggtggcaccacctgcaaggctgggcctcactgtggagggcaggaagcggctgggatggggagcaggtgtttgggccagggcctggctggtctcctggtggccgccccacccgttctctttcagcctgttcttctccatgggacaggacgcagctggatcccaatgccccagaaagcaacaaagaccccatttacctgacccatgagagcctctggctgatgctcagtaattgtctgttgaatgaatgaatgagtcacaggggtcactgtacacattcctattaaccacactgagataatgaatgtaatcccatgtatagagctttcaaaaatagattttccttagaaataaaggtggacactcactatgtgctaggcactgtgttaagcactttacaaggactatttcacttagtcttcccagaaatccggtaaggaacgtactaccattatcctcattttgcagatgaggaaactggggctgagatggaaaaggagcgaccagaggccacccatggtttgttggtagagctgagatgcgaacaaagctcaaagcaagtctgaaacctcttaattgggaagctctgtaggctccaggaatttcttgagggattaactatcaggaaggtagaaagggctagaacactgtgcagggcagcagagtgtggttggctggggtcttgtctctgccacaaactccccaggggccttagaagctcctttctcctcatctggcctcagttttcctatatgtaaagtgtggaagaaagttagatgatgcttccatggactgcaggatttgcctgccctggtgggaggagaacaggggaggttgcaaggcccctgagagcagtcagctttagcctccagcctgtacagacttgccctagggcttgcccatgagaccagggtggactgactgcaggagccacaggaaagccagccctggagagggctagagaatccaggctgggctggggttgggggtgaggttctgccctgcccaccttcccaggcagagctctgggctaagagccagaggtgaaggaatgttgtctgccacagccttgaaccctttatggggtgctgaacatctactcaccttcatgatgtgtccttccatccacaggggaatgatgtgcggatcatccttggccagtttgaccagaatatggcagcaaaagtgttctgttgtgtaagtaaaacagttgtatcattcgtgtctttggggaggttcacgaagctttttcccatactcattatctccctgctcagtctgtgagtgggatcacaggactggagcctgggttcctggaagcagaagagttgcgttcactgttctttcctctttccagggagctaaaaccccagggctcagaacaataccatcatcgaggaaccagggacctcagtctaacccatagtctaagccttgttggctaattctaagtctgctcaacttagccagggagataccagaaatcagggtgaggctgaagtgactcagaccccctccctgccctgtaggtagggctcagagtcttaggttagggacaaattatcaactattgattttctcctcctgaatcctttacagctgtctagtgacagatgacaaaggtgacctttttatgccttatctcatttaatcttttcaataaccatgtgaagcaactatgattttcccattttacagatgaggaaatagagctccatagagtaaagggacttgtccaagggccctcagccaattcatggcagagccaaggctccatccccattaacctgatccccaatctagtctctaaaaaaaaaaggttttctccatatgacttctagcttaagttagatgtaggggacagaacacaggaactaagtcagtttccattttgatgtcccagctcccaatcctccccatcatgtcaggagaaaagtcaacaaaatgaaagcccaggcaggtgagtcactgtctgcccaataagcttcaccttttagactgaggtcattctaggcgtagtgtctggtgacgggccgcagatctctgatctttttgtcagtaatgtggatgaggttataaataggaattctagaaatcatgaaatacattggatgacagagtttgagtgcaaagaactttaacaggttggaatgtttgattaaatccaagcagagtaaatggtcctaacatattatattagaacaaatgaagctgcctaagtccaagtggtagagggatagctgaggagtactgtgtgttgagaagagaagggactttggatgttccagatgacccccagtttactaccgggtctggcaactaaggtcatcagcatgagcacagtgccagagagccgaggtgacctcaaattgcatgtctacacccagggcagggtagtccctctgctctttgctggagagaccccacctagggagacctgcccagctcctggtggcctgttttggacagatgtaggaattgaaaagagacaagcagcgaggatagggtagtggctgcaagccgtggtcacgtgtggttatttgaacctgaaggctcaggagcaaaacgagaactgtccgatcatcttctgatttagccgggagaagggagaggctgtgaggctgacatttcaggggatcttggatggaggctggcactcaggagccaatcagcttgggcttgagtccctgttctgctacttattattgaagttgggtatgttgtttacactctctgagccccagtttctcatctgtaaaatggggattgtaacacctgtctgataagattgttgagcaaaaaccctctgcatagtacctcatgtacagtgaaccctcagcagataccagccatctttttttggttgtttatatagggtctcaggtgtccaaagatggaatgggccaccatttactggcaagttttatgggtagattccacaaaattgtgttaagcattctatttatcagtggagagtagcaagaggtctttccacattgaaatcgaaggaggaccatgagaaaaatagaaaatatagagtgaatagatataaaaattttactccaaaactcataaaaccttgctgcttactacgtagggtccagaaataacccactttaaaaaggaaaataatggtccaaatttgagagcgtgctttcttttacaaaagaaactcggtatcccctctccagtatccccagggccttgcaaggagctggtacatggtgggtgattggtgttgatcgaatgaggaaaacaaataacttcagaaaaaataaattaataaaaatgatctatgaagatgccacaccagaccctggccacctccagtttgcaagaaacatagatgggccttatgttctgatttaagccaaatcaaagcccaggtgtgactgtgatctcactctgccacgcactggggtgagtttccaagtggctttcccagccatggtttctgcttctgaacagatggcatggctgtctacctttcaacccaaagccccctggcttgtctgccttccacatggtacggggacatcatcccaccttctcatcccattttcctcttcactcttgttagttttggcattttgagatgaggtttctcttagagtcttcacttgctgccccattccgaggagtttctcagaggctttgggctgggtatagtgtccatgtgttgggtccccagatggaatctgccctcaaggacttatggtcttgtctggttgggaaggagttcttctggaaggtccagaaggtcctaaggagactgttcaatgttttcacgctggatcaagactgataagtgacagagggaggggacgctcagagcagaggcccccaagagagccttccgatctctattggagtcagagcagagaccacatggaaacaaccatgtctctgccatccaaatgctgccctggaaactttacagcgtgttgctgtgttcttgagattggaactgccacccaatgggatcgcagactccagcaaatgcaaggcctatttatagccctgtggcaaatgttcattttggcatcagcacagtatgagcatggcatgttgcttttgtcttctcctctgtcctcagtggtctgttctaaattctcaagcactctaatgtgggttctggttttagctctgccagctgtgtgacctcaatcaggtcgctttacatctctggtccccagctgcctcatctctgaaatggaagcaatgatccgtaccctgtctgcttcatggggttgtcgagaggcttaaatgaggccaccaaagggaaagcttcatcctaactgttaactgccttactgatgcgagggtttattactattattgttgtaaaccttaatataaaaaggaaacgtctttcttgcatggggagtggaggaggcaaaaggaaacttaattaaatgatgaaattagatttttttttaaattgtgtcatggctacatgtatacagctagtaagaaccaaaggggttcatggggctgaaccgtgtgaactcaggatggcccactctcatgcaatagtacccgtttgtcagtcataggtcctaagaccacatttctaccagatgcagagaaaatggaggtgtggtggctcatgcctgtgatcccaacactttgggaggccaaggctggaagatagcctaagcccaagagttagaccagcctgggcagcatggcaagacctcatctctacaaaaaatttaaaaattagctgggcgtggtatcatctgcctgtattctcagctactcaggaggctgaggtgggaggattgctggagcccagaagttcgaggctgcagtgacccatggtcatgccacagcattccagcctgagtgacagagacagaccctgtctcaagaaaaaagaaaacaaaaatcaaggtgaccaagtaaattagaaatgcattcattcggtcggtccacaaccgttgattgagtagcccctgtataccaggcactgtagaaagccctggggctccaggagagaactggcatggccccaccctcccaaaactccccaactggcagaggagacagagaagcataccagtgcctagttaaaactcatgtgtccaacaacctcagcccttctgaccataggaatactgcaatggagtcctggaggcatttccacagttgcattagacaatggatgatctatccaagcccagtctacctcccttgcaggagagcctcactcaaagcctgcttgcttttgctctacaaatatgcttagcaatctaggcgccctactttccaagtctatagcagtttaaaagcagcaaattcagagtgaggcagaggaacttgatgatagtgaaaaatgacagtgtagaactgacagctagaaaggagacaaaaagccatgaaaagtggatccaaagtctaagtacaactgtctggggccatctggtgtttggggcagtcttctctaagcccaagaacatagcccagaacagtgacttatgttcagaatgaaactatgggttaccaagaggagaagagaatgagaaggggcagctaaaatgtttctgaacatagtgtttgccatgcatgatacacaaattatctcatttaattcttaaaccagtacagtgaggcaggctttgctttcctctgtctgtccatgggaaaagtggggctccaggagttgtgtgcatgagttacctggcaggcatgtggcagaaaatctgctgtttgactgtattatttttttccccaaaaagtcagaagctaggttagaaaaagttttgtcttcatcaaaattgactaatgttctaaataaaatgtattatcattcaaatggaataagcttctgttttctggaaaactcacttacaagaaacagctacaacaggacagtagctggttgaagaactgtcagagctgatctgattttctgctctgaacttcctgctcagtgctgcctcttaattaattaccacatggtcttaattatcacatgtgtgaagaaaatctgcctttgtgtctgatcagaaggccttttcatatcctcactctgagtttttttgtttgtttgtttgttttttgagacagagtctcactctgtcactcaggctggagtacgggggtgtgatctcagctcactgcaacttctgcctcccaggttcaagcaattctcctgcctcagcctcctgagtagctgggattacaggcatgtgccaccatgcccagctaatttttgtattttttagtacagacaaggtttcaccatgttggccaggctggtcttgaactcctgacctcaagtgatccgcccacctcggcctcccaaagtgctataggcatgagccaacgcgcccagccactctgtatctactgattcttacttcctcataagtggagctgtctccttgccacaaccttataagattgagaaaacttccaaaaatccttttgttttgttttactaagagcggaacttcaagaatggactttgagtcttgtccctttgacttaccagctatatgtgttgagaaaatttcatctataaaatttagataatagtgcatacctcatagggtagttgtgagaataaaataatatataaaaatagcaacacacataatgggacctcaatacacatgagatctctgtcagtaaaagatgagagttgtgaagtcttacaggctctgccattgattaaatgacctgggattactagggtgacccttttattcaaaagtctagtccccagccaggatctggcatttcttttcttttcttttcttttcttttttttttttaaagtttctgtggactaaatttcattcattagagagaagccccggagactgcctgcttttcttcagctgggattttgttaggtaattaaaatacgagagttttctgtattttccatgacagttttgtttggggcaacattgtaatgtagttgctgcaaaaatgactgtgatctgaggttgcattatgagaagtacagtgtctaaaatgagggaagcgaaggtcctgtatcatcgaaggagtctagtgaagagacagtgtgatcactgccttgaggtagttgaaggggtcttttgttaagcaatgtctatttaatcttcagataccttgccgaaccaatggatggagaccacagagaggggatctgagcttaagtcaaggaacaaatcttttaactcacatgtaccccaatgagctgctccacactgcagcctgggctttctcaggtattaagggtgttttagaggagtagcctctggacttgggatgaggagagtgcccctctgactgttagaattgatggtaacttttctctaacatataggagttgttgggagctctggcctcccttctgtggacagaccctcactttagcctcctggagcctaagtggaaggcagcaagaaccttcccagggtccagagcaatctcaggcttctctccctacaccctcctgtcctctcacattaaccctgctgtaggccaaggggtgcgacatgaatggttccccaacatctcctaatgtgggtgactccccaggattgaacggaaggattgtttaaggtttcagtttagaatgcgggcagtccatcaatgcacagaggaaatttccatccacccctgctctctgtagtcacttctgggtattttgtttacttacgggtacatgaccaccacttagaaactttattctgaacccaattttgatggaacctgacagtcctacaaactgggacttttctgcttgaatcaaagctatcaaaaaccatgattttcctgatataaaataatgacaataagaattagagtcaagtaggggtgcattagaaccttctgatgacttttctttaaatggaaggcaagcagtgtagctttgtacccttaaagtcagcagaactagatccaggcctgacttttctccctgactgtttgaccttggaaaagttactttccctctgattttcagtttcctcctctctagaatgaggatgataaaccacctcccagagtgaatgtgagtgacaatcaaataagatccatgtaagatataaaaatgtaagggaatttttttaggatctgaatttatacactctgtgttttggataaagattcagagcgacttctcggtttgccaagtggcatcttatataaactacacacttagattaaattgccttggccccttaaaaattattccccctgggttgtgttatgaggcctcagcttttagtaaagatctatacaaaaattagctttatgaaatctctttgttgtagaagttgtgttgatactaaactggctaatttgacagtatcctctccatatgggacatttttagggttagagactagaaaatactttgtttccccaaagatctggtatgttttctccttattgataatgagagttgtgtaaataaccttgttgcccttttctcttgggctgctgggaagttcatggtgaaatttgcagctaatgatgaatatggttagaacctttggtctgtctacattctgttccttctatcttcaggaaacataatttatatttttatgggcccttatgttttaatttttattcagtacttattattttattatacatgttatccataaactaccttggatcctttgataaatagcaaggaagaaaccaaacaagtaattaaacatttcctaaatcctctgggaagaggaagccttcctccccacctgtcttccagggcacagagccttgaactgtgcgactctcaatgccctcatagtcactccatcttttacaggcatacgaggagaacatgtatggtagtaaatatcagtggatcattccgggctggtacgagccttcttggtgggagcaggtgcacacggaagccaactcatcccgctgcctccggaagaatctgcttgctgccatggagggctacattggcgtggatttcgagcccctgagctccaagcagatcaagaccatctcaggaaaggtcagtgccttggtccccatttcaaccttctggcccacctcctttgatcatcttgtctgatgacattggccaaaagagcacatttattgtcctgtgtcactttgagcaaatcacttgacctctctgagcctcttgtacctgtaaaatgtggtatgtacaaccctccactgcttacctctctaggcaactgtgagacccaaatgaggtaaggatattgtgaagcacataacacagtacacatgttatgtatacatatatgaataatagagtcctggcatcaacttcagggccctttagactctgtaaaagttcatcccgtgctccttttacctaagatgtcattctcagttgtgttgatgctctcctggaggagaggaaagacgccttaagtagactttgggaaacacatgctgtagagctgccagactgcgtcaaaccccaattttaccactaccacctgtgtgaccttgaacctgagttctccaagcctctgcttctatatctgtgtggatatatatttttaggggccactattcagcatactgttgtgatcttaggatgtcccttctatagatatatcttctatatctctgcttctatatctgtgataacccccttctgggggttatcaggaggattgatggcaggtggtgcaagccactagcatggtgtctggcaccttgatgctgtcacgactgtgagcaggaccttggacagggtgtgtcagcctcagggcctctgcatgcttccatgaggagtgttactaattcctgccctgcttatctcatagggctattgcgaggaccaagtaatataggacatgtaaaagtatttccaaagcacaccattctctatcattgtaagtcttatcaaagatcaggtgatgatagccctggtaaaggtggtaacatccatttctcaattctgaacagcagccaaaattcagcacagcaatgcacataagtcttttctgagttcagaagttaaattattcactcaacccccagggttcttacagaccaaattttatatcaagaaaaagctttataataaggaaaaatatatgtatataattttatgtattatttaatctcaattggaaccaactctacatgaatgatttatcgatttgtcaagaaatggcaaatcattaggacatattttgtaaacagctctttagctcgtactggcacctggttagaaaatgttgaaagaaatattttcataccaaaatcaatgcatatataacatttttttgagatgttgaataatgagcagaaataactcatttattcagtaagtgttatttttaaaggtgtcaaattttgcaatttattaagatccttgggtccagggataccctgtattttaatctaaaaatatcataaaaattgaggaaaacacaaaacctaagggaaaaaaatatccatgaaagcagatggtacagtaactaaatggagaggcttcaggaagaccaaagacttaaatggttgcacaggagatctgtgaggctgtcaggatgagagccatgagacactacaggaaggacctccctcggatatagttctaagggtgtggctttcagccagggtgggagccatgcagggctgtgtgcagggctgtgagcagtacacgagagtgcattgtaggaagatcattttttgtagtgtatttgggaggaaatgttttggcatttgtaacaacatcccccagatcactgacttcccttttctaaattttcttattcgggattggtgaagaggctgacctcttgcccatcactgtctcatgcatgggacaccttgggactgttcacctcacagttttggaaaacccactcataagcccaccccctggaggggacaggaccattgaggtggcttccaaaagtccaggagacccaatccctgtccgcatggtctttgaagcaagaggaagcatttcttacattaccccacagttacgagattgttaaagttacacaaggaaatttgaagcctcttcgcttcttggaatcagagggtcccagagctgctcttagacattatggagtccagcttcccatcagattctcagatcttccagtagcaaaggaattctctcctttaattctgccacccctaggtcccactggagctactcagatcctattgacccatctgtcccacatagtccttcagtgaccacagagtcactgcttctccaaactaaacagcgctagtccttccaattgttagctcacaggtccagggctgggactaagcctgaaatttaaaagggtgccagatacatcggtaatcaagattaaacaaaatatgttaatgcaattaaaataatgccaaaaaaaaaaccccatgatgaacaaattgtcaaaattttaaataaagaccagattcacaggacagggattagggtgaggaaagtgaggtgagtcatgccagtgcaaggttggattctatctttatttaaattccgatgttttgttcatcatggatttcttgcattcatttttatttttaaaatattaaaatatttttatcttgattactgatagggtttagctctgcgtccccacccaaatcttgtcttgaattgtactcccataattcccatgtgttgtgggagggacccggtgggagataattgaatcatggggacagtttcccccacactgttcttgtggtagagaataagtttcacgagatctgattgtttgataaggggaaattcattttgcttggctctcatcctttctcttgtctgccaccatgtgagatgtgcctttcaccttctgccatgattgtgaggcttcctcagccacctggaactgtgagtccaataaacctctttcttttgtacattgcccagtctcaggtatgtctttatcagcagcatgaaaatggactaacacaattaccaagattttttgactctcccttaaattttgcacctgaaagtagtgctttattcacctagtacagccctgcacaggttgtatttatcaaacccctccccatgctcagcctgttcctttgttgcacttgcctttgttgaacattctctctagagggtgtggggcccagagttgaataaagtattcctatttatggtctgaccacaagccaacttctccgaacagccttcagaagtctatggtcaaacatagttctagagagtcaggaaatgtttcttgaatttgaatttgcgttctatatagctgcttggggccacggtcagcatggcactggctgctggattgatgcctgtattttgggatccatcgatgtccatgaaaacaagcaaacacttgtaaaaccacagcaagtgaatgggctcttgtcatcctcactattgtacaaatggaaaacctaagagccagagaggggaagggacatcccaagatcacgaaagtgggttgaatagtggcccctaaaaagatatatccacattgtaacccttggaacttgggagtgtgaccttgtttggaaaaggggggttttgcaggtgtaattaacttaaggctctcaggataagatttcctggattacccaggtaggccctaaaccaacgacaggtgtcctgtatgagagaaaggcagagggagagtttaggagagaggcatggagtggagggatctctcttagagcttccagaaggagccaaccctcatgatggggtttggctctgtgtctccacccaggctctcatgatgagatttcctggattacctatgtgtcaggggagggacctggtgggagatgattgaatcatgggggccatttcccctttgctgttcttgtgatagtgaatgagttctcacgagatctggttgtttgaatgtgtgtgacacttcccccttcactctctctctctttccttctgccttgtgaagaaggttcttactttcccttccactgtgattgtaagtttcctgaggcctcctcagcaatacagaactgtgagtcaattgaacctctttgctttataaattaccctgtctcaggtggttctttatagcagtgtgagaatggaccaatataactggcaatgcctgaatttcagccttctggcctccagaactgtgagagaataaactgctgttgttttaagccacccagtgtgtgggaacttgttggcagccccacaaatctaatacaatcatccagcaggtagaggcagatccaggacttgaagccaggactcctaatcccaactcagcgccccttcccctctgccatgctgctcctctagacctgtgacgtgcttagggacacatccaaatcagctcttttgtggcatctcagtgggcctctgttgttacgtgacacacaggagcacagagtgtggtactccagagatccggtgtggatcctgcgttcacaccacttaatctgcaacctcagcaagtcacattctctccctgggctaggtaacttctagggtgctttcacagctcagttctctaactttgtgtaactatggtgtggagttattacagcaagctctgtgacatggttatgatgttaagtcatgcaagtgcaaggttggattctgtatttaaatttttgatgttatgttcatcatgggtttcttgcattagtttttattttttaaacatgacactaaaatatgcttatcttaattactgagatattttggctcccctttaaattttgtacctgaaattagtgctttattcacttcatcctagcacagccctgcacaggttgtatttgtcaaacccctgtcctcttgtacttgctcttgtcagatctcccaggatacagctgactcccgatagacaaagtcacagaaaagggcagaacagtggcacctcctggatgcattctccaaggttccctcctttgtatgcctgtctctagcatccagctgtccccagctcactcattagcaccaggagttttctggtaggaggaatagcaaggtcacgggctccctccagaagcacgttcttcagtcctttcccattggactgtcctgcgttgggacttggaccttcaggctttctgagcccattcagagctcaattttctgggacctcatgaagacagcccctggactcctgctttgggcccaacattggctccttctctccactgaggctccccatcactgttctactcccgcaaagtgacttgacatcggtgatttcaagtgtcagcttccatttttcaagtcctgttcgttttgtttcctttgtgagcatttataattctggcttgatttctccagcgatggctcagcctctccaatagggacattcttctcctgttattgtgcccctgctgaggctcagtgctgggccaaggccccagatgagctgttcatagcaccctgagacctctggagtagccctagccctccatcaaaggcacaggtccatcctttggaagactttgtaatgttttctggcaagaaacttctgtgaccacccatgattatttattcaacccagcaaatctagtgatccttccacttagagccaatggcccatgaaaatctgcacccatctcattaccactgcgctgtgagcaccgtgacaaagaacttggagttttagggaagcactgagcttagcacggaggaaggaaaggtgctgcggaaaaatagaactccccagagagcccagcttcacagcgctgctctctcccctaccccccacaaagctcccattccttgctactcccattccttgctactcccctaggcactcatgacactgggagaaggcactatgtcagaggggcatgggctcagaaggaaaaggctgactggcccatggaggggccactggctagacttgaatcatggccccaacacttcccaactgggtgactctggcaggtggctggtcatctataccaacatccatacctctcctcccctcttctaagctctgtaacacaacaaaccagagttcataacgcaactctggtttttaaccgggtatgttgccacctcactggaaaatgtattatacacttcccagccttccatgctagatatggccgggattgcaagtctggccaatgagatataagtagaagtgttatgtgggacttctagaaaggctctattaaagggggatatggcctttctttttcattctcttttgtgttgactggaatgtggatgtgatggctggatttctagtagccattttggaccattaggtacaaggtgaccttgacaaggaagcatcattctaggattgtggagcataaagataggaccctggatcccttattaccctggggagctgtcatagctgtattactcagcctccccacagacatcttttatatgagaaagaaataacctatctcatttaagtcactgataatttgttttttctgttacaatgcagctgaacctaagagtaatacagtgatgttgtgcaagtcatttaacctttcccagtttgtctctcatctgtaaaatggggataataatatctctctcacagatttgtaaggattagatgaggttatacagtagaaagtatcttaccaagtgcaaacacatagtaggtgctcaacaaatattaattctcttccttttcaggataggaaccttaggggtaggaggaaggagtagtgagatcgatgaagagtttataacccaggtcatgtgagatgaggagcaatggaaggattgggattaccttttatggtttcattaattatttttattgaaggagagcacccatgtaactaccacccaggtcaagaaaaaaactatttgtagcaattcagaaactgcctttatgtgttacagttaatacccactgccagatgtaaccattcttctgacttcctttgccattcagatgcctgcttttgaacttttgaactccacagctttttttagtatcttcagatttagggagtgtattagtcctttctcacactgttataaagagacacctgaaactgggtaatttataaagaaaagaggtttaattggctcacagttccacaggctgtacaggaagcatggctggggaggcctcaggaaacttagaatcatggcagaaggcaaagcggaagcaggcatgtctggagcagaaggaagcaggaggaagagagcaaagggggaggtgctacacccttttaaacaacccgatcttgtgagaacgcactcactagcatgagaacagcaaggggaaaacctgccccatgatccagtcacctcccagcaggccgctcctcctccaacactggggattgcaatttgacatgggatttgggcaggaacacaaatgcaaaccataccagggaagattcgtctttctggtagttattctagttcactcttaaataaacaccatcttctgtctttgccacagttttctcattctgcctttaccacaaaaccttgcatcagggcatgggtgaggcaaacgcagaagtgaaatgtgttaatttttctcttcttattcagtcatctgtaaagttttgatgttctctgtcttccattatagatgtggtatcattttgtatagaatgtttgtagctacaaagctagctagtatagtttgcggagacttgggaaagttaatttatacacagcctccttcatcttcagctacctggaagtcctttaactggtgtgttttaatgaacagaaattctttaatagaacccactcaaaggctatgaagatattttcctatcttgtgttttagaaactctattgttttacctttcacatttagatctataattaacctgaaatacattttgtataggatgtgaggtaatgatcaagattccttttcttcttttctttttttacatggatatctaattgacccaacatcatttattgaaaagtccatcttttcccacactgtgccgccatattacttttgtcataaagcaaatgactttatatatttggttctgtttctaaactttttttttcacatcacgtattgattgtttatttaataagcattttatgctttaatttttcttttttttttttttttttttttttttagtatttattgatcattcttgggtgtttctcagagagggggatgtggcagagtcatagggtaatagtggagagaaggtcagcagataaacacaagaacaaaggtctctggttttcctaggcagaggtccctgcggccttcggccctgtttgtgtccccgggtacttgagattagggagtggtgatgactcttaacgagcatgctgccttcaagcatctgtttaacaaagcacatcttgcaccgcccttaatccatttaaccctgagttgacacagcacatgtttcagagagcacggggttgggggtaaggttatagattaacagcatcccaaggcagaagagtttttcttagtacagaacaaaatggagtctcctatgtctacttctttctacacagacacagtaacaatctgatctctctttcttttccccacatttcccccttttcttttcgacaaaactgccatcgtcatcatggcccattctcgatggtcgctgtctcttcggagctgttgggtacacttcccagacggggcggcttggcagaggcactcctcacttcccagacagggcggccgggcagaggcgccccccacctcccagacggggcggctgggcagaggcactcctcacttcccagatgggggcggccaggcagaggcgctcctcagttcccatttggggcagccggccagaggcgctcctcacttcctcccagacagggcagcagggcagaggcgctcctcacttcccagagggggcggccaggcagaggcgctcctcacttcccattcggggcagctgggctgaggtactcctcacttcctcccagacggggcggccgggaagaggcgctcctcacttcccagacggggcggccaggcagaggcgctcctcacatcccagatgatgggtggccaggtagagatgctcctcaattcctagacgggatggcggccgggcagaggcgctcctcacctcccagacggggcggccgggcagaggggctcctcacatcccagacgatgggctgccaggcagagacgctgctcacttcctagacggggtggcgggcgggcagaggctgtaatcttagcactttgggaggccaaggcaggtggctgggaggtggaggttgtagcgagccaagatcacgccactgcactccagcttgggcaacattgagcgttgagtgagcgagactccatctgcaatcccagcaccttgggaggccgaggcgggcagatcacccgaggccaggagctggacaccagcccggtcaacacagcgaaaccccgtctccaccaaaaatacaaaaaccagtcaggagtggcggcgagtgcctggaatcccaggcactaggcaggccgaggcaggagaatcaccggagcccgaggcagggaggttgcagcgagccgagatcacggcagtactgcccaggctctgcaagagagggagactgtagaaagagggagacggagagcgagagcgagacggagagcgagagcgagagcgagacggagagcgagagggcgagggagagggagagctctgtttctaaactttatctttttcttttccattgtttttcaccaaaacatcttaatttttgtagctttataataagtcttgataactactcatataggttctccatcttagttcgtcaaaactgtcttggctattcttgtctctttgcatttctatatacatttttaaaacagattgccagtttatacacacatacatacatactttctctggtttttattgggattttactgaatctgtagatcaatttagggaaaactgacatcttaatattaaagtcttccaatccatgaattgtgtatatccctgcatttagttaggtcttctttaatttctctcagaaatgttttatagttttctgtgtagaattattgcacatattggctgggcgcagtgactcacacttgtaatcccagcacttggggaggctgacgcaggtgaatcacttgaggtcaggagttcaagaccagcctggccaacatagtgaaaccccatctctattaaaaatacaaaaattagccgggcatgatggcacatgcctgtagtctcagctacttgggaggctgaggcaggaggatcgcttgaacccaggaggcggaggttatagtgagccaagattacatcactgcattccagcctgagcaacaaagtgagactccatctcaattaaaaagaagaaaaaaggattattgtacttattttgtttgatttaattctgggcatttgatatattttggtgaacatatgtgcacattactattgggtgcatacttggggtggaattctgagtcagagtagccatatgttcagctttagtagactctgtgacaaacagctttctaaagtggttataccaatttacacatccgcaagcagtgattgagagttccagttggttcacatgctcaacaacttttggtgtgtcagctttttaattttagccaaactagtgggtgtgtagtggttggtgtcttgttttagtttaaatttgcatttccctgatgactaatgaagttggacatgttttcatatcttcattggccattttgatacccttttttgtgaattgcccattcaagtcttttgcccatttttcctgttggatactctgcctgtttcttactgatttgtagaattcctttttagattctggatatgaattatttgacagttatatgtattatttatatcttctcctattctgtggcttatcttttcactctcgatgtattttgatgaatagatattcctaatcttaatgtaatccaatgtattagtcttctttgtgattagtatatttatgccttgtttaagcattttcaggatggggagaaaaaagtcagaaaataagaaatgaacatatgagacacatgggatatgttgaaaaagtataatatatgtataactgtgtcctggaaagggaggaaagagagactaggcagaagcagtatttggttttgttattttagttttttctgaaaatcaccctgtcttgatgatttggtttggatgttcgtcccctccaaatctcatgtcaaaatgtaattcccaatgttggaggtagggcctggtgagaagtgatgggatcatgggagtggatcccccctgaatggtttagcaccatccctttggtagcaagtgagttctcacgctgagttcatgtgagatctggctgtttaaggtgtgtgacaccttcccccttgctctcttgctccattcttgccatgtgccacacctactgtcctttggcttctgccatgattgaaagcttcctgaggcccttaccagaagcagatgccagcaccacgattcttgattctgcacctggagaatcatgagccaattaagcctcctttctttataaattatctagtctcaggtatttctttatagcaatgcaagaacggcctaatacacccacccatgctcgtgaagatattttcctatcttgtcatttagaagttttgttatatctttcacatttagacatagaatttacttgaaattaattttatgtatggtctgaaataatatatttaattttatgaataatcaattgattcaggactatttattgaaaaggccataatcccccatcccaccactcaggctacagtgtcacctttgtcataaattaaacaactgcatatagtgtggatatatacacaagcttctgaacttccatttatcttcctttggtctacttatctatcttttaatcaatatcaccctgttttaattactgaagtatgatttgatactttgtagtataaatccttaatctttgttcttctttaagattttcttggcactgatgtcatttttcatttagatctactaacacatttacacttcctattacttttttccttcccacatttctatttttctgcttattgttactattatttttctgccagaagaacttctccttggtctttcttttactgtgactcttctggaagcaaatcttccaagtgtctggctgtctgaaatttattttacctttaatattgagagatgtattgactagatagaggattttagatggcctataattttcttttggcactgaagatgtcattccattgtcttctggcttccattgtttctattgagtctgctgtctgacttattgctcttttgaagtaatgcatctttttttcctctagttattttaagattttgtttttgatttggtctttggcagttttactacactgtgctgaagtgaactttcctttgtgttcatcttgcctggagttcatagagctccataggatttcatgaatctgtgtattgatgtgtgttggagaaatagaatagtatcctttgaaatattgcttctgtctagtctctcttttctcaccttctaggacacaattatacatatattatactttttcaacatattccatgtatctcttatgttcatttcttattttccaaactttttttctccctatgtttcagtctgaatacaaacctgtatttggttcactaatctactttctgctgtgtctaatatgttgtttcacctatctattgaattctttatttcaattgttgtattttttatttttagaatttttatattttttcttttatagtattcagttctctgatgacattctgcatcttttaatcaattttcttgaacatacaaaccttgctattttattttattttattttagagatagagtcttgctctgtcaccgaggccagagtgcagcggtgtgatcttggctcactgcacctcccaggttcaagcaattctcttgcctcagccttccaagtagctggaattacaggtgcccgccaccatgcctggctaatttttttcccatgttggccaggctggtcttgaactcctgacctcaggtgatctgcccacctcagccttcccaagtgctgggaatacaggcgtgagccaccattcccgccaaccttgctattttaaagttcatgtctaataatgtcaagatttggatcacctatgaatttgtttccattccatatacttttctcttctttttcttccttgcttttcttttaaaacaattatctggacctatttcctggtgtacctagtacattttaattaaatgtgttgtgtatgaaaaattgtagaggctacagatagtgttttctttctccagggaaaatgtattactcttcaagcaagtagttagagtagtggcaaattgccttaatccagtgaagaactgagatgattccaggttcggtttcagtttttgtaaggcccaatctattttggtttgccctgattcctagtgtttgacccttcaatgttctcaactgaaatcctgggatatttactgaccctggactccaatttttattttcccaatactattaaactctaaatagttctgtttgttttcttggctcttttgcttggcttctcagcctcttgctttatgcagcttaattatcaaatattttaagtaaaaatgccagtcttaataccaggctcacttttttatggttccctttactctggcaccttggccatgcaagtcttgctaccttggtagtccagaactacagtttttggcttcctatccctgagggactgctgaaaactctgatccaatgctttctgtttctgtgactagccttcttacttacaaatcagaaaatgcctcaaaaggaaaacagcaaagaatttggggcccatctcaaagcatttatcttctctccagaatgatggattctcagtcctagctgtcctgcttgttttctgatgtctttgaatagctattttaatattttattctgcttttctaaatgttcttgatgggagctttggtctgatataagcgatttcatcatagagtggaagtctgaactgagattattttgcttaaaagaaggagaatgcattagaaaaggggaggcatctccctgtctttggctctttgaggggctgttgtgtataaagggagcagatgtgtgtattgtggctccgcaggaacacgtagcatgcgaatacaagtttcagggagagaggtgcaaactctgcatctggaagaacagtctcctcaacatcagccattccctaagtggaaagttctgcctgagaggcatagtgagcttcccaatactggaggagtataagaagaaactcagcaaacacctggaagttgctactgaaaagatccaataattatccaataatcagatcgcaggagggacttcatcagtggttaccaatttttgtatgcttgaaatctgagaaggtttttaaaaatacagattcctaagttaactcactcactgatatactgaaccaaaatgtatccctggcatctgttcttttggttgtttgtattttgtttttgagatggagtctcactctgtcacccaggctggagtgcaatgatgcaatctcggctcactgcaacctctgcctcctgggttcaaatgattcttgtgtctcagcctcctgagtagctgggattacagacacctgccaccacgcgcagctaactttttgtatttttagtagagatggggttttgccaggttggccaggctggtcttgaactcctgacttcaggtgatccacctgcctcggcctcccaaagtgctgagattataggcgtgggacaccgtgcccagccgtggcatctgcatttttaacaagcttcccaagtgatttacaaacggcagcacgggaaccagcaaactaaatattctctcgtgtacttccaaatgagactctgtgattcaaacctcccacagggatgccagcgagaaagtctgccagtttcacctctgtggggatcagttgcagatgtggaagaggatgtatccttctcctgccctctcttctgtccatgaggctcccctctcccaggaagaaggactcagctcatttctgttgggatgacagactcataaggtttagtcacattgtaggttagcaagcttgtgtgggctagccttgggacctaaccactatttataacatagtgtctgtgggaaaatatgttccaagttccaacaaatgcctttaaaaaatattctggaggccaacctatcagtaattgggactatctgcataagttattttctcagaaacttttagcatctcacgataaacttgacctcggaggatggtaattaatcagcattcggtgtcagctttacgatggaagaaattcttctgccttgaataattggaggcctgctttaagaactttttctccaacaattgtgagtgcgtttcttcctgctgtcattgtcttgcccaagggagttggtgctggcatcgcctgggaacaatgatgaatggcctgggatatcatgtggcagcaacgacttctttaacctggtgcttccaaagacagcaagaactgaggtcacctttcagggcttagctacacctgtgtctgattccaaggactctacccacagaaatctggtaaagagccgtgtttccagtgttcttggccctcctcctgatccttgtacccgggaaggacagttttttgagatagatgagtttacaagtggcatatgtaaagtttatatagggacttttgttgacctcaaggccaaatccaatagacaatatgatcttgatccccttagtgtcccacaaaacaaaacaaaactatatcaaggaagtttaaaattacactcagttaccacccagtgagaccacactgggaatgttcacctcaagtctggacctcccacttttaaaggatcatagaaaccttgaaggctgctccagtgtcgtgttctggtcagggaggtgttgtagaaatgtcatctgaatgtagtcattaggtcgaacaagggaattcaaaaatggacaccaccaaccctcgaatgccattgcgtgcattggagaaagctcataggagcaaaatccaaaagagaagtcaaaggggcctcatttctgtgatgcttaacgcaattaattaaagaaacacgcatccaagtactgtttaaatccttttaaaatggtcagtagttaacaaccagaaatagacacaaatcacattttaaaaaatcaaagaaaatacagccaagtagtaaaagatggaaaaataacaaggagacactaaaacaaaacattaaatgatgtgacatcaccatagcaagatggtataggaaattcacctaacataattaggaaattcacctaaaaaattaagattgctggttaatatttaaaataagctcattctaatcattaaagaaatgcaaattaagattaaaagaatacttttttcttaacagatatatatgtttttcttaacaaactgacaattgagttaaaaatgaaaatacctattgtcaaggatgcagggaaatgactactttcatacacagtaggattacaactttttgtatttgggaagaacgattttgctctacaatgtgtgaataggtgtgctcctgtgttttacagacagagaaactgaggcctaaaaagggcctaagcaggtattgtttgagattctggtggtacctcagtgatcaagacagatcacatctccgacctcatggagcttaattctaggtgggtgggaagggaggagtgaaaccacagaccataagcaagtaaacacataaggaggaaaattgcagggagtgacaagtgcaataaagaagataaaaacccctggcctcaggctgggggcttttacaacgggtgggtcaaggaagccatccctgagaagtgacaggtgctgacatttgaatgctgagaattatcatgccaagagctgggcaaggagctttctggcagagaaacagcttgtgcaaagccctgaggtgcaagccaacttgatgtgatcaagggacccaaaaggtttaaagagacagagcttcatagtggactgtttcctccttctctaggaggagtgaaagtggcggggatgactatgagcttcaagagccagcgggcatggagtgtgggcgggtggaggaatgtgagtaacaggacgaactcagggagctgagctggactagaaatgctggtctctttgaggaacctgggatttggggggagtttctgcccactgtgtatcttgagtgatgagcagagtggtggtagctagagaggatgcatttccaaggaaagctgcaaacagatcaaacctgagccttccaggaggaccctgaaacaggaggaggcagactcccggccaggattcattcacatttggtcatgcagaattcattgcctgcaaggttcacagccgggggcacttggcactcatccccaggcatctgtgtgggtgaccccacaagagacttggcttcttggccccggtgggctccacccacggaagacacagtctttgatggcccagctccaccaccttccttaaaaacactagacatggcccaaacaacttgtggtggttttcaaaaagcaattatgactttagaaatcaaagaggaaagaagtagccaagatgaaatgggaaggtagtctggtgccgcgccccccctccctccaccacacacacacaggctgtgtaaccttggacatgtctctgcacctctctgtgcctcaggctatagactgactgcatgcccgtgactgtccctaaggggcccttctcagtataaactgacaaagagtcaattgtcctgtgtgtgatttttccccaaggagggtttttccaaagaccaagccgtgggccctgatgacatttctggcagaggagttcagaagtgatttgaaaaaagacccatgaaggagctgagggtaatgggtcccccagggtggcattcatctggaagtgcaagttccaaggtctggagtaaaaaggcagtttcgttactttgtggccacaatcaaaatgttaatatcaccaatgaaattcctttatgaaattcagctcaatgggagaaaaaaaaatctttttttcaatgctggcctattcggactgttatattatggaaggtagatggaatagcaggagggatggatgctgcctgacacctgagcaactgggccttgccctgggtcacatgctctaagaggtcctcattcaggcccctcggggcccagaatctgcaagccacggacacagcccactcagacctgcaccccttccagcttccagactgtgccctgaattctcaacccataagctggagccacttccagggtctagggagcctcttgccccagttcttgagggtagactgtgcctttgagggtacagggagctactgatgctagaaggggaaggaggtatggactgagcctggctgggctgcaggatggagaggggtgggaagggaaggggaggggtgggctgagcagcacactgtcagctccctctgtgctgctgaaactcagagaagtcccagaattctgaattccagcttggccttccagatccctaggaaggtgtatttattacgatgaggagatagagaatatttttgaacagtttgttcatatgctataactttaacatttagacatacgggatatgggcctctacctcaccccaggccctgcaagtttagaggcaaaggcctggttagggtgtattatcccctctctctagtcttgccaaaagacagtttaaatctcagtcttgtcactcactagctttgtggaactaagcaagttgacccccctgaaaatggggggtctgtaaaatggggacaataacagtacccaccttatgaggttgttgtgagggttaaatgagataatgcacgtagaatctagcactgtacctggcaccctgtgggcattgaagaatagcagctcttctcggcatcaggcacctgatgtccctgccgagtataacttgggattcccccaatcccctgtttttccagactccacagcagtatgagagagagtacaacaacaagcggtcaggcgtggggcccagcaagttccacgggtacgcctacgatggcatctgggtcatcgccaagacactgcagagggccatggagacactgcatgccagcagccggcaccagcggatccaggacttcaactacacggaccacacgctgggcaggatcatcctcaatgccatgaacgagaccaacttcttcggggtcacggtcagtcccatgcctctgggctgttttccttagtgttccttgtaaacatgcaaagcaaaagaggggctgttacaggctttctgttatgtgatctgttatctctgatcattgaaataactaattgcaggccctaggattgcagggctgttcagacaaggggcaggggcagtgtgtgctctcagacacattgggaaaatgcttctctgtgactcatggataagaaagggcatagagccaggtacttgctgaaggtaggctttcactctgctacaaaaatggttgaaaagcgttctatccttttggctatttacattttagagcagtggctctgtgctccctggcacagtacctggcttcaagctgctaaactacctcctgttatgaagatgtgaaaagtttttttgtcattgaatataaacaattagcacacacagatagcctcttcaatctccatgtgaatttaggatgaactatgtatgacatggtgctgtaaattcttcctcttatggactaattttggtgaccatctttctgtctctgcagtctcttaagcagattgactatgatgcatgccacattcaagtttaattgtgtaataaaacagttttctttctgttctgaaaaaaagaaaagaaaaagaaagaaagggcatagaggccgggcatggtggctcacgcctgtaatcccaacactttgggaggctgaggcgggtggatcacctgaggttaggagttcgagagcagcctgaccaacatggtgaaaccctgtctctactaaaaatacaaaattagctgggcgtggtggcacatgcccgtaatcccagctactcgggaggctgaggcaggagaatcgcttgaacccgggaagcagaggttgcagtgagctgagatcgcgtcattgcactccagcctgggccacaagagcaaaactccatctcaaaagaaaaaaaaagggcatagaaagttgactgcgcacacagtgcaggcacagtttaccagatggtgggctggggtgggccaggagaagctctggacccaaaatcaggttcaaatcctgggccttcatttacaagttaccttctttgaactacagttttcattcacacaatggaaatcatacttaccttgtaagctagttttaaagattacacattacataatacaaccttttaatatttattaagcaagctacttgctctgagcctcaagtttctcatccgggaaatggggataataatataaatcttgcatggaagttgggaaaataagcaatgataatatggctaatacttcttgattgcgtattatgtgctagacattgtgctaaatacataatgtagttagactcaataatgtatgcctagtgctaggcacatagcaggcactcaataaattctattgttactgttaataatgattacaccatatccttatgccatccataggaagtaggtgctcttattattcccatgaacagtgaggaacctggaactcagagcatttaagtactatagctaatcagggtcaagtgggatttgaactttggtctagctcttaattgctgcagaaggtagtgaccttctggtaatggaccaaagtggtagttatttgtcactgtctctgctccagaaaatatggaaaattcatctgaagaatacgttgagtgggctaaagtgctgtcctgtgttctaatttacagattcagaatagagtcagtctgtcttgaggaataaagggtagataagctgagctggctggggcatttcttgaatatgcatattcatgcatgcctgtgctgaggcttatattgttggtctggtgggctggaacctgtgcaggtgccgaaggtgtggataatggtgtggatgccaaggtaagatgggctccctgtcctagagcctgtggctcacatgcacgggcaagacctagacaaaaacaatgagaggttaaaagtgcttggcactgtgggagaaactatttgagcccaagcccgagcccagagggatttctgtgacctttagtgaaaaagtcagggtaggttttttggaaggggtggcatttgacccatgccttgaactgtgggcaggagttagacatgaagacaggggctggccagagggagcatggtgagcaaggaagaaatgcaagagggagggaaggacagttagttgggctggaacactggcaagctggataaggaggctgggaagggaagttggggtccatttctggagggacatgctaaggagactggcctttatcttccagaccaaccattcccaaagtgtggtctgcatcatctgggagcttgttagagatgcacattcccaggccccacatgggcccattaaatcagaacctctcggggtggggcccagccatctgtgttttaacaaaccctgcaggtggttctaatgcacaccagggtttgagaccactgctggggggcagtggggaggcacttgggtggcactgaggtttgctcaaatgaagtcgatttccaaaatccccaagcagagccattctggactaaaggctctgaaaaattcactcccacaatgtattggcgaagtccatttctgtagcacagcctagattcaggctggaaactttaacagctttcctcagaccagtagcttaaagaattatttttattctcagaactccttgttataaaatctcacatggagcctggtatataaaacagattaaagaagagcttctcagttgaacagagaaggagccctgaactctgcctgttcagccccctcttcctgcagccctctccccacccctgcagcccctgagatccctccctcagaaatgctggacagaacacccattagaatacctccaaagtcctttctcctcatcctacaagttcatggactgagactcagaaaggggtgggattcacccagggtcccacgggtagcattttggcagggctgtttcaaaatgaattcaaagtatccaaagttgaaatggatgaatagagagctacagaatctagaaagcattttgccacccttcacaatcctagaactctgcattttgcctaggtgcctgatagatcttagttggagatcatttataaccacttctaaatgctccctttcatctaagccaaataatacataatccttacttgatgagcaattagatagactgcctgaaatgttctccacggcttgaggatgagtttctttttaatgggaaattccttggcacctatttttgtctgctccagcttgtgactcagaactcagtgaacatcagaactgaaagttgtcttaaatatcctcaaattcaatgcttttgtggtgtagatgagtgtctgaggtccagaaaaggaaaatgactccttcagagccacgcagcaagatggtttggcagagctggaatggtagctggacaggccctgcctccacccactcaacaccatctcccttttctttgcataagtgcccctttagtggagacagaccgcaacagtgaaacagtcctgcactccatgttaccttcctcctatctcctttgtcacatattaataggtgcttgtcactgggttgtagacaggtttcgttaaaattgtcttctggtcacagcaaaaaggacatcttctgacaaaataaaaagtgtctctgtggtccaaggagactacagaaggccaagttcagctataaataaagagttagaaaggaaaacaacatgggaggtggaaataaatggaagcattttccatttgctgaaggattttcattatacagcacacacagtatccatttttccactctcaggcagacatcttagtctgggtgccccctcatttagcatgtttactatatgggaaatcgtttaaacacattaaattaattatatccatgactcaatttcaattgattcaatatgcacactctctgccgggagctgggccagtggtcccggcttggcatatggatgaagaaatgtcttccatgcatcctaggttgggaatccaccttaactcaaggcaagttctgttttatcttcttagaagctctgctcccagtgactctcctcagggaacactctgaagtgggattccatgtccctgtggccctctgatgacttgggggtgccgtacatctctctgatgttcagccctgggattggccctccatggtttagaagtctcaggatgcttcccctcctccatccccctcttctgtcaattatgcaaccaggaaactcaggctagaattggctatttaaatctcaaaagcccagagcattctgagaatccccttttctgaaaatgacagggcttggaacccagctcagcagagctcatcattagagcaatgattcttaaccttctaaaggcatgagaatcttccagggcgcttcatttaaaatgcaggttccctggccccaccccataacttctgattctgtggtcttacagtaaagctcaggaattcacatattaaacagcagtctgagagattcttaaatagcaacctgagaattgcttggggccacacacacacgtttgtggtttaaacctgtcagcaatggatttgctcctacattcattcactcctctagcaagccccgcactgggtgtatggagtatagagaggaataacatacggtccctggccccaagagcccctcattcaatagcagtgggaatggacaagtagaggaacaattgctaggcagtatccaaggtctgcccaaggcctctggaggaaagacggtttcgcttaggggagtaaagaccaaggagccatcctaacttgctggatcaataattgcaaggtagccaccctgtggggaaccctcctgtgcatgtggtgggagcaaggatgcaataccaggcccctcttcccaacgctcaacacgtcagtgtgctgtggctgaacagactcctttcatttggctttcctaatcaagatgcactaaattcatcgtcaggagaccataacctttcagcacatgcttggaaacactggctaagtcttcaggtgaaaatcaaagccttaaagttcttcaggtgatctttttttttttttttaaactctttccagtttccagtctcttaaaacaagggtgacctcccagatctcaaggtcgacaaatcctttgggtatgtcaggctaagatgatggctgttaccagcagtataccctgtttggtaaatgtatcttctgatttgtcttttaaaaggacagcacattgagattgtggtgcctatgacaggctaaatttacagaatcagctgggtgcagtggcttctgcctgtaatcctagtactttgggaggctgaggtgggtggatcgcttgagcctaggagtttgtgaccagcctgggcaacatgatgagaccttgtctctacaaaaaaatacaaaatttagccgggcatggtggcaggtgcctgtagtctcagctacttggaaggctgaggtgggaggatcacctgagcccaggaggttgcggctgattacgcctctgtacttcagcctgagcaatagagtgagactccgtctcaaaaaagaaataaaataaattaatagactctcattttaccttatgagaattgaacccatgcttttccaggagttccttagggcatgtacactgggtttggatgggggcttttaggtgtcaagagcatttgaccatagggaaattgaaagaggctcctggggaatgtctcggattatgagaagagggctccattcttgctaaagtttgctgtgactgtccctcattctcggtgggtgtactctatgtgggaacgatcacagttggaaagagagtgacccattaagttcctccaaataatagagccatccttcatcctctgcccagtgtctctcaaccagcagcgggtctggacatcctagtgtaacctctgtcaggacaggctggcacccttaggttcaggcatttcacctccgatggctgttatcttctaattggtctcaccaaggtgatgaagaacagcagatggcgatttgcagagtgtattgatccatttgcttttgttgctggtgaagagggatccagccttagccagtataccccttaaagtttctgcaagatttttaaaaaattatttctactaagactcaaaaaatgctccccccaccccctagacaagtcaccaccccaccacccaccctaccaactttttacctaaaaggaggacatcatagagttaaactcagtttggctggaattccaagtactctaagtaaggtcaaactaggtagccagagaaaaccaacaggttcctcgttccaggggaatttgcaatgttggctcaaacccacctttatttcatccccactgttgcctcgccctactgtgatcctggagtttgtgcacttggtttttttaagtcaaaatataattttacacacacacacacacacacacacacacacacacacatacatactagttacatatcatcttgttagagttgtcccatctctcctgcctgtttgatcttttggggtcctggttttactttccaatgtagagactaaacttcaggcctcccaccagccagacattggtgtcttatatttgatatcatcatttactcatagaagtcttttttaggggccgggcgcggtggctcacgcctgtaatcccagcactttgggaggccgaggcgggtggatcacgaggtcaggagatcgagaccatcccggctaaaaaacggtgaaaccccatctctactaaaaatacaaaaaattagccgggcgtagtggcgggcgcctgtagtcccagctacttgggaggctgaggcaggagaatggcgtgaacccgggaggcggagcttgcagtgagccgagattgcgccactgcactccagcctgggcgacagagcgagactccgtctcaaaaaaaaaaaaaaaagaagtcttttttaggttgaatctgggaaagaaaaagacaagaaacagggcaccgggaactccatccagaaataaggaaaactctacccagtcaagatttgacaccacttggggctggtcattcttccagttgtgactctatcccccagattatcctgattgtgcctgtttcttgactttgtgctcaaggctgtcactggagaacttgttagaagctctgaaatagtccaaatgtggtataacaactgggagccctagaacatggggcttgttccagtgaccccatgctagcgtccaatgccaccccacggtttcctattctgaggtccctttttcatgttcctttcttgtctgctgcccgggagcaacagaaaacccatccagaactttctctgtacctcatgtgtccccagcacatcccagacccaggtagttccagtgaaattgcatcacacataaacttaacataggagctgatttgagactctaatctctctccctccattctctggctaaccagcccaccctcaaactcagatgaaatgtaccattgcccaggacatggcagtgatcaactataacaagaattacaaatttgaaaggtcaagtaaaaacaggtcacagtgtatgtatctcttagagctgtgtgaccttggagaagttacttacatctctgtgcctcagtttcctcatttgtagagtggcggtaaatatttcttctttcaaagtgtggctgtgggaaataataatgtttagtacctaagaactacatcatcattattgctattattattactactgctattaaaatggctactttacaaagagcagagtttgtgtgggtctaatcaagacccagcaaacaatcattgcatacctatgagataccattctgtttcatatatataatctcatttcaccctctcaacaataaacaaatctattaacttgtaagaaggctggagtggtttactatccacacagaaccaagtaaactctgcctctaagcaagaacacttgagttctctcctgtggccattcactctagggatttgaaagttaccttaatgtggaaggcatctgctctcagctctccctcctcttcctcccttttgactagctcagtgctccagcagccctaagcattaccactcagcattacacacaaaagctaattgcagcagatgctgatggtgtcccacccagatctcctgagctcagtttcagagggctgcttaggtttgcttatcccccagctgctgcaggtgcccctgctaatggctcacacctgctgccttccctacagtccctacaggattgggcaattggtgcctcctgcctggaggtgcctgggaattacacccacaccatcagcctgcagcaatgaccgatgcattggtacaacacccagtgcaatttaccctccagggcttccaaccagaacaggctgaggctcaccttcatcttaaaccacatctgagcatggcctcttcctttttcttctctcccttacaggtttcttccgagaacacgtcgttaacaaattactgacatgtgattccctgtcctaggctttgtttctggaggaccccatctaagacacccatgtgtatttatgggaaatttaagcattttcaagagaaaatttttactataaccttatagttaccatatgtgtaactttagaaccaatggtcctccttacctacccccacacccgattggagggttctggactcttctccctcgtccctggtgcattttgcatgcacccctgccagttgcagtagcctgtaggagagccatattcgtctcctccagcgaattactatctcccagatttgcagggaccacagcccttcctttctctgatcccctcgtacttcacctggccctttatgcctggtagaagctcaataattcctgataacctctagtgaatgttgttggattaaattcacaaatgattgagaaattcaatcacacttttctactctgttgccttccaggcatctataaactaaaaagactttttcaacccgataaataatcagaactgacaacagaagtattaacaggacttagatttcttgaatctgctaatagtgattaccaaattcttgctgtgatacctggtagcggtaattcacacaaggtcacgtgcgtgtgtgtgtgtgtgtgtgtgcgcgcgcgcgcatgtgcatatgcatgtgcacgtgcacgcatgcgttggaggaatcccttcctgaggcagcataaaaactcatcccttactcccctctcaatctctcgtttctcccataagcaactctctggggctcaaatcccagggcttgagcagcagaagcaattgctgatgggccctctgtgacttcagattgtcagaaacattttcgagaggtaattgctagtaataaacaacaactataataataataatccttgctgtgtgactgccctgtttacagagtgcatttatagtctctcccatcttccttccttaatgcaattacatttattcactcatgctaataatagttatcaattaacgagctcctactgtatcccaggaagcattctaagcacttttcccttattattgaatatggtggggacgtacaattcccagttcctggtacactcctccagtgagctgcatctggcttgctcacctatgtcaggtctctcccctcctctctccttcccagtgagacctaacctgacaccctactttaaattgcaactccctccccatccacccagcccccctctactcatccttctccacaacatctagccccatctgacatactacatattttacttatttattgtctgttttattttctgctttatctctaaggcttagaactgggtgcctgggacatagtaggtgcctgataaatatttgtttaatgaacagatgatttaaataattaatgacatgtcatagattaaagaaacaggctcagcaaagttcaatgatttactcaggatccttcaggtagtaagtgagagtttatgcaaggctaccaagtctgactgactcaaagtccatattcttaagcatttaggtatccaattaattcaaccagcattcattgcacctccagtaagccagaccagggccaggtaggagtagtaagatgtaaggttttgcccccaaggggctcacaatgggaacaaccaggtgagatgcatcagagagagagcaggtactaccatccccatattaatagtgaaggatgtaacggttcccctctacactggattatttgtgtgtctatctgcctcctcctgctggactctgagccccttgacagtggggcctgtaattctctctgtacccctggtgtctacaagacccagcacttagtccatgaaatatatttgctgattgaatgaattacaaaattatagctcagaaaggcaaagtggctatgttggggtcccacagtgcataactggtgaacctggttcagaattacattctaggtcttctgatctaaatgcaagtgtctccaaatcttgtgctgttaggcgttgcttggctgcccttccccctttaatttaaatacaattacaaatgactgcagacaatgtacagcacaggaaagaaacctactccttctgctgtcagataaatttgaaagatcaaaataatgtggtttagcaatttgtttgaattgatgcctaaccttccaaagcttgcaagtttgacttcatcaagtcagggaaaaaatagctatttccttaagaaaagcagtgtgggggagtgtatcagcttatgagagcttcaacagaaggtgcaggctctgtctttatccctgggagaaacaaagaggaggctccttggaaggagccagggacatggtggtcacagcaaattaccataatgacagatgtcatgataataggaatgatgaacagttttgaatgcctactatatgctgagcactatgccaagctcctagatgtattatttcacttaatcctcacattcacctgttatggattgaattgtgcccccctaaaaaatccatctgctgaactgcaacccacagtagctcagaatgtgaccttatttggaaatagggttgttacagatgtgattagttaagatgaggtcgtactgaagtaaggtaatccaatataaccagtgtttctataaaaaggggagatttgaagacagccaggcacacagggagaatgccatgtgatgatgaagcagagatacggatgaggtttctatatcatcagcagtgtcagtgattgccagccaaccaccagaaggtgactgatcctccttcacagccctcagaaggaagtggccttgccaacaacttgatctcagacttctagcctccacaactgagataacaaattcccattgtttaagccacccagtgtgtggtactttgtgatgatggcccaagcaaactgacacatccccaaaaagtggagactgctatttattgtcactgttttgcagctaagaggttaaggaggtagaggattaagtaatttaaccctctcattcaacctaagaggttaaaaaatttacccaaggtgacagagctagtgagtagagaagctgggatttgaacataagccatctaactttcgaccctcacttttaaccattatcctacacctataaaagctctcctccattagggggcaaaagaatctagcccgagaaggacaatgtggaaataaaccaatgagatcagcacttcccaccaccccagtttccagggggagctctgtggctctccctaacctgctgagtaagaggcaaggctgaagccaggccccagccccttggttgtgggccagcctcactgaaagctctggccacagcactggaagagactctttatattgtacccacctttcccctgatcgggaggagggagggcattttataacctcacctgccctgttctaacttattcatgtgtttcaaaataacatatattaatacatatttattttggattataaaaattatccatgtcccttgtagaaaatgtgaaaagtacaggcacgcaccaaagagaaatcagtctcctgaaacctcatcattcagacagactcatgggacacttcacattcagatgtgatcctttttattttaatttctttatcatttattttggtccctcacattataaaactttttccatggcagtggttctcaatcttcttaaccctatcgttttttaaattgtgataaaatatgtataaaataatgtttactgttttagtcatttttaagtgtacaaattcaatggcattaagcacattgaccatgttatacaagcatcaccactatttatctccagaactttctcatcatcctgaactgaaactgcatacccattaaataactcccagctgggcgcagtggctcatgcctgtaatcccagcactttgggaggccaaggcaggtggataacctgaggttgggagttctagaccagcctagccaacaggtgaaaccctgtctctactaaaaatacaaaaattagctggttgtgatggcacacacctgtaatcccagctacttgagaggctgaggtggaagaattgcttgaacccaggaggtggaggttgcagtgagctgagatcatgccactgcactccagcctgggcaacagagtgagactctgtctcaaaaaataataaataataataataataacttccttcagaggagtttttattaaatgggttatttattatgggagagcttattttatttagctattatttattatgatagagcaattttatttagctgtacatttattttttaagtatttttaaagatatcataggtagtttgctaattttagagggaaataatggtatttgcaagctaccgctaaccaaatagttattagcccagcaaaagtctggttgcttttacatacagaaacctaagaatgtgcatttttacatgttgaaaatataaatagcaaatattttaaagtaaatagtacaattaaacattagtggtagccccactattgaggaaaatactcagagatatatccagatcctatatgaaaaacgaatctgaagattacgtgcatttctcttggtgtgagaccagaatctccctctctgtgtgtgtgtcaaggtatgttagcccaggagcttgctaagcaggaaggaagttttctaaaatcaggagaagacagctgacataaattttagctgacaggatggcatggctgtgggccctgatggacactggctccgcctgtgtgtgctcatgcagaggttactcacacacactcgatgtgacactctgtgctcacctggatgagaaccagacctgcgtgatggagagaaggacacttggaagtgtccactttctcatgaaatttcatgccactttctcatgaaattctaaccaccactgccacctccttcttctttctcaatgggattcaggcttcctagaattactgcctaaaccagtaattttaaagtaaagacctggagtctggttggggcattgtaaattgtggaaggggggaagtgggggactataagggactggaagggggtgtccacctttgtcttcctaagaggtatgaaatggttaagagtgtggaacctggagacagaattcctaggttctcatcttggctccacttgctagccaggtaaacttgagcaaggaatcaatctctcttcatctcagtttcttatctgtaaaacatagatagtgccttagatcaagctccttgtaaatagagatgggacatctttgcagaaggtttgtcagagagcatgctctggatacacctgtagggaagtgaaggggacagaacaagagcaagaagctgatggcagtgtggctgcaactgaggctccagctgattctggtagctctggagctgtgatggagcagaggctgggcccaggtgtcctcttatcagctagtcactggccctaggagcaggtgtatccttagccaaggcagttcctcatggtggagggtaattcgcagtaaggaagtaggctgggaccttcagtagccaatattctcaggagctggggaatgatggtgctttggccctaaagaggccaaaatactgggcaagccccccagttacccctatagataacaacggggcctaccttaaagggctgtgaggattaaagaggtttatacatgttgagtgcctgggacacagtatgtgctgaattagtgcaaggatgacaaggaagaatgtatttggataccaacttcacagtcttctagaccctcaaacacctataattaattttccatgggattctgtggttggtgggtccccaaccagctgcttcagttggattcttgcagctcttgccatctttggtaattcacattctgacattcatatgcacgcaaacacactcacatgcatgcatgcacacacacatccctaaatatgtggtctatgggtattcatattcatcatgtatacagctatgtatcaacgtattccaggagttttcaaacttgtttttcaaaggagattttacctagaagcccgatattagtgtccttcatttaacatttatgttagtattaacattgcctttaatattacattttctttttccaatttgctctttggaagactttgctgactgtccctttggatttaaaaattagtaagcaaatttctgcagtaacaaagaagaagcaaagccttcatggggaacctgggtctgagctgtcaggtcatctcacaggaggcaggccctggaggacagcctggcagcaatggcagcttttccaatagagcaacaggtgcccaagaaggaaccacggtagctggtatccagacccacactctttattttaatgttgcatgtttatttgaatgtgcactgtaaaaatataaccagcatttaaggtagcgagataagcactcttttttcagttttttttttaaggcagatatttagtaaaggaaagcacagatggcgggtagatattgtgaaaaccatgagggtggcacacgtatgacaaggtttgggaaacagtgacctccttattgctttatctttatgttaagtcactgtggtcatccccttaaaagcttaagaaatgaatcagaagagagtgggaaagagaatgagaaagagagagagagagaagggagagggatccaccagcagcagcagcacattgattttcttggccagcttgtgtagttaccaaagcagcaaacagtactgtgctttttacgcatgaggtttttgtggtagggttaatagcctttttgtttaatgccctttcacctcattcccatgttttcagtaataaaaaatggtggcaggccagggagtgggtgtccactgaacagagcagagtcaaactactcttagaaacatggccctcagaccccagcagcacaatgtagaaatccttgaattcaccctcttttgcaataattttgattccagttaattcattcgcttgcatgaattaacttctactaccaactccttgagggtagggtctttctgagatttatctctgttttcagtttctagcacatggcctggactataattgaagttagtgaacagatacatcagagagacttttatcatccctgtcccctacttcttgaatgtctcctcagggttttacacataatagatacacaggaaggctggttgaatgtatgggcagatgggtagagtggtggagacatgggttgggggatgggtggaggggtgggaatgtgagtagatagttggatggctgagtggaaggagtgaatggcgaatgagtgatgaatatgtgggtaggtgtatagatatagatggatggatggatggatggatggatggatggatggatggatggataggtagatggatatagatggagggataacgtgtgggtaggtaaatatggatggataaatgggtggatggatggatggatggatggatagatgtgtggacaggtggatggatacagatgggtggatggatgaatggatacgtgggtaggtggatagatgtggatggatggttggataaatgaatgagtatgtgggtagatggatgcatgggtgaatgaatgaatggatgagcatttaggtagatggatggatgggtatgtgggtggtgggtaggtggatggatggataggtgcatagatagatggacggatggatggatagatgtgtggacagcggatggatacagatgggtggatggatggacgtgtgggtaggtcaatagctataggtgcatggatggataaatggatgagtatgtaggtggatggatggatggatggatatatgggtggatgggtgggtggatggatggatggatagttatgtgaatagatatatgcacagatggatgtgtgggtagatggatggattaacaggaagatggcaggtgggcagataagaggacagacatagatgaatgagtggatgagtttgtgggtggatggatggatgaaaggatagatgtgtagataggtggatggatatagaggagtggatgtgtgtatggatgtgtgggtaggtggatggatatagatgaatggatggatagatggatgattatgtgagtagattgatggacaggtgggtgggtggatggatggagggatggatggatagacggtggttgtattgatagatgatagcaggtggatagctaggcaggtttgtggacaggcatagatgaatgggtggatgagtttgtgggtggaagggtgggtaactgagctagtgagtatgtgaacactaggcctaggagaggtaatttcagttcatgtgtctgctgcattttaatcaaagcacgtttctctagaaggatcttcagaggcaatggccctgatattttgactccttttctgtacaggtcctgacctctacaaagtgtttgccacattttctgatgtgaggtctcatcttgtcatctgactcacggaaatacatgttttatctgatgcctttattcctcactcacacttcaccctttcagtgtgaaagggcctcattaaaatctgtcctctacccagttactctttgagaaagttccttcttagggcatttctgctgtgaaatgtatcacaccgacccatgtgagtgccaacctgaatgctaaagactgttattagcagatttagcctagagatgtttcagagttgtcagttctgatgttcataggattatattttcaaacatcatcacacatcctctgtgacagacttgattactgtgatgaactagttttcttcttttgagaaacgttccagttgcaaaaatgattctgaaagtatttaagcaaaattctaggcaagagtgaagtgatgctgtttcttttgggcagctcatttagcttgctgggggaggcagcttggtgtaataggaggagcacggggcatggagcctgcagatcaaggttgcatgctgtccccagtgtcttagcagctggtgacctccgcaagtctctaatctttgtgttatcttctgcaaagtgaaaataatgaccagggacccctcactgggttgctctgaagatgaagcaaggaaggtgcacaacgaactgtaaagtgttgtggatgattgaaggatctgtggtagtagaagaaagaacgccatactatatatatatatatatatatatatatatatatatatatatatatatatatatatatatggtgtgtgtgtgtgtgtatatatatatatatggtatatttatgggtatatatatatatatatatatatggttgttgttgtttaaataacagaagaaatcagatattgacagtgaagaaattaactatatgtcctagggctaataaaacactctttctgggccatggaaggtttatcatcagtgatgggaccacaggtaaaaacttggtacaaccacagagacatgactgtttccctttgttcattcatttattctacagacatttacaaccacctatagtatgaggaggataggggtggcggctgctgggggtacaactgtgagcagggcagatgtgatccctgtacccaggaggaaacagatgaaaactgataatcatccgaataaccatttaaatataaatggtgaaaagtgctttgaaagaaagttacaggggtgcccataacgtggagacctgaagatgaaataaggaaggtgcataacaaactctaaagtgttgtggatgagtgacagactggggatcagtaaaggcttccctgagaaggtgactttgagttgagattgaagaacaaataggagctaactaggcaaagtgggtggaagagcatttctggaaaagggaagagcaggtgcaaaggccctggggttagagaaagtgtggcacctttgagaaagccagtgtggctggaataaagtgggatgagcctggagtggtgggtggaggccatgttatactaagaccagtggaaaagtgtctagcaagggagcaacctgactgctgtttttaagaagctccctctggctgtggtggggagagcaggtcagagcaaagcaacagcacctgcagggatgctggtatcagccatctcagtgatattgggtatagagaggagtggatggattcaaggcacacttcaggaagaaaactgatagggcttggtgttttaccagttacgacagaagagaggggatgatggagggtgtgctcctaatgcaattactttccattttgaactgaatggttctgaagttatatatactgtgagcattactatagtaaattaaagaaatacatcaatagattctacagtattttgcatactttaagcatctggataatctgaaaatttacttggcagcccagagaaaatggaatggtgcagctctttggcctgatcccacaggaaaacattccactcatgcagaagcaaagatcaggtccagaaggatgtttggcaaatgcgcattaaaaactgagaatatggagtgtgcagaagagctttgctctgagcctggccctttaggctttcatgatctatggaggcaaacatgataccaatgggcagaacccactccagcctaggtctacacatgaggttacaccaacattaagaaaacctccttgtgtgctgcccctacctacagaacagtgtgacctcaagacccactccccacaattcccctagtctttcctgtgtccctggaggcatctcagggtcctcacaaactgtccttgtttggcctggtggcacagcctccttggtgactctccatgcccgcagccacttgtggaggctgtcaccatcttattgccagatctttgttccccagtgccccaaaatgcatggggcttatacagggctgcggtgacctcagtcttcagtagggaagaaggctgttctgacacttgctgtatcacacttggtcaactgggcccagtggtgtgttggaattggtgtatatcagctgctgagagccgattgtgcacatctcttcccaacttcttattctatgaggttacgttagtagcttgaataggccatgatgggagtatttatgccatggtaatgggtaaacgctacaaatcagagcttccttcttctccccttcagagaccctgttgttgaacatttaccagcacaccactgactggcccagagctcagctgcttgtgccctgagccccaccatgttccctgttgtattagggttcactagagagacagaactaataggatagatgtctatataaaggtgagtttattaagaagtattgactcatatgatcaaaaggtgaggtcccacaataggccatctgcaagctgaggagcaaggaagccagtccaagtcccaaagctgaagagcttggagtccaatgttcaagggcaggaagtatccagcatgggagaaagatgtaggctgagaagctaagccagtctaggcttttcacgttcttctgcctgcttttattctggctgcattggcagctgattagattgtgcccactcagattgagggtggacccacctttcccagccctcagtcccagactcagatgttaatctcctttggtaacaccctcacagacacacccaggaacaatacttcattggattgaaggattgtatccttcaatccaatcaagttgacattcaatattaaccatcccacctgtgaacattgtccctctgtcttccacctagccactctctccataaggttcagccctggtccctgagatcaggaccacattgtcttctgagcccccaccttccacagaaacatgcccaggtatcaatacattaaacatctctttgtctgggggctgtggccccaggaatcatcagacagaaatgaatcaggcagggaaggaaagaaaggttgaagtagacatcaaagaggccttgaacatgtcctgtcccacatggacctcagttttctgggcctagaggacatgatgtcccagtcttctttctcctcaatgccccaagcttgagggaatagtatgtaacttaatcttgaatatgtagaaaaaaacatataggatattgcctaacataaggtagaggctagcttgaaaaagtcttgaggttcaaggccttagtgtacagttaattactttcatgattcatcacctgcagactgtgactctagtatatccttagtgtaaatgtatgaaggcagtaattttgtacatgtgtatgtatgtgtacatgtctttacatacatgtatatacttacagacccatggcatataataaaacagtgacctagattctctctcaagcatgcaggatctttataagccatacgtagtgacagtttaatccacataatcactgtcaattccccttcactaatttggcagagtccctgcggcatatgcagctctgcaatgctttacacagcgtacacaaaattccctgttcatcctccaatctagtaattccatcaactagcttatgaagagctgcttcagtaattcatgtttaatgaccttagctgctggacagatgtcttgagaattaaagtctcctgtgaacagagtatcctgagcttctaaactccagtgtaatggaaacacgtcccatttctcccacacacccccaaagtgatgggatttggagcagacatccagcctggggtcctctcctcgggctcacactgcccactctagcctttatgagtggtggtgaccagactggaggccatgggatttatctgacatgtcctgggttggacagtcagtgggcctcacgtggggctgagttctgtgcctcaattcatctgtaggatagaggagatggtgcctggcatggtcaaagagaccctcagagtgctcaggactcgggactccaaaataatggaaaagaaaaggtttatgatgagaaccaacatttactaagctcctgaagtactaaatttcctcggaacaagccctgtgagggagacacgattaggaccatcttatagaagaggaaactgaagatcaatgggttgtgtagcttgtcaaattcatgcaggtgggaaatgccaggatcctggtttgtgtgctggggtcagccacctctaatgctctgtttgttttatacccctcttccaccttcccacccacctcagtgggatttttagaaccaaagtttgcactgtcatgccagccgtgtttctacagagagatatatacagcgatcatcttcaactcctcccttccatctgccaagccctgctgactccacccccgtgaaatcccaaccaccacccctttttctctgtcccctctgccgctcattcattctggctcattctcacactcaccatattagccttcctaaataatctctggccatggtactccttattaaaaaccttccttgagccgggtgcagtgactcacgcctataatcctagcactttgggaggccaaggcagtggatcactttgagatcaggagttcaaaactagcctggccaacatggtgaaaccctgtctctactaaaaatacaaaaattagctgggcgtggtagcacatgcctgtagtcccagctacttgggaggctgaggcacaagaatcacttgaacccaggaggcagaggttgcagtgagccgagatcacaccactacacaccagcctgggcagcagaacgagactccatctcaaaaaatagtgataataaaataaaaatagtgataataaaataaatacaaaattagctgggcatggtggcaggtgcctgtaatcccagctacttgggaggctgaggcaggagaattgcttgaacctgggaggtggaggttgcagtgagatgagattgcaccactgcatttcagcctgggtgatagagtgagactctatcaaaaaaacaaaacaaaacaaaacaaaaaaaaacagacaaaaccttccatggctccccactgcctgtaggatatagcctggcattttaggaactccaccaccaggccatacttgtgtttccagctatttctctgaattctgctcttacccaggaggcatactagctactctcccacacatgcatcagaatttccaaacttcataactgtgcttatgtgggtttttttttctatcaccttttccatcatttatttattcaacgaataatttttgagaacttactatgtgccaagtactgccctaggagctaggaatacagctgtgaacaaaaccaaaatgaatccctttcttcagagagtttacagtctagtgccaggagcaaacaatcagttcttgccatattaaatgagaaaagtatacaggttgtcagaagacaatggttgctattccaaaagaaagaaagaaagatgtgtaggaggatgaggaggattggaaatgctaccagtggatggcgagaagagagttttaaacaggctggccagagaaggccacattgggaaggtaacatttgagaaaagcattgaaggaggtgagggaatgagttgtgcaagcgagtaggtaagagtgagccaagcagataagcagccagccaaagtccaggtgagagtatctggagttctggagttgggggcttccacttcccacttccaaccaagatggaggagtaatagggaccagatttaccctcctgctgtaaacaagttaaagaaaaaaaaaaaacagtccaaatactatgtgaaatgacagttttcagacatgggctacaagcagcagaggacagtgacccctgagaggaggagcacaaaggaagtgaatcttacaatcgcccagatgaccatctggagggtttccagcacaggaagggggaacccaaacagagcctggcagtcttgctgagttgcagagacagagatgagaattcagagacaaaggaggcagaagtttgcaggcagagcactggagaagagagagctgcatggagagggagaactatgcaggtctgctcacaccctcagctgagtacttactggcacatgtacagaggaaagcacttgagaccagggaaagaaccagcagaaaggaaaagacaggcagaaggatcctcagagctcaggcaggcctgggaatagttcatgttcccaccacgttgggtgggaaaaagtttaataaatcacaaggagaatactcagaagggggtcatctcaggagtggggtgaaatgaaccctagactaaaggcagctctggtcccacctaaaaaagcttaaaagcaagactcgaaagggtcaaactccttccaagtaacttaattatgtcccagacagaacttaagaatatttcaaggaacttttttttttttttttttttttgagacggagtctcgctctgtcgccaggctggagtacagtggcatgatcttggctcactgcaatctccacctcccgggttcaagcgattcccctgcctcagcctcctaagtagctgggactacagatgtgcaccaccaagcccggctaatttttttatttttattttagtagagacagggtttcaccatgttggccaggatggtgttgatctcctgaccttgtgatccacccgcctcggcctcccaaagggctgggattacaggcatgagccaccacgcccagcctcaaggagtatttttaaaagctaacacccaatgaagggtctgacatccagtgaaaaattaccaggcaggcaaagaagttggagtgtgtgggcatgacaaggaagccagtgtggctggaatggtatcagcaagggggagggaagttggagacaatgtcagagaaatctagattgcatcatcccagtaagctacttaaaaggactgtggccaactcagaagtcaagagaagacatctgttttctcgcctccccttccagactgaaaagctcccctgctttgttctgaagtccctgggaagacactgagtgaatggcttgtcctcaacaagctttggtcctgtcttcctgtaatccactgcctgcaagatgtgtgaccttggaaaatcttcctaaccaccatgccttgtttgcttgtttgactaaaattaatcatagtgtatcgcctacttctaaggagagtttgaagcagttctcaataaaaggcatgtacgtagcgaggtcactgacatagaagtcagaaatctaaaaccataaaatgtgatgacaaaaatatataccaaaatccggccaggcgtggtggctcatgcctgtaatcccagcactttgggaggctgaggtgggcggatcacttgaggtcaggagtccaagaccagcctggccagcatggtgaaacccggtcctctactaaaaatacaacaattggctgggcatggtggtgcatgcctgtgatcccagctactcaagaggctaatgcaggaggatcgcttgaactcgggaggtggaggttgcagtgagccgagattgcaccactgcactccagcctgggcagcggagcaacactttgtctcaaacacacacacacacacacacacacacacacacaccaaaaacctgggtgagtttttaatttaatcatgaaataaaatgaactggttgccatgtgataaagcgaaatgaacctcagtctcttcctctgtaaaatgaaatcaatggtctttgccaacctacccagaaagctgcctcaaggatcaccaaagatgtggatgagaatgtatcattcaggactcttttggtgcaagtgataggaaactgtacttaagcaaaggagcagtaaagtctaggatgaggtttctccagctctccatctctgggtctgctttctcctgggccaggtccattctaggcctatgcacagttgcttctgcttttcatcatgtcagcaccaagtccagcaaaaaagggaacccattttccttatagcaccagcaaaatccctgctagtcccgttagttttgattggctggctgacttgggtcatgtgcccatttctgaaccaatcacatagctagaatagtctgtattgattggcttagttccagtcatgtgatccatccctgcatagagccatcttcacagaacttcaaggctgagcatggggccaagtgggtctctctgtgttgtctctctacttttcttcttccttacacgcattttctcccctgctctggtgctctaggaggctgatcccatgatgacatcccctgtcttctggtttctggttcaatataggcaagagattggagtccaggaggaaggagattggtcaggtgcagcctttgccttcctccctgctttggagctgcgtctcctgaaatacctgtgcccctccatggctgtggcttctccttcttgtctcccactttgttgaatctccagtgacactatttcctccttccgttctgaggtatggtagcaactcctgccattgctggtccatgggcacatcaccttcccttgtctactccctcaatctgccccctaccctgcgagtagtttttaataaagtctcttcttttgagccatccaggatgaattatgtttcctcctgtggccctgtattagttatctgttaagtcgtaacaaatgatcccaaagtgtagtggcttaaaacaacaatacatgtttattatctcacatagtttctgtgggttaggaattcaggagtgacttagctgtaaggttctggcttggggtctctcggataatacaggcaagatgtcagtggggactgcagtcattctaaggctcactagtgctgggaggtttgctttcaagatgtctcccacaaatggctggcaagtggatgctggctatcaacaggactcagttcctcaggacccctccacagggctgcttgagtgtcttcatgatacggtggctggctttcaccagcatgagtaatccacagggctgcttgagtgtcttcatgatacggtggctggctttcaccagcatgagtaatccaaaagaaaacaactgaggctgcggcatctttttatgacctactcttggaaagtacacactgccatttctctagacatatcctacaagttacacgggccagccctattcaatgtggaaggggatgatggaatttggtagtgaccgccaggaggcaagagtcatttggggccaccttagagtgtggttatcaaagaccctggctgacatagtctctcaattaaaaccatccaaagggggatgggttgctgagcaagaaaaataaatgtgcactctgaagtgcattggcagctataaaccaggtacaagtcctgtaaatataagaaactgtgactcttgaattctctagcagttcacgtaagttgaccagagggcttagaagagccatagtaaatgggaatgaggacgcccccaagcccaggccagaggtgggaggggaaaggagagaacccaagtggttcattgattcatcttccccagcttctcctgacctcactccagccctacaaacagcctaagacactcaactgtgtttgttcatagtctgctcctgacatctcacagccttcattctggtttctgccgctagaagaacctcctgaccctcctcaggcaaacactgggaccatcaaagcagcagccctgccttccatttctctttccttttttgctaacacctgtctcttttgtttgtttgttttcgagacagattcttgttctgtcacgcaggctggagtacagtggcacaatctctgctcactgcaacctccacctccccggctcaagcaattctcgtgcctcagcctcccaagtagctgggattacagacataggttaccacacccagctaactttttgtatttttagtagagactgagtttcaccatgttagccaggctgatcttgaactcctggcctcaagttgatctgcccacctcggcctccctcccaaagtgctagaattacagcatgagccaccactcctggcctgctaacacttttctcttaatggaagatattttagctgatggaagatttttaggcttagtccatgaaaccaatagtcccccaactcccttgtggagccatctgggtttctagttggggagttgagccaaaagggagaatgggttctcaatcaggcatgccagggacacctgtctgccagcccagcccactgtttccaaggttgggggctcaactggtgactcatcaaactcagagctgagcactgtgagatccaggagagcctgggagactgtcctagccagtactccttgccctcactctaacacacacgtgtgcatacacacactggcagatgcaggctcacacacaccattttgcaaatggagaaacctatacacggagccagcatgccatcttgggattgctatttcagtgccctttacaccactctgtgctttaagtcctggataggttatgtgtcacactgcgctgactctgagtaggcaaagcaacatgatgttctctttgcctaagcatgacccgtaaaggggatggatgccctggctcaaaccttggcaggaggcccctgcagctgacaaagtgtctacacttcttagcctgggattcaagacctgcctccccacccctcatgtgccagccttctgagctcctcacagccctatgtatgtcctctccgtttcttcattcatttgtccatccattcacttacaactatctatggagcacctattacatactacgtgcatttctagcattggaatacaattgtgaaaaagcagacaacctcatcctccagcgctgcctcctacatgaagccttcccggacctgccctgaatgagtaagctaagccagaggaggcctacagccaacccggggtaggactactacagtgcttctcctgctctcctgctggggttggaggggaagtaactggcttcagagttccgcagacctgagctcggatcccagctctgccactcaaagtcatagctgtgaccttgtgactcaatgactcacctgtctgagcctcatttttgtcaaccaggaaatgggaaggtggtaatatccaccaggcctgtggcccacctggtttgcccaggtttggagcctttgaacaccagtggagaccaattaggcacttggccttgcagtaggaccagagccatggaatgcctgtttgctctgcgtgttatacctagagcccagcacagtgcgtggcccagaagagactgatcacaaaaatgtgatgaaagaatgagtgcacaaatgactaattgaatgaacaaacacatgtgtaccaagcacagacctcctcaactctggttggtttcccctgcccttaaggtaaagtctaggttcaattttacttcgtttaacctccttcaggtacagagaatttagttgctttcagtcatcagttcgtgacagttaacatcactgcttcagggaaggctcggctctgttacattcattcattcattcattcattcacccattcattccttttcatccccatttctcactgccattccctatgtctgtccaattgtaccttttttggtatatggttttgcaaaatgtgtgttattatttgtatttatgtaaatgtattatatatataatatatatcctcttttttcttccttttcattaagcagtgtgcttttgttcttttggcttaggattgacttggcgatgcgggctcttttttggttccatatgaactttaaagtagttttttccaattctgtgaagacagtcattggtagcttgatggggatggcattgaatctataaattaccttgggcagtatggccattttcacgatattgattcttcctacccatgagcatggaatgttcttccatttgtttctatcctcttttatttcattgagcagtggtttgtagttcgccttgaagaggtccttcacgtcccttgtaagttggattcctaagtattttattctctttgaagcaattgtgaatgggagttcactcatgatttggctctctgtttgtctgttattggtgtataagaatgcttgtgatttttgtacattgattttgtatcctgagactttgctgaagttgcttatcagcttaaggagattttgggctgagacaatggggttttctagatatacaatcatgtcgtctgcaaacaggggcaatttgacttcctcttttcctaattgaataccctttatttccttctcctgcctaattgccctggccagcacttccaacactatgttgaataggagtggtgagagagggcatccctgtcttgtgcccgttttcaaagggaatgcttccagtttttgcccattcagtatgatattggctgtgggtttgtcatagatagctcttattattttgagatacgtcccatcaatacctaatttattgagagtttttagcatgaagcgttgttgaattttgtcaaaggccttttctgcatctattgagataatcatgtggttttttgtctttggttctgtttatatgctggattacatttattgattttcgtatattgaaccagccttgcatcccagggatgaagcccacttgatcatggtggataagctttttgatgtgctgctggattcggtttgccagtattttattgaggatttttgtatcaatgttcatcatgatacctgacttcaaactatactacaaggctacagtaaccaaaacagcatggtactggtaccaaaacagagatatagatcagatatagatatagatatagaacagaacggagccctcagaaataacgccgcatatctacaactatctgatctttgacaaacctgacaaaagcaagcaatggggaaaggatcccctatttaataaatggtgctgggaaaactggctagccatatgtagaaagctgaaactggatcccttccttacaccttatacaaaaattaattcaagatggattaaagacttaaacgttacacctaaaaccataaaaaccctagaagaaaacctaggcattaccattcaggacataggcatgggcaaggacttcatgtctaaaacaccaaaagcaatggcaacaaaagacaaaattgacaaatgggatctaattaaactaaagtgcttctgcacagcaaaagaaactaccatcagagtgaacaggcaacctacagaatgggagaaaatttttgcaacctactcatctgacaaagggctaatatccagaatctacaatgaactcaaacaaatttacaagaaaaaaacaaccccatcaaaaagtgggcaaaggttatgaacagacacttctcaaaagaagacatttatgcagccaaagacacatgaaaaaatgctcatcgtcactggccatcagagaaatgcaaatcaaaaccacaatgagataccatctcacaccagttagaatggcgatcattaaaaagtcaggacaacaggtgctggagaggatgtggagaaataggaacacttttacactgttggtgggactgtaaactagttcaaccattgtggaagtcagtgcggcgattcctcagggatccagaagtagaaataccatttgacccagccatcccattactgggtatatacccaaaggactataaatcatgctgctataaagacacatgcacacgtgtgtttattgtggcactattcacaatagcaaagacttggaaccaacccaaatgtccaacaatgatagactgggttaagcaaatgtggcacatatacaccatggaatactgtgcagccttaaaaaatgatgagttcatgtcctttgtagggacatggatgaaattggaaatcatcattctcagtaaactatcgcaaggacaaaaaaccaaacaccgcatgttctcactcatagatgggaattgaacagtgagaacacatggacacaggaaggggaacatcacactctggggactgttgtggggtagggggaggggggagggatagcattgggagatatacctaatgctaaatgacgagttaatgggtgcagcacaccagcatggcacatgtatacatatgtaactaacctgcacattgtgcacatgtaccctaaaactttaatagttaaaaaaaaagcagtgtgcttttaatatctatccttccattacatctaatctgctggttatgattctctctaggtcacctccatcacacacagacacacacacagacacacacacacacacacacacacaggtgcattaagcagccttctaaatgtccacttatgagaatttcttaggctgtttcccaggagtgaaattctgggtcaaagagtatatggacacttaattcgactaagtagtgccagacgctgtcctgaatgcctgctcctgtgacatcccaccagaagtgcctgaggccccatgtctctgtcttcaccaatacctagaattgtctgtatttctaagtgttgccatgtattagatgtaaagcaacatcactttaattttctctaatttctaatgatattaagcatcttttcatgtgcctactgtcttctggttttttctcttttgtaaattgctttttcagatgcttcacccatttttctgttggggttgctgtctttatattgttgattttcaggcactccatggataatctgggtgttaagaccacgttgattttagaccttacaaaaatcttctttcattctattgtctgtttgtccaggatgtcctttgtctaggaaatgctcaattttgatataatcaaattaatcagtttttgggctaacggtttgtgctttggaagttttgtttgagaagttctgcctctgggtttcaaagatattcccctacattttctcctgttaactttacctttctcatttaaacctttacttggtcacgtatccactcttgtttatggattttggcataagttttgctttcccttatatagtcaaccagttttccaactgtcatctgttaaacaattaaacatccctttgatttatggtgccatgtttttggaaattaaatttccttccaaaaatgtgcttacctattaaccctttattccagaggtttccaaactttctcagtttaaagcacccttagtgactcagtaattttttcacggcattttttcacacaatatttttttctctaagccaaaagaaatactacaagtttctaagcagttaggtccaaacaactaaataaatatttaaatcctgacaacttagtagccattcaaaaaagtaatgcacagaaattgaaacaaaaagtaaagttttaattttattcctgaatgagtacagttccttactaatggaatagggagctggacagcttctgaaaccttggaataagattgtacattgtttcctgttcctcgtcgatttttacacattgtttcctgttcctcgtcgatttttatacatacttgcttttcgtcacagcaaccactgaaaacccagtttcacaaagaggcgatgtcatcaaaatgatgtggcacaatctaatgttgagactgtgaattacttcaagctagtagttcacatggtgtatgatcaatgttaaatatcactgtttccctcagaaatttaaaatatgccacaatacccctgcgagttcactctagtaccctgggacacctcggggcccagtttgggaaccatggttctgttctcttctactggcttgtttgtttttgaaccaaaaccatctgttcctcttagtgtggctttctaatatgccttaatatctggcaaagcaagagatctccgctttccattctttgttggtgtgactttgctacaggcctttcttcacctgctccctgcctgccttcagagctttatctctcttctgccacccttcaacctagaactatttctgcttcctactctctgcctactttcccacctccaggcctttacacaggtgattccttcttcctggtacactctcaccatccccaaccttcccttttgcctggtgatctctccctagcgcttctgggctcactttgagaaaccctctctccaggaagccctctgtgagcctgggctggatagattccccacagcccaggccctctgccaatcagggcactcgtgcctttgtgctgtggttatctataggtctgtctcctccactagactgtgggcttcctgagggcagggactaagtcttggggattgttgtatctccagtacctggcctagtctgatgcacagccagtactcaacaaaaaaagtgtaaattcccggccacacactctttgcatgaacccagcgcttcactcttctaaaagccctgcacatgcctttgctcctcctaccagcctggcagcagggatgagcacagccactggggctctggcgggagagtcagtcgaggccggctgaggctggcattccagttaggcgaggctccaggtgggctggggctgagccaggcatgggacaacggaggggctcctctgctggctggagctcaccgaggacttgtatatccagaggggcaaggagggccaggtggggggagctagggtatccctgcagagcatgtggcctcccctcctccgagacaagagttcaagaacactttttgcccttcctttcccttcatcacaccaccacccctactggccctataccagaccttccaagccagagagcgtctccaagatttggagagcctcctgtctgacccagcatcttacgtacaacctgatgtcagctgcttgggagccagaaacgttgtcaggaggctccatccctcagtttggggatgcccacaactaacctcaagacttctccaaattcctggaggactcgcgctctcctgctcctgcctctgctgaattcactcgggaattggaccacttcctgatccctcaggtgttcctccactcagagccacattgatccatgcaagatatgcagcctcctcctctatttctacacccatacaaaacaagacacaaaaactgtcctctctgacaaggccttctgaggggatgtcaatgaagatttaggggccaggcagagcagggttgtatcagagaaagtaattggagcagcatcaagctgaacatgagaagcccctgacctgggccctccgcagccacccttgggtggtctccacctcccactcctctttgcctaacagtttgcactatgaaattttgtttgagaggttcttccgctcctcccaggtcctgtcctcaggaggaaaatgaactccagcctattttctcagcagagtggctggccgcccccgacggccatggtctttcctacccagaaacacatggaggttctttcttccccaccaggaggcaccaagatcgtctgctctttaagaggaattctgggcccagctttagatcatatcaactttatctccttacaccctaggagacactgcaaccagtgtgactgggggatcccagagtagaacccaggagccccacctcccagcaggataccctttctgagtcaccaaatcttgtccatttttcctttcctatttctctgatctgcatctttttctcttcctgcctgagctcccttgcctggcgcctggacggctgctgcaccagctgcctaatttgagccctgctccaccgcccccccgggccaatctgcagcccaccctggcttaaagcgaagattccaacagattgcaaattgcatctctcagactttcaggtcagctggtcagcaatttggttttcctggtggagcctaatctatttaacaaaaatagaacctacagtaaagcaaaaatcaaatacttctaatcgtagggatgcttgcatctgcaaatgaccagaaaagaaggaaccatgggtgggggtggtgaggagcctgggcagaggcttggtgatgcatggcgctgtagctacaaagctcccttggctcagccacccacccaggaacctgggcaaagatgccagccactgctctggtcagttctcctctgccaactctgtaggcatcaccctccatctgtctgcccaaaccagaaagctgggagccattcttccctgcattcactcctcacttccggggtatctttaaggcttgttgattccacctccacttccttcccatttacatatatacatattgtgttgttgttgttttgttttttgttttttggatttttgggtttttttgttgttgttgttgttgtttgagacagggtctcactctgtcacccaggctggagtacactggcacaatcatagctcactgcagccctgacctcctaggcttaaacaatcctctcacctcagccccctgagtagctgagactagaggagtgcaccaccacacttggttaattttttattttttatagggacggggtctcgctatgttgcctagcctggtcttgaactccaggctcaagcaatctcccacttggcctcccaaaatgctgggattacaggcatgaaccaccatgcccagcctccctcccacctcatgcatcatctactttgctccttccacatcatcctcctctcccatggattccacagcttcccactggctgccttgcttccagtccttcccccatgcccatccattttccacaaaagggaaagagctcgttgcacctgctatctcctggccaacaccccttttgtggccccttatttggggcataaggtccaaagccctgcctgatgtggctcctgcattctctgcctcccaccagccctccaccccatgcacaccacccacagcaacctcaccctcctttctactcctccaaagagccacactgtctcttgcctctaggctttgcatgcactgttccctctgcctagaacatttcctctcccatcttctttgcctgggtaacatggtcattcttctctgtacccctaagccaccccctcaaagagaggtgcccttcctttgtgctgccagccctctgtacccactctctcctagcaactcacattaccttataatagtcttacacaaaaaaattctgtcatctctgttagactgggagcttctagaagacaacgattttgtctttttcattgtaacactgcagggtctagcatgctgtgtcccagagcaggcactcaacaaacattgtatgtggccagttgtcccctcattttatcaatgaggaaactggggcccagagaagggaaggaacacaattatgaatacacatggagttggggacagaactgggactagaaccccgaactactcactgtaagccccaagccctttctggtttaattgtaaagaaatagtgttagccaacatcatttggcccatgggatgcaggtcccgagggcccagcagcctccagggcatcttgatctcccaacctgtgatcaccttcaggcctctgtgacaagtagctcctccaccttgggccactctgcatgtctctcagtcctcttaccctggggagctaactgagcaaatgctcttggccagtgtccattctctctccttcgtagctcttcctgagagatcctgctccttggcccaccaacactggggaacccagtccattcaactcaactcaactcagtgcaacgtaaccaatagtcctgcatcctgctgcttcccagcccttgaagaggaaagagcactttcctgccctcggaagcttcatccagcaggaggcaattaccatattcagctcagggtgtggaggaaggagccgggagcattgccgttgccaaagaggacatgaacaggggaggccactttaattgggacctaacataggaggcttgtgcttggaggaccaagtcccaaaaccacatggtagatggagaggaggagtccagtctgaaaaacagaagccactctaggcatttcaaacagaggggatttaatacaaggaattgtttaataggtgatgggaggaggaaggagtacagaaggagcactgaagcagtcaacggataccagctgcagaaagaaacagctactgcccctagggctaggaaaatgaaaggacagagatgagcttttcagaacccaggagctcagaggagaagccctgcacagctagtattctgatgtctgaagaggggcatgtctgcccgatgtctgatggcccctcaaagggacatagcagggctggtgctgaaagcgcagaaagaagctagaggcaggaccctgcctgacaggaacaggagagcagggagtccccatcatccccttccactctacctcagagcctcctgttggcggaagctaacaggacagagtctgggagatgtggcttgtggagccctggccctagcatcacagagcaggatagagagggcaggcttgggagctgagaaacagtaggtaaatatttggcacaagccccttctctccagctagtcccatgctgatttgtggcctcctcgcttgtttctgggaagagattatcacccagttgtgcaggtaaaaacagggcattttgcattcacaatcttaatttggaagccagagaggactggcttggttatgggtgtgctggagccagctcctgcaggctccagagagagctgagagccagttgttaaattatcaggaatttgtgagccagctgttaaatcattgatagcttgaaatctaccatggtgggtgtatttacaccacggaaattggcaaacactacacatcagagctcttttttcttctccccaaaaagccagctgttaaacattaaccaacacatccctgactacctatctttcctcctcctctgcctactcctactacacccacacaccatccctctagcccaaggtcacgtggtacttactccagtcccctgcagagagctcattttctgatcaatgactccttctcgcaaacaggagggagaatggcatgttgttagaagcatgagcttaaagttgacacaactgaggtgggtcccagtccttttgcctactcgttatgtgaccctaggcaaagtcctgacctctcaggctctcagtttccagtttcctcatctgtaaaatggagatcatcatacatacctcattccattgagggtgttgttgaatatctattaataaaggagaaccccaggggaaaaaaatcttaaataacgcacacaaatgtttcagcaaagctaaaagtagcttgcacaatatcatctctgcacgttttgccgagggaagcctgagcacagagatgaaaaggcgcttgccccagcttcccttcccagaaaatggccaagttcagcctgaatctgaacttgttcattgctctctttgttattcgactttgagagggaaacgggcttacgtttgcacagacaaaacagtaaataaattaatctgtaaaattattagtaaaatagtaaaaaaattaatctatttcaagagggagtattagtttattgctgatgatattgctatttttgccggtaaaatgtgcctccttatcacatctttttaaaaagtttttaataaagttttcttgttattaaaataatacccatttattatagaatataggtaaagtattaaaaagtaaaaataaaaagcgataatcacactcccgggaccaaccagtgttaacgtttttactttgtgggggtaatttttacgtaattgcgagtatactgtatatacaatttttatcctttgttttgttttttacttttttaattcattatagtattaggagaaataacactagctgctgtaaccgagttatctgagaatcttggtggactaacacagtaaaattttatttatctcttatataaagtccaaagtgggtccttctggttgttagcctttccacgtgatcattcgtggacccaagctcctctgtctcatgtccccactgttccttaggcctcagggttctccgatagatcctatcaatctggttgacaggggggaaaacggggaagcatgaaggatcaggaacttgtgagaggttttcatggtccaggcctggagtaccatgtccctcccacccacattccattggtaggactgtcacatggccgcacccaaccgtcaggaagcctggaaaacctagtctggccatgtgcctaggaggaaaaggaaatgaatttggtcaacagctagccagcgactggcacaattggaatatcacttgttctaacctttgataacttttataatataatacttaagtctataggacttagatcaagtcaccccctcattaaaacccttcagttgctcctcttgcattcaaaatgaagctcagcatccttggcatagctggtaaggttctgcgtggccttgcacctgtccaccttgccggtcacattccttgctcagctgctcttcaatgaccatttacagctttatcggcactgtttcaggtccttggatttcccaatctctttcctgcctcaggacctttgcacttgcaatttcctccttccaggatattctcccccttgctctcggctcagccagctccttcaggtttcagtgcaaatgccaccttcctggaaaggccctccttggcctccagtctaaattagggtcttcctgtagttttctcttttggagccctgctcttttcctttatgtcactgatcacagtttgtaatcctctatttatccgtgtgtttattgcttaatgtctctgtcttccaccagaccctacacttcatgcaatctaggaccatgttgattttgctcactgtttgatctggtgcctgtctggcacatcataggtgcccaacaggacttgctgattgaatgcacgtatcctaatatttcatcatgtgtctgtattaaaatttacttcacttttcccgtacttcttagacactcatttacacctgatattttgttgttctaaataagcctgactctcttattataataagtggaaggaaagagagggagttgctccacccttcctgggccatccacccagccatcttctctaggtccccgcttccctccaccgcacacagccccaccttaggccaccacatgctttgtggagggtcactacttgcaccctctgagccgtctggttatggtccctcagaaagatgcccctgcatccttattgtccacccgccgaaggctggcagtgggacagaccccacctcccattctgctccttctttcagttccctgcaaacctactgctctaggctctatgagtgcatcaaacattcctgaaggcttgtgtctaacaaaagaatttttggtgtaagaaaatattttaaattgtgtacaaaatgtggcctcttctatagctcaaggggacataaagaaaaaaaaaagaatattttttaaactttacagaacatgtgggtggatatactcaattatttttctctctctctcttttatatcctgccatccctgtggaaacagagggcaccttctccttcaagcctgtgtcatgcagatctccaccctttatgcaacccctgacaagcaatttaaccccagtgttttctcaaagtctgcattgtttctttgagaccagtgctgtcctgggaggagggctggcagcagaacagtccacgatgggcttggatccctcacacagacattgatctgctggcccctgcaacagaacttaccagggtcccccatggtctttgtaggggccttaggagagctttccccttggctgtctgaaggttcactggaaaatcaacttccaattggggaaaaggcattcacatgtatttaatatatatacatgggagccttcagaatgaagacccagagatacaggggaaattgtctatttttatgcttagattcaataaagtctagacagccgcgtaggaatgtgattggactaaaaggctctgatccaatgctgatagactgagtggggaacccagcaaggcctgtctgtctaggttcttcttgacctctctgagcactcattccttccttctggaagcgcagggctctctccggaatgggggtcgcatgacctacagtcaaataagctaagttacatgatttcttcatagccagtttttacacagaaacttggagggaacactggcgtaatattttacattttatggctagtttctctgacccgctttggggaagagggattggagtttctgtgattggccccagaggagcaagggactgagggacaggaggccaggagaaggtcagagaaaaactttggcttctgaggagacttctgaggccttccttttggagtattgttttcagagccctaacacccttcaacctccattaacttaagacattttcctgccagtgtgatgtgtcaggacagatcttatttctcacagcacaagtcaaatcctcagtgaggatgcatgctcacacctcccaaaggcacactcgacaacccggagataagagtgcagtctagagtcatatttaggaagaaaatccttccctaagtacactgtgatctgcagagactgtccctcagtaggcccagggctccagaatattaggctgagcccagcgagtcttcactcagagtagcttcacgcccctgcccaggcgttgcctgtaacactggctgaagcatgaaagctccccttcttgcctccctgaccctacaccagatcttgttctcagggagagtatctctgccttccactgtgaaatttaagaaggaaaaaagagaggccccaacaaagggcttaacctataagactcataaacttgttggagtgaattttactcatgcttagtagttaagtattaaagatgaacaatgaaaacagagaattagtttttctaagaggaggctgttaaatcctactggcttctagaatccttagtgtccattttactccccactaacttttctgaggattctgaactgacatcagatgggattttgcagccgggtgcagtggttcacaactataatcccagcacttttcaggggagccgaggtgggatgatcatttgaggccgggagtttgagacctgcttgggcaacatactgagacccctatctcaacaacaaataaattgttttaaaaattagctggttgtggtgacaagcacctatggtcccagctacttgggaggctgaggtggaaggatcactcgagcccaggagctcgaggtttcagtgagctatgatggtaccactactctctagcctgggcagcagagcaataccctgtctcaaaacaaaacaaaaaaaaaatgggattttactaactcaaggcattacaataacagttaccctttacaataagttaccccttgctgtgccccatccctggctattctcatttcataattatcttctttaattctcagaaacaaccctgagaaatttgtattgttcttactatttttcaagtagaagaactgatgctcagaaacgctcaatgagcatccaagctcacatggatggcaatatttactcttgttggcaaacgccaaaacttagggttttatccgtaagttaccctatacattctgaagatttcgctgaaggagaaaatgcagctttatggctcccaattaaacctgaactattagtttggattgatttttatgaaacagactgctttctttgacgttagcaacatctctttcagggggaaaaaaaatccttataagttatccacttggaactttcccttctgtgattttatttgtattccaaatctgctctgtggtcattcttataaactccttggaagttagaatccattatcaatcaccatccagtggagaaaacacaaaccacttcagtcatttcagagggagatttcatacaggaactggttccaactttgttggaagggatggtggaggaaaacaggtagagactgttgtggcagatacagttcttcagaaaattgccatgccccttgggcaggaagaatgaaagggaaagtgatgttgccattgcccctgaaatgcctgaagtggtttttgttttcttgactggatgttgattgataccagatcttacttccagggaatttataaaaatgaccacagagcagatttggaatacaaatgaaataatggagggaaagcccaggtagacaggcctccgaggctcctgctgctgctgtttctgctacttttggggccctatctctggccactgagcatgcagccaggggcccccacactccaacggttcaggaatcagaagctgctgggccccacagacacctgcagttactcgtagctccccttgctgcaaccagagcagaggaagaaaaaaaaaaaaaaaaaaagcttttccctcatgcatgcttatgcgttctttctaatctcccatgaccgcttccctaaatggaaaccagctggcaggcgattctgggaaatgtagtttcagggcttccagtccctgccacaaggaggagagtgtagaagagtgagtgtgaactgtgagccaccagacagttatcagcccccaccccggccagagttaccaaactcccttgccttagaatttaactcatcacctggattggtctcaaatgaatgtgatgattctgttacagccctggaattgcacaagacgaaagcttaaggagagtcatgatatttatctctacataaagactacatgtgctgggagaagtgcaacctttgtgggagggaaaccaaaaaaaaaaattccagctcaagctggggtgttaggaattgaagctggcctggctcccctggctgaactgcaggccacggtggctctgaaagcatctagtggcagcattgccccatctgttcccaccatgccctgttgctcagctccttcaggtggcaagaaagagccagccccagcgacctttgatgacagggtgtctgagacagggttacccagaaaacaggctctgagacaaagatttgcatacaggaagtttatcaggatatgttttcaggaacagaagctggaagggaggaagccaagtagcgctgggcagcgggagaagtcaaaatgtgatgcagtggcaatcatgagctcagccaatcccaggggacctcgggattccatggtccttcacgggtgtcctgaattgaggcagcagggctagatccatgacccttcacactgactgctagctgcaggttgcccccagggagggggcataacctgaactaacatagctctgattgggtgcaaggcatctcaacaggagccagatgctagccgctggggaggagggcctccatcctgggtggggtgtctgggcgcacccctggcatccaccacacaggataagaggagtcaaacggaagacaggcactgccctgggctcggtgcttagctacatttgccatgcagtctgagctgtggagggacagagtctggccaccagcctcactgaaaccaccatcttctcacacctggattactgagccagagcttccagagtctctgcttccacgtttgccacactaccatccattctgtaccccacagacagtgcaatcttctccaacctgaaatcacatcacaggctgctccgcttcacctccccaccctcatcgctgttcattagagtcatgtccagaccctttgtcatggtctctgggggcaatgtgacctggcccctgtccacctatgcatctgccaccgcccagccacaaccctgcctccctcactgtgttccggccatgctggccttttctgttccttgaacattccaagctcttccccacctgagggacttggccctggcttttgcctctggctagaatatttccttctttccagataggtctcagctttcttataacgtcttgagcggagtcttccctaactacccaactaaagcagctcccctagtaaattacctgggtgtaatgatgtgtgtgcctgtaatcgcaggctgaggcaggagggtcgcctgaacccagaaggtggaggctgcagtaagccaagatcgcacaactgcactccaggctggataacagagcgagaccctgtctcaaaaaaataaaaaataaaaaaagacttccttttcccatcacccttttgatcttctcatagcattcatcactaactgaaatttcttaagcattggaggacttgtttctgctatccctcctaatcaaataaaaagctctccaagagcaggcatcagtccctagaagggtatcgagcacgcagtaggtaaatatttttggaatgttgtaaattgaccaccttttaataagggggacacctattgggcagaacttcttgagaaccaccttactggcctgtggcctccctcatacctggtcttgtcaaggctgtcttggctggcacagtggtcccctatccagtcggcaatacttagggtagcagggatggcttcaccagtcaaacccaacagatgccatggtgaccctgatgcagaccctcaacatagtcagttacacatccgtgtctccatcagcacttcgtcaccccagtcacagaagccctctactttctctcatcggtaggcagaatgcacagtgtctcgtgttgtttgggaagtcagtcatttgggggctgatgattctgggaggtgaagacatcgtggctgggggcccagtggtttccactttgtcagctgaaatcacctgagagttgaaactcgcttcccaagggctggaaagctctctggtgcttaacatcttttgatttcagctccccactattaaacatgtttaaataaaaattactactgccatttgctgagcacctgtcctgtaccaggacctgtgcttggtccataattcagagatgttctggaacttgcctgagagaggactgaacccagtttgtgagacacgctggcctacttccactgtaccacctgagaaattaaggagaaatcaaagagatgggaggagttcctgttagtacaaaatagttatatttagtaaaataaaatatgacagatcttgcttcaaaggtggactagttttgttcacaaagtaaaggaaggctcttctcacccccactcctgtatcattccatggaagctttgaataccattccacacactttgtaatttcactaataaagagtctgcagaatttgtgcgcattttaaatctagacacctgtggaattcttcaaagcttggcagaagattggtaaattagatccccatcctgtcagacaaaaaaaaaatttctccttgtggacagcctttcccactcaggcaaagtggtccatttacatagaaatgatccttttagaaggtgttttgtgattttcaattgtccctcgaaataaaaatcacagctcctgtctcaccttggttgaagtgttttcacactccagggagttgcttaccgtcacctgaatatagaattcggtgggcattagtttcaaactgatactactcacagctgtcttcagggtttcaaaaaggtgtccaggtggccttggaaggtgtttctcgttctgggatcaggctgagcgatccccctttattctggaagctgcagggcttcagtctttaggtttctgcctaaggaaaaatgcttcctggggttttctcccaagacttcagtggaacccagagtattgtctgtgctgttgcctgatgacacaaaagcataacagtgagagaaaagcaggatacctttaaaaccatttcttttcctaatttcacaataatgaaaagacaggaagaaacttatttctcgatcaagagcaacatgccacagtgaagtagcatggacattaaaattaaacctgcatttgaatcccagcagcctcacttacagtgaccttgtgtgaagtccataacctctctcagtttcagtttcttgatctgcaaaatgggggtcatccccttatcacttacgtttggcatgaagattcagtgatatagtgtgtgtcaatttcctcgtatggctgcagaattttaggtgggccataaatcggaaagaagagatgacattccatctctaaattcctgatatatttagccaagcatttggaagccagcagggcagatgcaggagataacgctatgtttagcccccaaggtccctaatgaggggcactcagctgcctgtgacactagtcaggtctcgctggctcaagaagcttagttttttgctgcaccatagcttggttataattgggactgacgtcaccattcaggaaaaacttagaaaaacattctctattcctaataagaaataccaacagacctctagcacccttctggtcctgaagccaagcagactcagcaataccccgtatctttatgggtggggcacagggagaggagtcagggccgggcccaaagggcctcacctttgccgtcatctttccagcaccccagaagacgtcgtccccattatagcacggacacgtgggtgtttaattaatagtcatggtgatcatgatgatgcttatcttggcttcaattcacatgtgttagttccattattgattttgttctcctcaaattaaccagataaagtcacaaccaatttaaaaacaattagtttgattttcatctgtggtccagcgggaatctgtttttcctccagtattaataatcgcattgtacagttaatgaattgctgtgagatcagtggcgtttgggctaatgtggcatttctcttttattcttgtttgatttgttttgttttgtttttagggtcaagttgtattccggaatggggagagaatggggaccattaaatttactcaatttcaaggtaggcattttgatgcttattctttctagctgataaaatttagattcaggaatgttgttttatgcaatataatacatcaaaaggaatgcaagtgtgatgttccagataaaagaaagcagagccaattgaaaacacttttctgaaaacattagtttcaacctatttggaatatttttttctcagccgcatcatgatcagccctccatctccatgggttccacgtctgttgattcagccagctgaagactgaaactattcaggaaaaaaatggatgattccgtctgtaccaaatacatacagacttttttttcttgtcgttattccctaaacaatagagtataacaactatttacattttattaggcattgtaagaaatctagagatgatttaaagtatatgggaggatgtgtgtagtgtataggcaaatactaccccattttatatcagggacttggtcgttgggggattttggaatcctcaagggatcctggaaccaatcctccatggatccctagggataactgtgcttccctggcctattctgccttcccgcatgactctaaaaggtttatgagattatgagtggtggggattaagttagtattctgaggacctttgcattgttgtggggtttggggtgttttttgtagagaaagggtctcagtatgttgccctggctggagtgcagtggcaatccacagatgcgttcatagcatactgcagcctcgaactcctgggcccaagcagtcctcccacctcagcctcctaagtagctgggaccacagacatgcaacagtggcacccacctgtttttggttttgattttagagatgttcaaacagactctaaagtagagagaacagcatcatgaacccccatgtgcccaataggcagtttcaatcattatcgacattttgccaatcttctttcattttgactcaccccatcccccctttttttgctgtagtgttttaaagcagctcctagacacgatctcatctcattctataaatacttcagtatgcatttttttggatagggaggttttataatataatcacggtactattatcacacctaaaacattaaacaattcttaatatcgtttaatttcccagtctgtgtggatcccctgatcatctcaacgatgtcttcacagatgatttgttggaaaatccacacaaattccacccattgcatctgcttgaagtatctctttagtctcttttcatctattataacccaccactttttacagaacatttattttttgaagaaaccgggtcatgcgttgaactttctgttgctgtcagaagggcctcagaaaccatccagaccaatttctttgtgtgatgagggaaaaacggaggtgcagacaagggccatgtgaggagcatccttgaggaacagggctgggcattccttgaggcagaccagtacagccattagcggggtgattagccaaaacgactagatgaacctctcatcaatacagtgttcttgagcagccgagtgtttctggaaaacccagaaacaagagtggtgcctgctgtgcccactcactttgagcagatcccagcgccatccaggggaaagcaagaaattaaagtgagttattcagattcattcagacaaatcccaccaggattcagatcaatcaggagaggtgttcttcagcgctatcgctctgtaatgcaatcttgtagacatacccattcgtctttctgtggcaggtaattgaaacgcgtgtcagctctctggcgtgcacaaaagatgtaattttaggcaaacgtaattatttttccatttgttaaattttacttcttcattggttgaacaaagtaagcatcttggcaaagatacttactttttttttttttgagtgattgcaactaaattctcttgtctcatttccagttctcaaaattatatcattctaagaaagtattttgtaaaataaggattggctgatcacagctaccagtgcatgccaattgtattgccttttttttttcatacgttaggtttaaacaccagcttcagtcactatttaggcatatctggatttataaggaaggcagtacagcaaacagcagttcagagcttgcgctttgtgggtcgacccacccgagatccagtcacttcctcactgtagaatttcaggcaagcgacttcgcctctctgagccttgattgtcctcatctgtaaaataggagtataatcctaactaccttcatggaatatgggaaaaactaaatgagaaagtatgtgtatatttaactatacatacaatatatttatatatatgtatatatatatatatttttttttttctcagcaagtaagtagcaattatgattagcaccttgtcaacattatgacacctttctggggcaaattcaggtttccctgaagtgctgaaaccccctggctgcttttttgtctgccatttacccctaatagcggctccctgcacttagtgatgtataggaggtgatacaaggcagggccttagcgatgatctcattccagaattcatggtataaatggggaaactgaggtccagggatgagtagtgtctcccagggacacacagctggctagtggcagagcagggactggacctcagcttgctcttctgcacattcccacggacacccaggcacaagtgtgctcccctcaccctctctgcatttgtgtccagcttttcttgagggtcacagctgggccttcaataaaggccagatgctcctgtttacatgatttttttttttttttttttttttgagacggagtctcactgtgtcacccaggctggagtgcagtggcacaatctcggctcactgcaacctctgcctcctgggttcgagtgattcttctgcctcagcctcccgagtagctgggactacaggctcgtgccaccatgcccagctaatttttgtatttttagtagagatggggtttcaccatattggccaggctggtctcgaactcctgacctcgcagtctgcccacctcggcctcccaaagtgctgagattacaggcgtgagccactgcgcctggcctacatgtttttttaaacagacattgatcctcttgctccaatagagggaccttgtgttattttaggactgaaatgagccaccagaatgcagggggcatatgcgtatcaacacaacagttggttttccaaatgtaaagggtttcagaggtgccttatctaccaggatggattattgaataggccgtccaagctgtgcgatgagccatccagggagttaacgcctccaggagcagccctgtgtcagtgatggatgagaaggggaggataaataccccagcatcctttccccttgggtgaggcaactcccaggtgtgtttggctcttttcccagagctcccacagtaggactgagcctcggttgcccacaaagaaacctgctcactcatgcaccttgtcctggctcccttccctgcctcacttccccacaccactaacagcgcatcctaggatcaccttccaaataaactgcatgccttcttcccctcatctcaggcaggtgctattcttagggagccacccttggccgtaggtaaggcaggtattagcatcctgttgggcacacacctcaggcctgaacccctttcatctccagattccatgctcctccctgatgccatggctgattttcacgacaccacgtgtagatgaggatgaatactagagaattggcttttttccccttaagagaaaaaaagtatccatgttactgccgaagtctaaacatggctctgaatttgcagcagggaaggaagttgagtgaagccgtgattagagccttgtttatgctgttcttagagaaaactcagcatctgccgctccaactcaccgaccctgccttcattaggcctatttgtaagaatctcggggaatgataatgtgcttgaatttcacactgcttctatgcaacataaagggctcaggctttggagttttatattttggcacctgatttgaagggaaggggtcttccttcactctaacgacataattgtcattcagaacgtacctagtgaaagggagacttgtccttcccaattgcagacattaattaccatttggtcttcagggtaacagatacggttgtattcagtgcgcatttcctgagcatctgccaggcgctttaccaagtcctctggagaaaaccaagttgaataagatacagtccccgatcctccagggcttcataatctctctggccgaatgccagtgcttatgaaagcaggaagattatttcccagaacctactagaatactttcagggctagtttgaccctactttgagactcttgaggctgatttttaataaccttttcctctgtcaaggcctgcaattgtagctcgcttcaccaagtcatgggtctggaaaggccatttcgtcagactgtcactcaacttgatataattaaagagtggagtcatagtccataatccttcaggatataccagcagggttgtggacaagcaggaaccaggggacacacggaaatgtggactcttttccagcttgaccctagcctcgacacctcccagccctcatgttccaggatttgcctttcagggagcctaagaaaggtggcccaaaagacagcatattttacaggtattgggtttcattgagccatcgactctccatgttgaagggagccctgattctcttatacaacattcccactgcttgaatgcctccagtgatggggaactcattccctctcatgtggaaagtatataggcttgaagcagacatgcctgatcattgacagataggcaaagaagcttagtctctttgagccttcatttcagttaaaaataagtaaataaataaaagatgatcattttccttgccttgagagtgactgagaacctgatgatgtgaggctgtgatgttcctgtctcggggactggcacagagaagggtcataacaactgttggcttccttctctcttgggcactcttaacagtgaccccagatttacactctcccccgaggaatttcttgagaaaagtgcagtcgcgcttctttaggacacaattcgcacacctcatttcatgggcagtcattgtcgttggtccatgaaagtccctcttgtgtgtccatttatcccccttatttccctcctttattcccatatcccactcctacctcccccaaggaaaggcaaacaccccatattgtgtttgtgtgtgtgcttgcaagatgcgtgttgctccgtacatcagtgccactggcttaggtatcttttctgttctgttttgttttttccactcaacactttgtttctaaagacatctccatggtcctgggtgtgcttctaggcatggctcctccctgctccctgcaggagccatggtggggtgcatccatcacttcacccatccaggcccctgggacggacacccaggtcactttcaactctccaccctcacaaataatacatgtccttatatatgttcccttatggacccaactgggaatttccttaggacaggtttccaagagcagaattgctgagtcagaatctgtgtgcacattgaacatgcccaaaacctgccaggttgctctgcagaatggccttgcccatatccacacccactggcagaggattcctgtgtccctacctaccacccacatttgggatttcctggatccctcattttttgacggtctaaaagtataaagtaatatcatattgtgactttacgtatcgtttctctgattcctaatgagtttggatatttctttctgtgcttattagtcatttgttaattgtctgttctgatcctttgatcttttttcttttctttttttcttttttttttaaaaaaaaaaaaggcagggtctccctctgttgcctggggtggagtactacagtggcacaatcatagctcattgcagccttgaactcccaggtgtaagccatcctccttcctcagcctcccaagtagctgaactacaggcgtgcaccaccatgcctggctaggtttttttttttttttttttcatggaggtgggagtctcgctatgttgcccaagcaggtctcaaactcgtggcctgaagcgatcctcctgctgtctcagcctcccaaagtgctgagatcacaggtgtgagccaccgcacccagccctttgaccatttttattttgaagttactgtctttttcttgttggtctgcagaagttccttacataagctagatatcaatcccttattggctttaggctttgcaagtatcttctcccattctgtcacttgtctataaactaccttcaagtcctggttgagccttcaagttcttaattttgatgtagataaacccttttggtttttgtcctaaggtttgtgcttttgaagtttctcaacaattatttcctgtcactcctagcaggtgaccccctacctgccaggtgctggctggcactggttgggtatgggggttggtggggctgagtagggtaagatgcaatccttgccctcagggagcccacagcccatccagtgcaatgaggagtagacacagacaacagcaaagtgtgatgcgtgataagtgatggcacaggcagctgtgggcattcagaggagggcactcaggtctacctggcagaatctaggaaggatatctgagagcagtggcatccaagatgaattctttttttttttttttttgagatggagtcttgctttgtcacccaggctggagtacagtggcacaatctcagcccactgcaacatccgtcccaggttcaagcaattctcctgcctcagcctcccaaatagccaagattacaggcacgtgccaccgtgcctggctaattttagtatttttagtagagacggggtttcaccatgttggccaggctggtcttcaactcctgacctcatgatctgcccacctcggcctcccaaagtgctgggattacaggcatgagccactacacccggccccaagatgaattctgaaggacctgagggaggttgccaagaagaagagaaaaagtgctcctggggcagacagcctattgcatatgacctgggtcccctcaggtacttagctcttgtccttgggccagtttgcctagatcgatggacacatctacccctggcagttactgtaccccagggtatttggccaatgtccacctagcctgttaaaaatctcaaaacaaaggtcagttaactaaacttatgaaaaatatggcaatagcgtattgtttgtgacagtagagcacaaagtctgtctctgttctatgctgctgagaggtaatgctgggagagggagagggagcagattgggatggggtggaagtgaaaaatcacttcctgagaaatggctgttcatcctggggaagagcagagttgaggcccatggttgccagattccaagtctgaaggatggtcaggagcaggagccgaagtgatctggggccccagcacagacccaggacccatgaggggacgtcacacagagcaggttttagcttggaatgaggaggacctttccaagcaattgcagcatcattgaacaggagtttggggctacagagatctcccatgcagccccctcacttagcaagacccaggttggggatgggacttccccagggctactcagagtgaccgcaaagccagcaccagcttgggggctcctgtcttctagctcagagctcttttctatgcctgagtttggggggtgggtcctagaattgagtacatttatagaatcttttatttttgttgagccaagatcatcttttgtttcataccccagagttatacattgtgtctcagtgtgcgtgttttcaacaacaatcaaattctaaaggacacattctggctcccccaatttggagccagaaccaagtgagaagacaagtctacccctggcagttattacacccaccccaaataaaattggatacagactggatatagacatatccacatatagaccggttgaccttgtttgcacggtggagttaacaagcccaagagttaaaagctgagagggctgtgtgcctatcatggctaccacctggctggactgtgggtgaatgcaagaatacaggggacacagtccttccatctgcagacccaggaggcaccctgagcagagtgcaggggatgagaccttatactgcctgggacaacagaagcaaggctagccagcaggaatcagaagccctggacacacacaggacatggcttctacgtgaagagctgtcatgcacagagccctgagtccacagcaactaggacaccgggaggggaggaacagtactcagggaaggcttcctggaagaggcaggtagggtttggacaggttaacttgttaaagggagggaaagccacctcccaagtggaggaaccatggtgaggaacagatggcaggaagaaaatatgaagatatttcttgggaacttcacatagagcccacagttactttcatcatgaataaaataaccgtaatttattggacacttaccgtgagttaggttccaagctaggaacttggcatatattctcgtctttaaccctcttatcaattctaaagttcccagtttacagatacagtcatgcaagatctgaaattgtgatttaaaaaaaaaatctctgtatctctggcccctagcccagagcctggcacgtaatgggtgtccagtaatgtttgttgaatgaatgaatgaaatgataaaactagaggatttagtatcaacatctctccagcatccaggatgtccaaggccacctggcttgaggacacgggaatgactttaacttcccaccacctgcagtgctgcttttgagagatgctttatcatgaaataccatgagctgagcctggcatgcagtaggcactcaacaaatgtgggctgaatgattggcagccctgctcagtatgggggtaaaagtatgctgaattcagaactaggagacccatgttcagttgcccactgggtcgctgctgagcacttggctctgagtgggtacttaacctatttgaggctcctcctgcctctttagaccaggatgaattatgcccaattcatggtttgccatgagcattaaatgcaggaacttgtgaagcgcctgtgagcctccaacattgcccccagggagagattatggtgattacggtcggtgggaagctgagtattatttcagtgccatgggacggtgcatacagcagcgtatgtgagtcagaggggcaggctgtgtggccggggtgcggtggggtgccagccacaccattccccactcttgatgattgattctgatcaacctgcatatttcatgcgctgcctccctgcctcaaataaataaatcagggcctcctctgagcagcaggacctgattggggcatctgcagggctcaggacttcaaaaggccaaagcagggatgctggagccccccagcagattctgctaatgtgacatttaggggccgggtgacccaggtaagcaacagccgcttgcgcagtgtgatgccccctaaatggcgaggacccttgtggggagaaggaagtgacttttacagcccctgtttccaccacccacggtcagaggaacacaggcagaagtgtggcccaggggattccctgttctgttttctgaatgtttctaagggccagcagtgcacctgcatttctgcaaagaaattcccttagagctagagccccaggaggcacttcctcagggtgtgccttggaattcctatataaactccaggcattttgctggccagggtctgcagctctggaagggacccgcctgcacttcacagaggctttcatctggggatgggtggacaatcctcctctttgtgcttcccacattcacgaggcacaggtggtccatgaagtgggcactcggcacaaactgtcacctctcaggaatcccatcaaggcacccccgtgtcagggaagagcatgggctatggaaaatgtccagggtttgagtctggcctctattcttattaccactggggccctaggcaaagccacaagctgtctgagcctccgtctccttgtctttaagtgggactgagaccacctactccacacactgttttagctaggcaagaaaatgtacataaaatagcactgatccagcacactatagaggctcggtcagtacccccagcccttcctacctgctccccaccattctcaagcctgctcttccctgggggccctatccctgccctcaaactcactgccccttgctccatccttctaaccacaacctttccctaaatctgcttcatccatgttcgctggtatcctcccagatgccagatcctcagaccctgctcaagggtcttctcccagcctctctgtggcatgtgacactgcagccagctccatggtgaaggtgtgcctttccttggcttctaagatgcccactccctcccaacaccctgctcctgcatcctggtcaccccttcccagtctctgctctgcccaccccaggggtcagggctcctccagagtctgcacttgatcctctcctcttttcacttggctcactttccctgggggtctcattcctgcctccaactccgattcccatcttccatgccgatgactcctgctcgccccccagccacacctctcccctcagctctagactcaagagcatctctgccttgatgctccacaggcatcccaggctcagcacatccaagatggaactcattattcttccccttgtatttgaagccctcctgggttctctgctcagggatgggaactgaaactcctcatccccaccagaaccttggatgaccttggtccccctcttcttcatctcccatttgatcactcagttgtcctgattttacctggaaaaaagaaaccttgcttaaatctgatccccatttccatttcttctgccaccactctgggccagtcctcatcatctttatccttgacgatgaccaaaacaatgaactaaacacaccaagaactgtaagaaggttgagagtaaatttgaatgcaccacttgggtttaaaaacacactgaacaagtgcaaggagccaagagcagtgggagattatgcttagtatgacacagcagagcaatgtggcttctgaaagatgcaaattcaacctaaggatgcatataatagcaatgtgaactccagaatgagggaagggatggtggcctctacttgctgctgaccaaatcatgccaaaagtgcactggtcagtccttggatctacactctacagaaagactgactttatggaatgtggcccaaggaggggctggggtgggggagcagggagattgaagtgctgttctgtaaagaggagttggggggtggtatcagcagactgacctgtctttgtcttcaagtatctgggcctatcctagggaagatggagcaaaaatggtctgtgtggttctagagggcagagccagttgagcagggggaatgttacagggaaacatttcagctcagtgaccaggaagaacttggtaccagacagagtacagttgtagggagcctgggctccccatctttgaggtgtgaagcaaaggatggacaaccagttgatgagacagagacaatgcaagagaatgttccagcctagatcaggttagaagttttgtgattctaaccagaagaggcattggagaaagggaagcctgccagaatatatccagggcctgtgaggggagcaagagcctggaataggagcacccagacacaaacccagatcccagtctaactggccactgtcttttgctccccacagacagcagggaggtgaaggtgggagagtacaacgctgtggccgacacactggagatcatcaatgacaccatcaggttccaaggtaaggcaggtgggcttctcagaggagggggcctgcccagttgctcccaagcctggacattgtctaagggttagggacaagctcagcatccttggcttcagggggtcaagggaacatcctcaacacatgcactcaatcgttgagcacagggctccaatcacttgtatgggctccagcacctggcatgggtcactagagtttgtatgaagtgcacactgaggtgtttaaaccattggatggccaggagtaattctttttaaatgtagccctgctaaatttaggtctatcttctcctctggcaaagggtttgactgggttggaaataaggcctgtctatctgctgctcttcctagaagattatttcttctcctctgctagagaactcctcttcagcttctataaccagctcaaatgacacctcttctgtgcgatcttccttaattgccatccaactgagctaatgactcccttctctttgcttccagtctttcttctctgcctctcttatggccactgtcactttacattgatattactaggtgattcagctatgagcccctgactggatcctatttaactttaaattcctggcaccagccaaggtctgatgcatgttggagacttggtggtatttaatgacaaaatgaattgatcaagtggatggatggatgggtgggtgggctggtggatgagtggatggatggatggttgggtggatgagtgggtgtgtggatggatggatggatggaaggttgggctggtggatgagtggatggatggatggttgggtggatgagtgggtgtgtggatggatggatggatggatggatggttgggtggatgcctggatgggtgtgtgaatgggcagatggatggatagatggataggtatgtgggtgggtgggtgagtggatagatggacaggtagatgggtggacagatggatggctgggtagatggatagatgaattgatcaagtggatggatagatggatggatggatggatggatggatgggttggtggatgagtggatggatggatggttgggtggatgagtggatgagtggatggatggatggttgggtggatgagtgggtgtgtggatggatggatggatggatggatggatggatggatggatgggtggatgcatggatgggtgtgtgaatgggcggatggatggatagatggataggtgggtgggttgggtgggtgggtgagtggatagatggacaggtagatgggtggacagatggatggctgtgtagatggatggatgaattgatcaagtggatggatggatgaatgggtagtggatagatagatgtataggagggtgagtggatgagtagacagatggacagtggatggacggatggacaaacagacagtctagtcacttaatagcaatagagaaagctgccacatccatattgttactttgattccagtgggtcagcagaaattgggacagctggctttctgtgccaggagcttttaagttccttctttaaagcaagggcaccagagaaggctcttccgcaggccctttgattagactctgtcatgttcctatatttccactggacctgagggattcagccttgagaacattgcaaagcaaaactccagtcagcctctgagaaccagaatggtctccacactcaggtgagcctccctatcccaactgagggagctgtcaccagacatatcgtcaagtattacctcaagggtgacaccccagattcacacagcctgttgtaaccaccagagccctgatccccaagatcggcatgtctgctatcggactggggagatcagggtttactgaacaaggactctgggtttacgaattgaagaaaagattcaagcgccaaacaaataaaagacacaaaatacaacttacaggaaaaacacgaatttggtggggcagggaccagtagccaggacagtggctaaacaacagtcagagggtaccaggtcttcattggtgatgcccaggccctgcctttcagccccgggctctgcccccaggctgagagaacacaggaagccgctgtgccaggcatacttcctgcttctcagaccttccccactaccaagaccgtgaataatcagcctctgaacacagagcccaggcaggtcagggcagagcccaggccttctatccacacctggcctgggttcagctctcagccccgctcactcggacccctacactagcccccagtgaggcttctcacagctgtgctagccttccctcctcaatccattctgccctcagcagccaaagtgcccttgctgtcatgccaggcttaagatgccacctctgctcagagccccgcacgtccccactgctcagagcgaggggacctcactctgagctgtggccccaaggcctccatgaagggacccctcctcgcttctctgtctcctctctcagattccccccaactaaactgcttacagttcctcaactgtcctgaaacaccactgggccttggctcatgctgtgccttctgcccaggatgctctttccttctcatcttcctggccaacagccaactactctactcatccttcgagactcagctccttcgtcacctcctttctgtagcatttccttaccccgtcaggcaggactgcactctgctccctgctcgctctcaggcctcctgtctgatgttatcacatcacctggaccccagcgtcacgggcagcagtttgtgtagtagttagaccataagcttcagggttaggcagatctgagttcaaatcctgccacttactagctgtaagagccacttaacacctagaaaaccattgtcccctctgtcaaatgataataatcttaactacccctgaggctgttgggtggatcaagtgggaaaatctctgtatcttgcttagcttgtcataggcattcaataaataggattgcttattagtgcttttttcttttttcctatggctagtgtgtaagttccctgaaggcagggacagtgtatttttcatctttgtatcattggtgctcagtctcaggcctgacagatgggagttgattattaattgtgattaatcatcattaatgatgaatgaatgagtgaatggcaatgaatggatgaataatgaatgaatggaccagatgaaaagtgagaaagaaaactcaggacttctgctgttactaatactcatgataaaccaagcatttggtttccacaaagtcttaataccccttgtggagccatcattttgcaggaacagaagaaggagtaagaaggagacaactttctcttgtctattgtcaattttctggagttgtttctatacaataggccccaaacccagtagtgatcatatcacctgtgaaccaaacctcagtcttctttctcagtgtccatagaagggcttgtttccagccaggatctcacagatgccccagcactgttcttgcatttggtagccagaaggcacctgagccaggtgtttggggaaggatgatggacagaggtggaagaagcttccagatggtgagctttcaccatctggaagcaagaaatgatgttacctccatctccttgtgtctgctttagcccagacttttggcccttgatgccacttttcttataaatgttagtttacatggaattgcttaaggcttcacattaaccacatcagcaggttccttgatgttttcaaacctggaaactttcctaaatttcttacatggttcaaactcttttaatccactgaatgtttctcgctctctatttttttttttttttttttttttttttgtgagatggagtcttgctctgtcacccaggctggagtgcagtggcataatcttggctcactgcagcctccatctcctgggttcaagcgattttcctgcctcagtctcccgagtatctgggactacaggtgtgcaccagcacacccagctattttcgtattttcggtagagacggggtttccccatgttggccaggctggtctcgagctcctgacctcaagtgatccacccgccttggcctcccaaagtgctgggattacaggcatgagccaccacgctcagccaaagccactgaatatttctaaacacatttgaacttgctagcagtgttttaaacccagatgttcaggggagttctcactccctgctaccacatctgcccctttcctgcttgtctcctgggaagagaggcataactgggaccctggtggggctcccagattcccaggcttggctactttgtaacatccggctgattccacatacccctactggagagaaaagccctgaagtttcacaattccacagcagaaacctgacctaaaatagcagctaagaaagagggattcgcaggaagctgggggagtccctgaatccctcatcccaaaccagtctatgtctgctaaaactaaaacaggactgaaagatggatttgctctgaaaccctcagggttcccccgagttccttgtgctcttgaagaatgagcagcgcacctctgcagtcacatagagaaatggaatcccacagttccaggccagttctggcacagcagggagaggaaggtagcttctgcctcccacagttactcagagtcttgtggaaacagaaagccagatagagcttttaaaacacaatgacattgaagcagaaattctgcagccaaaacacctatgtgtcaccatggaaccaacaggcaaggtgtccatcctgttgaggagggatcatttattgtgtatgtttaggagcagagatcttgaggccaaagccaagttcttcatccccgaaggcacccacgggtacccactcacatcacccagccctgtgcttccaggccgttgttgccttgggggataaatggtgatggtttttcaatagtgtaattagaccaaatcaaattctagtcttctaatggctattaaatgcatcacaaatcctttattgattctatttagagaaagaaatacagtcctagctcaggctccctgttgagcagactggccaaccaccggatctggctcacccggtagatagatgtgccttgtgtagagtttgtgcgcagggcctggctggatgtcagggacactaaggcaaaggtgttctcggggaatgacttgcattgggtcccactgatgtcttctcttgatcctctaggatccgaaccaccaaaagacaagaccatcatcctggagcagctgcggaagatctccctacctctctacagcatcctctctgccctcaccatcctcgggatgatcatggccagtgcttttctcttcttcaacatcaagaaccggaatcagaagtaagccaccctggtcctcctctgtgatatcactttctaaattgacaagcctatggacacagtataggagtgccacatgacagattccccagggacacagaagtctgcagggcagagtttcccaaagtgttcctccgttgctaggatgttgtaggtgttacatgcatgtgagtacgtgtgtgtgcgtgcacgcacacacacacacacacacacacacacacacacacacacacagaggccaggctgctggttgcacaggagtttagtcaaataagtttgaggaagttaaataaaatcgaagagtccaagtccacgggccttctcagagctttggatatactcctgtactttgtggaggtccaggaggagagatatagaagacagaataccccaaacttctttgcccctatcccctagcatcgctgggaatcaccactgaagggggtcacaaagtccagtgaaatggactcccattggtacagttcattacggccaggaagccctcccttccatcatcccgtatgaccctccggataactcctcatttcacagagaaaagccctgaagttcagcgacagagtgctgctgtccactcgtggcagactgtcttcttggtttcttgtcttaatttcttttccccaccacgtgcccttaattctccagaggagagaggctgactgagttattctggtcagtcatgggtagaacaggccgccactccaggcggtggtttttaccaagtgcattttgcttctttggtgtccatagcaaatccctgaacccagccccaagcctttttgtggaataagcaggggtgcagagcatgggccgtcatggggacagccacagtgaccacctacatggtgccatggctctgccatggtgcccagaagccacattgcatgaactcgtgggctgtcgggaacaagtctgattctgaagaaaacagtttttttggtttttgagatttttaaatttctccctgcttgcaaagaaggaatttggaggctctagacttttgtgtgtgtgcttggttttttaattaattaattaattattttaattaatttattttattttattttacttttttaagagacagtctcactatgctgcctaggcttttctcaaactcctggactcaagcgatcctcctgcctcagcctcccaagttgctggaattagaggcatgagccactgtgtccggggttattttgttgtttgtttggctttttttgatagcagttgcttaggtcaaacctatttcctgaaaaacagaaaagagttttcttctcctgttattttattttacttacaacaaatagcacatatactgccacaaaaaaaagtgaggcaacttttgtccactccatacaaaccttaaatgctcaacatacctcttagcacttggcacaggcctgggcacataatcagctctcaaagttagattgacagcccagatgcctcgagaagtcccatcaggacagcaagttgccccatcataagactaaactcattgaattccttaactaccccctcttggcctcctgggggaaagttaccattactcttttcaagaggctggcatccaggtgaagttttttgttttgttttgtcttgttttttaactggcttggctatttaaaaatctgcagaaagatagaaaaaaaatattgctatggttcccaatccctccccctacttctgtcttcctaaatccatcctataaggcccacctcctctgggaagcctgccccaacccccaggctctcccctcccctgactgctgtagtaataagaattgaggcacctaagtagttcacggtttacaaaaggacctccaaggacccagcgtcatctcagcttcatgtgtgtccaaggcaacaggatcagttatacaggtgaggaaattcagccaggctaagtgatttgtcaaggtgtcacttttatggagtggccgagtctaagccctggaccccctgctcccaacttgaaagccggggtgcagttcacagaggaagagcagcaggcttcttatttccctctccctttgacgtattgcatgtttaaaatgtgaagggttaacagaactggagaatgcaaaggaaaatgttggggaacaattggctgtaattacagtctgcaaaagagcccctcaaccacagggcgcctaaaacctgaagcccttctgagctgattgtgctgggggggccaggcacctacaagcccactgatgaccctggcttgctgggcagctggaggccaccacagggttccgggaggaaatgacagagaaggatgcagcgtctggaagtataaagaatgctccctgctccccactgcagcctagtgaagacaggggtagtgggtgggttgcggactctggtgtctccctctgtcacccggtgactgggagaggtattcctgcccacatgtgtggctgtctttgtgcacggaacagtgtgagctttcctaagcaaccctgagactcacagttaggcctccttgacatggtctactcaaggctggggagtgtggtatgggactttctcctcactgtggggaacgtggctgaagttacatgtcacattctctagatttgacatgagttcttagttccagccaaaaaaaaaaaaaaaaacctgttgacttaatgcttttgtttaaactgaaaattaatggatgaagaagctgatgtgacaagctgtcccttgggaagtaataggtgaacttgacaaaggaggcagggaaatcaacaattagaaatatatagttgtctgaggtcttttagtgaaggacaaacagtaggtggggaggagggtagaggaaaccagagcttttcattatttctctgtaaggggaaggttccagagtgagcacctgggtgttggggaaaatctgactagaaatgtgggacttcctgctgatgtgtcccctgaggccccatggcgtatttctgtttctctctctcccctctagcctgagcaacaatatatatctagcaggcgtttagaaaatacctgttgaaggaataactaaattaaccattctgttaaatctattgtctctttctcttgtcaggctcataaagatgtcgagtccatacatgaacaaccttatcatccttggagggatgctctcctatgcttccatatttctctttggccttgatggatcctttgtctctgaaaagacctttgaaacactttgcaccgtaagtcattctgcataagccagtggtatatgatagaaagtttccttggtgacctcagtcatcgaaaacacagatgcaaacccagaaatacatgaaaatacatgaacaggcagggaacaacccatttagtagttttcaactcaacagggaagaacggtgttactgtcaggccatcactgggtataaataccacctacaaagttaagataatggacttccagcccgggcaacatggtgaaaccctgtctctacaaaaaatacaaaaaaaaattagccaggcatgctggtgtacacctgtagtcccatcttctcaggaggctgaggagggaggattgcttgagcccaaagatcaaggttgcagtgagttgtgatcgcgtcactgtgccccagcctgggaaacagagaaagaccctgtctcggaaataaagatactggacttaccaggccactgttagaagagagcccactgagaattgacagagtaacatagaaaaggaggggaaaaatattatcttccagaaaagcatcagcgccaagggtcagagtcagggtcaggatcgtttaagaaggaacagatcctcccatctacctcaaaaaccatcaaagaatatgacgatagatctttgtatgtctgactgagttatatggtaaaagctataattgttattttctatttaagtggtgttttcttcaacggttttttccttattgttcccctaaggagcatttttagacattttttcctaatgattcctcttatgaaagtttaataccagaaatgtaatgtatatctgtttgtgtactttatatatatatctatggtttatacgtaaaaaagagtaatgtttcttcacattcaagaaccaacagttgcccccaagggggctgtatcatccctattgagatatatatatatttaatgaagtccaaagcagtgtaactaatttactatacattagaaagattatttttaaagttaattaacatgttaaaaagtttaatgcctaaagaaatgccttttatttttttttgttttttgggtttttttggagacagagtttcactcttgttgcccaggctggagtgcaatggtatgatctcagctcactgcaacctccgcctcctgggttcaagtgattctcctgcctcagcctcctgagtagctgggactacaggcatgcaccaccatgcccagctaattttatatttttagtagagacggggtttctccatgttggtcaggatggtctcgaactcccgacctcaggtgatctgcctgcctcggcctccctagttatttttttaaagggggttatgtattagcaatcacttaatagttttatggaactaactctcagttgaaaatatcatgaacttactttttaagaataaagtaatcagttgggatgtatttctggacattgactatgatctgtccaaatggggttagccagctgggtctctttagagtcccacatgcagtaattcatccagtcccctgcctggaagaccagagctagaggggatggtcaaaagatcggtgctgagtggattcatccaaaagccactcctttgttggtgctgttttctttcaagacgttgagagcactgtgggcccttttttgcaaagcagccttttttagactgcatttgttgctcacaagcctcagtgttgcccactgctggatgatgagggctgaaggctagcagtgagggatgcttaaacgaagcaccctttaaatgtgctgcaagtccccactcacaccccagattttgaggactgagtccaggccagtccctctgctctgggacagcacatggaaagaagggaagccccccaagatcttacagtctaggggattttgctcccaggatttctgcgaatgattaaactggactgactgttacacatcatcgagaaattgttcctgttaccagtaacttcactgtgagctgtctagccagagagaggtctacagatacatttactttatcctcaattgggcagtgccttgagaagtgtgtggtcgagtccccagtaactgagggggtagtgaggtcactggtgtgttcaggcccctctcctctcctggagggacctgcatgactgtcaaaccccagtgctccagggtcacttggttcactcttcccactcaagagtttttcactccaagcctggcactggctcattcccaccaaaagatcaaaagagtatggccttctggcatgagactaattcccattattctgcccgtctgggagtgaagaaggtgaatacaaaagatgcaagtccctggcttcactgtgcctgcagtcagcttccaaagaagctgagcttctcaaaagtccttgtgggtgtggttcagtggggttgttctctaaagagtatggcctcctggggcaaggtgcagtggctcacacctataatcccagcactttgagaggctgaggcaggcagatcacccgaggtcaggagttcaagaccagcctgaccaacatggagaaaccccatctctactaaaaatacaaaattagccgggcatggaggcgcatgcctgtaatcccagctactcaggaggctgagggcaggagaatcgcttgaacctgggaggcaggggttacagtgagccgagatcacgccatggcaccccagcctgggccacaggagtgaaactccatctcaaaaaaaagaaaaaaacaagggtggccttctggcatgagaatgataaccaaagcgcatggaagtctcgctagttttagtggaagtgtgaaggccactgagtctctgatattcctacatcagcatgacttttgtgccctgagatgcctaacaatttcatgggcatacaatttatttatggtcagctttcctgggcagtggtgaggcctgaataaaaggttgctcctgagggaccctgatgaagttaaacgaggaaagtgaggatttctctcttccatctgtgcttaggcttcctccccaagttttaggacacagtgatgattacagtaatggaaatggtactggggccgggtgcagtggctcatgcttataatcccagcactttgggaggccgaggcgggtagatcacctggagccaggagttcaagaccaacctggccaacatggcaaaccccatctctacttaaaaatacaaaaaattagctgggcgaggtggcgggcgcctgtagtcccagctactcaggaggctgaggcaggagaatggcgtgaacctgggaggcggagcttgcagtgagccgagatcgtgccactgcactcctgcctgggcgacagagcgagactcggtctcaaaaaaaaagatactgggggcaagtttggcaactccagtttctcagtggcatccctgagaggcaaggggcttgccttgttccccaggttgagaaccggtggagcaaaaccctaccctcattctgccatggccccagtccttcccgggggccactctgcccatctcctcatcacttgctgttggacacctgggaatgcctcaggtgtcctgaggcattcaatcttcactgcagagattcctgcagcagacatgaagggctgcccagcctttagaaactctctccttcccagaaagaagttcctgacatctcgccttgttcacaagccaaaggctatgaaagcacaggtgctttctcaagtttgacctgaattcaacaaccacagggtgacgcaggctagggagcaaaaacagggacatcccccacacccagggcttttctttttaatgaagcctgatgttctattctgggagtcacgctcatttgtgtgaggggaaggttgtcctgggaagccggggaaggctgatatgaataaatcataaagcgctttacaaatcagcatcggctctgaaaatgagggcccgaaaagatattagggcccagttcttgctgcccctgagaattaatttatttgcagtcaaggctgttttagaagctctacaaaggggagtccacatgcatgactgtggggaaaaggcatagattatctaccccggactgaatcgggtcagcacagaggtgtacatgggttagggctggggccatttatttactaattctcaatattgcccaggaagaggaagtgaaagctcttgaatttagggcctaagtaccagtgcctgatgggtacaatttgggttgtattccacctgctattccagggtgggcagctccttaatttcacttggtgccatggattctgtccttcggacctagaaggctgctcccagcaaactcccaccgagtggggagctgcaaggagaagcaggcccctatggtgtagtgatcacggatcttccaacaacagcctgcattcgactgccacctcctccacttactagctcctgactgcagcaagtgacttaacctcagttttctcatctgtaaaatgagcataacagttttccctctgcaggattgcagtgtgggttaaacaagacgattcagacaagccgcctggaactcagggagagtgctgcatggagggatgtaggaggagggataggcatcacagcttgtcaccttgcatcctcgtcacagtgtaatttcctggtgtcccacactgggttctgtaaatcttaaaggacaggggacaaggtagaccatgagaccaggttcagacatggcgcagccgaagtcacagttctgtctgctctgctgccatatacatgccgcttttttctcccttttagttttcaaaatagcagcttaacacagtgagaaaccatgaataccccctcaggcagaaacctatgacagtcacaagattaggcctctctaggggctacacctctgctcggacgagggtgggtgcgtgtgtgagtgcgtgcacacagattcacccacacacagtgctactcctagggatgcagtttctcttagttcccatcccccactccctctgaccctttccagaatcttcccagactgtcagtgccggtttctccaagtcttgagaacagctccagctataccccgtgctgtctccctggacactgtgcgggtagtggagtcaccatagcaacgtggcccctgtggacgtggagctgtctgcaaggacagtgctgggcgtggccagggccccagtgccagggggaagggatggaccccggcagctgagctgacccggctctgggatcccagcccctgtctgcccagacaaggagtccagcaggtggggatgagaaaaagcacttgccttccttgtggatctgaggcagaaaccccagctcgagcgggggaggagtaagaaggggctttgcagacaggatgaggaggctccaggcggaccttagatcccagcgtgggcctcacgcagcttcctgggctctcagaagcattcctgggcgtggggtagtaacagcttcctgttaactcccgagcctgtgccctcagcctctgcgagtcaccaaggccagctttcagccaggggcagcctttcgttcacaaccacctgacaaggccaagttcactgtccccacctgacggagcagaaaacggaagccctgtcacacactgctaggcagcagggaagaagtttaaaactagctctgttggaccacaaagatgattgagatgtttcattagaaagcaagactattctgattttttattagctggcttataccagaaaaaaaaaaaaagtcaactaagttcttagggatctggtaaccacctatcccagccaatattaccaaaatttttgtctcagatttttttaaattaagatataatccacataccataaattttgcccttttaatgtgtacaattcagtggcttttgtttaccctatttaacatctctgaaccttagtttcctcttctgtaaaatggggatgataataatagggttgtgaggattaaatgagatcatgtatgtaaagcatctagtgcctgtcacacagtaaggcttcatacatcttagctgttatcattatgtatgaacgaatgatgggactatgtctggataattgtgttcacctctggataccattaagagagacactgataaagcagagtaaacttgggataaagaggctgggaggccaggtgcggtggctcatgcctgtaatcccagcactttgggaagctgaggcgggtggatcacctaaggtcaggagttcgaggccaacctggccaacatagtaaaatcccatctctactaaaaatacaaagattagccaggcatggtggcagacgcctatagtcccagctactcaggaggctgaggcaggagaatcacttgaacctgggaagcagaggttgcagtgagccaagatcgtgccactgtactctagcctgggtgacagagggagaccctgtctcaaaaaaagataaaaaagaagaggctgggaaaaccggttgatgctggccagcttggtgtaggtacccatggcaacttctggccttctgtggccttgctctaccaaaactggggcgggaacagacttgggtcctgcctaagtcaaagccaagctggtggttgcctctgccaccttgagtgctgaaaggggctttggggcaggcagcaagggaggtaagaatgacacagacgggacctctgaggatgctgcggccatgtagtggttggaatctggcctaagaagccagtttggcccagggctgccctgagggacgctcagaagagcgtgactcagctttagctcccagctgcctctacttgctgaccaccccaactcttttatctacttttctacttaaaaaaagtatgtatattataagtgtggcactcagtgaattttcacaaactgaactcaactgtgaatccaggatccatatcaagaagcaggaccttatcagcatcccagaggccctccctgtctccttctggttcctatctgccccaaccctcctccccttgccaaagggtggcccccatcccagctcctgcatgcacagacagtgctactcagtgtgcactgagccacctgggggtctggatggaatgcagcgggtctagaagggggcctctgcattcctgacacactctcaggggatgctgatgccacatccccagaccgcacttggaagagcagggataagattagtacctgatgctttatttttgtgtttgtctcttggagactgattgtgtaagataaatgggagcaccagaagcctggtctcctggggcccagctgtgggagggaaggagctcctgggctggaagacactggattgtggcccccaccctcgaacctcgggaagcagggcggttccatcacagctggcagggtggggttcgagtcccgaagcaccccttcggcctcttcactctgctcagatggatggcagctaggcaggggtggggcaggggaggcccagacactggactggggagtgtgatgccctcttcctgccctcctagaggtactgggattttctaactctaactagaaaggtaaaggctgcctaggaacacccacttggcctcccagtaaattcaagtctggtaggaattaatgaaacatttttagttaaaaggccataaatctgtggttttgttgttgttgttgcatggggttttctttttgaggcagttgagaagtaaaacaatgtaataatgtgggtttggggctgtttctgcaggtggctgtcatggctggccatggtaacatgctttgtgatttcagaaggcagcaggaaggctgggctaggagatacccacagggtttggtggtggccttgcctggcaggtccagaccagctcaaggagagggtcacagggactggctgtcacagggcctgattgggccaactggagtcctggatggggtacagatgcccgcttgatgacagtggcctccccacccccaactcccttccagaggagggggctgagtggggaaccagggactccccagactcctgagccaataagcagatgatggcctcccttccagacaccccacatgtgggccactccaacccctggctctgctcagcactcttgttcccacaattcattcattcatatgataacattcccaggcacctgctaggcacagagcatggtcctcgaggagctggcagtgtagattgaaaacctaagtaaacaaacagttcccatttactatgttgtgtacactggcagagacaggcctaggggagtgggtaaggcccagaagcaagggacaaatcagggaagacttaaaataagggacccctctgagtgagctccagttatttctggaagtcctaaatgatacaccatacttgcccacagaattctcaacagctgcaatcacatggtgtggccactcagtccttcctctctggccctgacgcccacttgtccacgtcttctgtccacagagctgtatgaaggcacacagcagccccctccccaccacaccccaccccctcctgccactacccatctgagaatgctgcgtttccaaaaagctccccaacctccagtcctgaggcaccttctggggttgtgggggaacaggaagaaaggcctcttgctcattctgcattgttctgtggcctgagccaaggctgccaagggcagttgtgcactttctgcactacacaagggtgttggcttcaggggcaggagctgaatttcggcctgtgatcgggtctttgagccaagttcttggagtttgttggcttcaagggccttgaggagtggagtccttcagaaagggcccagacggggtgcctttcagaaatttctcctcccagaggagaaacctctctctgatttgccccaaggcttctaagatggcccctaggccctgactcgggttccaaagtactcctgtgggtcctgagtcacctttgccccctgcaccgttcccccagaaaggctctgctgtactctaagctccagagaagattttctatacaggtcttacccagaagaccctgagcaagacggggtcttctggggctgtttctagaggctgctcttcagagtcttataacttgaggatttatctgtcgcccttgccctagaagacaagatgggccctggagacctcaggcctctcagcttccccacctcatacctcacagtgctctggggcttgctttggggcgctctgggagtttcttccctccttctcactattgagcacctaggatgagcagtcagaatgaagtaaaaggcccttgagagaaccttttggacagcaggaaagtgacttgcccctgtgtccagccagccaccagggcttgctcttccatctgacttgctggcctgaagcccacatgaatctgtggcaacaaggagacccggagcacagcagtcccatgcgtcatctgtcagaacaggcctgccagcagaggttgtatgtccattttcatgttgatccccagaagggcagtgaaagcccttcaccctcccaggcatgcttcatgaaatcaatggagcaagcggctgagcagaattgttctgggcatagatttttccttccatttggagacttgctctcatttctttttcctttttcatagctgggactgagatgggcactacctgcctaaagtttgtcttcccccatggatggattatgttcaaggcagttcgcagagggggctgagtacctgatggctaaggggagaaaaagaaagatgttaaatcagaaaaataaacacacgtaagactttaggagaaaaagtgaagtagctatttggtgttgacgaaccagtagagacttgtattggtggtaacatattggaaaacagaatcattagaacccttcagatgaaaccttctcgtttacttggcatcatagagccacatagaagggaggcacctgggatgtcattaaatgaaacctccctcagtgcaggaaatgcccctggagcattctgatggagggggagaagggggggagtcttccaagctttgcttgaatatgtggagtgatggggagctcactacctgtcagacagcatgtggaaggggcagctgaggccatgaactcagcctcttttgctatcaaatgctccagttctctctgtggtcttcctttaatttgcttgctcaggctcaacttgcacatctgtggtgacaaagagttcatgacctcctaaactggcccatccagtctgattgtctcctcttggctccagagatttaaaggtgggcaaagcaggccctgcctcccagtagcttcatctagtgggagaggcagacaggtaatcagatagatgtcatctctgtgtgaccagcagagcagaaacatgcttgaaggcagaagtcatgaggaggaagtagtcatgacctccctgcaaggtctcagtgggcttctcagaggaagtggctcacaagtttggatttcagaggatgcatgagaagttgtgaagaacaaggaatggcattttgggtggaggaaacagcgcgtgtcagacccggcagcatgagccagtgtgatgtgaggggaaagactgagcagggcaggatggtttgagaaatatcagaagaggtaaggtagagggggctgcaccctgcctgctaagaatttggagtttaacctgagggctctgtggggcagcgatgggtttaaatcccagaaacttaagctggagtaacacttaatatggggactcactgtggagccctggcagtaggtgtctggtgattgtatgcaggaatgctcccagagacaaggtggttggtcagttctctacaccagacagcaatgggatgcagcattgagagtctccaagacaacccccaagttcaatgattcactaggactctcagggctcagcacacagtcatactcgcagctatgacttattacactgaaagaatacacagcaatatcagcaaaggaaaaggcacgtggggaggcaaagtccaggggaaaccaggtggcagcttctgatagccctatcacagcggaggagcacaggacacgcttaagtcccccagcaatgagtagcgaccacatgtgtgaaatgctgcctagggaagcacattagagatgacacgcccagggtttttagtcggaggatggatatgtcgacaccgtctgcctactatgtaacaaaattccagactcccagaaggaaggcagtgttcagcataaaccacgttgtttgcacaaccagttcaggcacagtgagctgctcttatcattgaggggatggtgggaactgtccagaatccaagctctcagataccagccaaggaccaaccttcaaatcagacctttctaaagataacagtctcaggcctgctatgttaactcttttctgcccaggcatcctcagctattcttcgcttttagtttatggcaacatattgcagtttccagatgccagattaaatttatattattgaattttaactaacttgactaattatatgattgagtgaatttagccctcacaaaatagacaagtggcctggaaatgattgtttcaaagaaaacctaagtcaaagcaaatattaagaatgcttgcacaccaaggccaggtgcagtggctcttgcctgtactcccaacattttgagaggccgaggcaggaggatcacttgagttcaggggttcaagaccagcctgggcaatatagcaagatttcgtctctactaaaaatcaaaaaaattagctgggcatggtggtgcatgcctgcagtcccagatactcaggagactgaggtgggaggattgtttgagctctggagatggaggctgaaatgagctgtgattgtaccactgtactccagcctgagggacagagcaagatctcatctcaaaaaaaaaaaaaaaaaaaaaaaaggaatgctttgcacactggagtgacacatctcctcaaaatagatctttgtcagccacaggatgaggtaaaaatgatgatattacttcatctttgtcctttttaaaatgcccatggtctgtatatggtcatttgtaaaattaaacatgttcaagagaatgttatcaaaaatgctgtagaccattggtcttaacagtcatgtcactaaattagctttacaagtgtgctgaggtccctggagggtgttacaggttggtcagctaccccctctgggtgtgtcctggtcctttgacatccggctcctaggtgtagatgaacctgatttgagttgaggagactccatctgaggaggaggcagcagcaggatgtcggggagagaggcctggaccgggtcaaagcatcgagttccaggcttagctctggagctgtgtggcatggttaagggaactatcttgaatgcgctgggcctcagtttcttcacctgttaagggagttcctcacttaactgatacctccaaaaaatcaccctggtgtctgttattgttgttgttatttctttttattgttgtatactttgcctctgtcctaataatacttgttgaagatgaacaaatgaacaaacaaacgaatgagtgaatgaatgagatgaactgtcaagtcccatgcatctctgacagatgacaaatgtattatctgttcattgaatatgctcaggtctaaattctctatcattggctctttccccctccctgttttgtatatttttctcacatccttttatgatcatctgggtaataatgtggccattctacattctttctaaagcactgtggttcatttttacccatctgatttctccttgtttgtgaaattaaaaaaaaagaaaaagaaaaagaaaaagaaaatagaaggctaagcacccacctgtaccctcacagcattcatggttcacaggcctgtgtttctgaacaagcgctgtgatactgttgtccttcccttgatttagtgggtcagccttgcaatctaaaaatagttcctatttttacaaataaaattgaaacgcaaaatgttctgtctctgaaaacctggagagtcaagttgccggaaaggcaggagcagaatgaatctgtaaggggaatgggctgggaacatttcttggaaacttcctacatgtgttggtggcagccagccctgaactagaaggggcctggggaagccaagcaaagctactgtgctcagttcctctggatgcagagggcctgagctgtctgctgcagcctggctgcctctctttttcccctaccacatccaactttctgccttgtgttcagccaaggcaggttggaacctttcaaaggaaactaagctcaacagagctgagggagagcaaagacccaagctcagagctgcaactcatggggcacgtggcttttctgtcccagtgagtgggaggccccagaactcagtggtgcacagcccagggctggaccatgatgtggggcccacctggagatgtgcacgtctcctgggtattagagggtgtccagtctaaatggtgagggttggggggtctgggagtgatacagtacaggtgaaggtgggcgtcctggaggcccctaagacctaacaggtggtggccagcctgttccagccttcagggatccaagttgtaggctcctgtcagggccggctgttcccattagccaccaacccagggctaggcgtcagggcacaccttggtcctggggaataggtgagagccagacagggcctcagtcctgagcagggaccaaggtctaagtgtgggctcagtggccagtctggcccatgctgactaactgaccttctgaggtgacactggacagtagtagccacatggcctgaccatgtggggagagggctgggcagcaggaagaaggaagggaggaggggaagtgaaggccagagggctggaccatcaccttttggtggtatctcagcatctcagcagtcctgggggccctctgtggctctccctctgtctggctctctctaggcccatctaaggcatggtttgaatattgcactcctgtgtgcctagtgacctgggtctggtaagtggctgatagaactaaatgcctattgaatggaaatttgattgaaagatgccaatgaaactcaactatatgcagaggggagtatttgtccccatcataaagagtccccttgcagggtggactcatacctgatgaagtctgtctacctaaggaaggtcaatgcctctgttttctcatggcctctaggtcaggacctggattctcaccgtgggctacacgaccgcttttggggccatgtttgcaaagacctggagagtccacgccatcttcaaaaatgtgaaaatgaagaagaaggtaatcactctccttctgtttcagggtattagtagtgttcacccagcatttatctagcaagtatatactatattccaggcactgagctatttgctggggatccaagctaaacacaatccctacctcctgccaccttcaccctactggggaaatcggacagttaacaaagcatttgtaatacacagttatcagggctggctggggacatgtggggggtgctggggtacgaaacactcaagggaggcttcatggaggaagtgccacctatgctggggcctggagggtgagtgggagttggctgagccaagggcatagggatgctggggaccttgtcaaaggaaccatccgtggcagcctggggatgggaggagggtggtcaggggccgagagaggcttggtgtggctggggcatagggcttgtggggacagggtacaggaagaggctggaagggaagacaggagccacattaaggaatctgcactttaacttatgggcaatagggagcccttaaaagagaggagtgaaacagggctggtacctgatttaatgattccattttcaaagaggcccctgtaggacaggagctcagccttcacaccgtggaccgcattcgccacccgtgcggtttggtatagatatgatgttgccagaccttgactcttagtcatagagaaactttatccaccactgtcctctttaactcttgcagtggtactggagctcccctttcttctggataaaatttgtgaaagtcttgtgatcttgaaggtcctctggttagtaactattataatatgtagagtctattgttatattcaaaactgcaaacagcattgattggcacaacttctccctctcccagctcaggcctgcagcaggccggccacctgccttgggaaaaggagtataggctggccgcttctgtctttggccagcctgcattctttccccatcatcccatccacccaggtgtccaacccctccagagttggaattaggagtggtggaagaggcaggaaataccttacttgctcagagctggcattgggcttactgggcctggcaaggattgcagtggcccctttagactcctggggcgcttttctgagtccctcattactaggactttctctcctgccgtcctcttgatgcaggtgaaatgctcccccaattggctatttgtggcttcttcctctgctcctgagcacccttcagttctccaccctggggtcacctcacccctccagctagtcctggacagggccacacaaactctccctcacccatggcccacatctggggcacagaaagcattccttcatcctttgcacctacaaactcaaggactgaaggttgatgtcactgtagtagctgcctctcttttgttccatcctcagagcagctggccagtccatcatccacctttaggtttctcaagcaggagtcggacaccagtccacagggtcccccaggctgcaaagactcctatcaagccacccagtgatctccttttcactggaaaccaaggcctctcccttgatttgaggtcatggaggaagcgttccctcccagtccacccatttctctcaccagggtaccatgacacctcttaccaaaaatcttcttctcaattcaattccccacccaccacaccctagccccctgcacacactcttcaaatcctgatgtgggcatcacctgtttaccaacacctcctctgcagatcctcactgtgggctcatcccagtggaacatggagcctgttgttctggtttttcatccaagcctgcattttgctccctggctacctggcaccagtggcagacagcaacccagcccgagcagtgaggccaacaggctaaacagaagcctggagttctaggctctgctccactgctgatctgccgtgttagacaaagctcttagtctttcaggacttctgtgtcctcatctgtagaatgtggacacattaacatagtattgtccccttagctgtgattctgtgggctcctgcctggtgccctggtgatacctctcactcctcaggccccccacccacctcttcactgccaaggttcttcttcaggactgcagccccctgtcctctccagatgaggtggaggtatattctgttctctgccccctgccccctgccccacacccgaaccaccttaggaaatccacaggctgcatttagagtggggaaggggccctgctctgccaccctgtccctgtgctcgcatggaggggccgtctctgggccccggcagcatttatgacaactctccgtaagatgagaggcctggccaccccagtgttcctcagctgtggctgtggactgcaatcccagaggaccttttgaaaactactggaagtcgcccaggccagttgaaatgagggctttggggctggagctgagcatcagtagtttttcagctttccctggtgatgttaatatactgccaaagttggggacctgtggtctaggtcagggcttctgagtgcggctgccctgcaagctgttagaaatgcaagttcctgggccccgccctgaccctaatgaacgggaatccttgggaggagcccaggagcctgtgttttccccatccctggccaaagcaagccaaggctggagagccactggcctaggtggcttctggggcccctcctgctctgcggctctggtttaagagctgttctgctcttgaaccaggatgacaactccatcctggtttggaagaagcacagtattggttcctttgtgctaatatgtgattcatccctatggtcatctgtgataagaaacctgcctttatgctctctaacatgactgccaagcaagaacacatcaaccgtctggccacaatcgacaaaacatattgggaaaacggcaggagttcagttgtctagaagctccctgtggggcagtgatatggtgtggtcaccagaggccatgggcttttgctcacttcctcctgcactgcctgagctaggggaaactcggtccccgccaagggtctgggccaactctgagagctcaggcttgcagtgggtccaggcatccagggaggaggcttatctgagaaacaagcctcccacacacacacttttttaaccttttttaactttttaaagtttctttactttttttttttttttttactttttaaaactttttttctacttttgtttttaagggtaatgatgtcagagacagtggggattaaaacagtcccttaacgggtatgaggttagaggactagaaggtgacagaggtggacatcagaggatggtaattgtgtcaccaggcatctagaggaagatgattgtgacggtgaggagggcctcaggaccagcgggggaaatgacatcaaggatggtgagggtgatgtcagggacagaaagggcaatgacggcgataaacttcatgcacagaggggatcagggccacctctattgagttaatggcactgaactctccacttaaaaagggttaaaatggtaaagttgatgtgcattttaccacaataaaaacaaaactgtaacaataaaaaccaacttggttatgtaaaaaactggaactgtgaagaagagcccatttttgaactacgcctgtcacaaccctttcaaaacaatctggttccctgattgagtgtgtggtttgggtaagatataaatttctcttctctaccttaccctcctgtaatttggttggtaaataatacttaaccacagcaccgcaaaccggctcctggaatcactagaaaacccagagtaaccccaaagagtttctcatactggaataatgtgctcatccagccttcatcattttcacaacaaaattagtaccaaatcttgtactgaaagcctttggcagttcatgttgttcgtttgtattgtgcaaccatcatcaccatccatctccaaaccttttcatcttcccaaactgaaactccatacccattcaacactaactccctcttctcccttcctctccccacagccatgcccaccacgattctcctttctatgaatttgactcctctaggaacctcatataagttaaaccatacaatatttgtcctttggtgactgacttgttttgtttcttttaaagaagtttggactttttttagtggcccccttatttttttttttttttttactgacatatatactagatttatataaatttgcaaatgcaatcatttgctttttttcaatgcagttttttatccttttcttctttgcatagctcccacccctcctccctcatccatgatggcttgccctccccaaacatacatacacaaacttcaccccatatgccctatatgtccacatttttgaaagcattaaagcaaaagaaggctattaaaggctattaacacgtgtgacttaatgcttccaaatttcatatttttacagcatgttactttttttctaaagaccaattgtaaaatctttttaaattgaggagttttattacagtctttattttgcctcatactaggaccaaatggaagtgttgaaacaagagtagaaatttagagatgacaccttctgttctgggggcagatgctttttgaggacaatggaagttcactacaaatatgactgggttctgttgtagacaataacatgagtgggaaaagcacctgaggataaaccctcagactttcatctgggctcaacttaaggaaaatgctgagggcttttagcagctgtcatgaagcatctgccatctaaagacgacaggagagctcagccccaggggcaccatccatgctgtattcctcctgaatggtgttccctgaagaaatgagttggccctagtggaaggccagtctgaataggtcagaaaatctcaagttttttgaaaaaatgaagaaatgcccttttctcttaaccaagcatcagccaagtttttctgcaaagagccagagagtcaataggtaagactttgcaggctcttctgtcatggttgcagctactcaactttgctttcatagaataaaagcaaccatagacaaatatgcacatgacattcatttaaatgagtatggtaaaggtgtaaatttctcttctctaccttaccctccttgtaattgagggtacgctcatttaaacgagcaaggctacgttcccattaaactttatttgcaaaaatagatggtgggccaagtcagtagtttgctaatccctgctctaaacaacccagaagtcacatttagtaaaaatcgctggatctgttgaacagttattgtaagccaggctctggtaatctagtgtgggatgtgcaaatattatccccatgttctagatgaggaaactggttcagagtgggaagggaattacccaagatcacacaactagttagttcatttcaaacttagatctgattccagaaccaggtgcttaatcattactgggtgcctttgctctcatctgccactaagtacctcctacccacagagagaggactgcatgtgatagcatcagtgagtactgacgtaacccagagagaagttcaggcagcatttaagagaaggaaggaagtcaaagaatctaagaatagggagatggccttgcctaatgcaaggggtctctggtgctcagatcagtgcttcttttttttctttccttccttctgttttcattatttaagattattttaaatcacctctacttgacattgtattttgtattcccacgggtgtacttgtataattttcactactagtcttccccacaaacatgcatgtttcttagggcagaatgtttgttttgtccactgttgcatcctcagtgcctagaacagaacctgactcagggtaggcactcaataaatatttctacaattaataaataaaaagtgattcataactacttagcctaaacccattcagtcacaaacagtggctacatgccagggtttgtgaatggtgccaaaaggaaaataaccatttcctctcctctgattctcagcatcttcccaccacgcacccatccacacatgatgattagtcttgtgtctagtagagcttaggtgcagtatcacatttggcccctagatgtcactgtgtcttacacataaacacagaatcactaattgtcaaaacccaggtaatggtagccagctgccatttgttgatcatcttctctgtgccagacactgtactaaatgctttccatacctcatctcattttattcttatactaactgtacaatttaaggatcactgaccacactttaaaaagaaggaaactgagtcctagcaaagttaagcagcttgctcaagatcacgcttgacaagaattgggattagaatgaggtcttctacttccaaaacctgtgtcctttcctttatacctacttggagaataacacagaagccctcctgctctctccctccccctgcccctgcccattttacaaatgagaaatgcagaatgagagcaaggaagtgattggctcatggtcacacaggtatcaaggaacagagccagaattctaactcaggtccacttaattttaaatactttagaaatccactgccccagccaggtgtggtggctcacacctgtaaccacagcactttgggaggccgaggcaggtggatcacttgaggtcaggagttcaagaccagcctggtcaacatggtgaaaccccgtctctcctaaaaatacagaaattagctgggtgtagtggcacatgcctgtaatcccagctactcaggaggctgaggcaggagaattgcttgaacccaggaaggaagtggaggctgcagtgagcctaaattgcaccattgcattccagcctaagtgacaaagcaagattccataaaaaaaaaaaaaaaatccacttcctcagacttcatacttgagccattaaattggaaggatttactttatgacatttacaagaggaaaattctggtgctcagcttttaaagccatctatgccccttgcagggtatgcctagattcatggaggaggagaagctgcttgggctcaatcttgaaatcagggtaggagtatgccagcagaaaggtgcaggtcaggccttccaggggtcaggaatagctggacaaatgcctgggggctcaaacagccccatgttcagcatcacgtagatatgaggctccttccaacccatcccctaactgctaagctccttaggcattttgccccagtttctcaagactggcagggagttgcctagttccccagagggtgagagttaagctgggtttctgcaaagcaccagcagttcaccatatccttgaaaatctcagagcgggctttgccggtgccctgcccccaggtacagcggttttgctggatttaatctccttggcagtcactgagcccacactttcctcgtgttctttttacattcggtaacataaaggcccctcgggtttttatttctcctttaaaaatggctttaatcgttaaaaaccaaacctggtgatatttcttaagcttctgcctgagttttgtttgtttttccatgagtctcttccagaactactccatcacattagcttttctggagagtgaggggatatataaacatgaagtgaatgaaatacaggtcagctttggcaccgaaaatatttatcccccagccgatccctatcaaacagacgtaaagtggggtaggagtctcacagagtaataaaaatatcccaggctgcaaagaggaatgggagttatatttcttctttttatattctttcatgtcaattcaattcatcagacttttaagtagctactgcataccaggccccggtaggtgctgagggaacacaaataaaatgggctttctttctgtctaggcctccccagtttactgaggagggaagacatgtatacaactttatatagcttctgattgttgctgtaaatgtttgaggatgtgaattctggagaaaacagatctcggtccaaatccaggcttcatctcttattaagtttattatattgagcaagttacttagcccttttaagcctcagtttgctcatccataaaataagaataataacaatatttgcttttatatgagacactgcctctgaaaccatcaacctagaggcaggcacagagtaagtgttcattaaatgttagctattcctctcattgttgttactactgtggttcctcctgataattaagtatgtggacaaagcgctatggagtaattagttgtgctgcaggagttagagaggacttcatggaggaggtgacaattgatcgagatgtttaaggattattagaagtttgccaaatagaaagaatagggtattccagacaaaagaactagcacctacagagacctggagggtgaaaatcacagctcggccagggactaggagtggccaaacttcaacaaaatgcacatatgtgtttggggagtgataaggtcaagcttgtgaaaggccttgaatgtcacacagaggagcttggctggatttatcctgtgggtgatggggaatcgcaggagactctccggctggggggttcatgatgcaggttccccctatgacctgggcccccagttgctgcgtgggaagctgtctctcacatcggctcccctctgctccttcccgctctgtagatcatcaaggaccagaaactgcttgtgatcgtggggggcatgctgctgatcgacctgtgtatcctgatctgctggcaggctgtggaccccctgcgaaggacagtggagaagtacagcatggaggtaagccctccatgccggcaggagggaagcctgcagatgcagcccctggcacatgaggacagtgaggctgcacagctcccagactgcccagtaccccactgggaacacttcatcagttccatttccttccatttgagacatgtaattccagggaggccaaatataaggtgttgtgaaagaagttgattttaatattaatacacgcagaatgaatgggaaatgttgggctttttaagagtatattcttatgcattgtagaagccttcatttataagatccatcacttgagaaatgacattgcatatttatcccaattttaaagtaaatctcctaaaaagtgctactagtgtgtaaacattctgaaagctccttctagatactatattgttttcaaagtgatgggcaatatatttcttttcacacatttgaaatcagatatttgttgttaaaataaggaacctcacataaaagtactgttaaatatatttttagttgtcttgcagtcagccttgccctgaactcgcactggtctttctaggattctccagattagggaattttgagtcccttaggacgctgtagttttgttgactttcatttagaatagttagactgtctttgcgggctacagctgagctgcagtggggtgtgctatttggtaggatttcggtagagtgtaacaaactctaagaaaataagaatctctgtttctctcactgctttgttagagagatcttttgtgggaatttagtgtgaattcttacactaaaccagaaatggtcattctatgcactgagggcagagccttttatctttctagacaagaaggttttatagaaaataagatgctcagcctcatttatctcgagacagtgtttactcagcttggtaagaagttatgcatgcattcagagcagcagcagagaatgccatataggaaagagattgagaactatgtccctccacctgaccaccttccacatagaagtgggactccagacagtcacaaccagaactggtaaggaggaaagacccgacactggctctgcccacgggccaagggggcaggaactgagtccactcgagcagacaggctatttttggacggggggacatctggtcaccattcaccctgcaaggtaggcaacagaacagctgggtgggtcccaattcatcccaagggaatgcccccttcatcccaagggaattccctgcccagcaccagaatttagaaatccagacaggatgtcaacaccaggaagagctatcattggctaactgggcccctgagctagggagagactgtggcggtgataataaaaagcaacgatgataagagcgatgatgatgatgacagctggtatcatgcgttaactcatttaatcctcacagcaattctgggaggtagatgctgtccttaacctcattttactgatgaggaaacagaaacctagagaggctgtgtaacttacccaaggttacctagcaggttagtgacaataccactaactaccctctcacctactgcctaaccctgcctttcaacacctgggcagctcttagcagttttacaggctttcttaaacctttgttcattggccacagatctgggaagtgagtagggcagggaaatgttctccccttctacagatgaggagaaaaaagtagaataatgggcagactgagggcccaggagatcaagaaataagagcagggtgagtcaggcagagtttgtggaaggcctggagctggaccaggtggacagaacgaggcacagtggctcagtgtggagcccaacagtgggctagggaggctgaatggctgccgcctctattctagatgaaggtgggagctgagtatttacgagaggttcccaaggctccagctgtggtggggagacaccagcagtgccagagtcaacagactctggaagtggggatgcctgtcctactggaccgtttaaacaaggtaaacctgtgcagtctgatgtgtctagctgatggtttgctatcatggctcttacctgccttccttctattctgtaataagcactgctgctatcaatggctctgtgcatagaaccctagcacattccagactttccaaggctatggttctcaaactgaggagtcccagggtgctgcagaagtgcctttctgtgtagataaggaaacagagcctggaaaggtgctatccagggcccagggtcacccagattgtccaaggcaaggcccagataggctgttcctgtgtctccctgcagggtgtgctgagatttctctcagaaccttttctggcaggtgcctacttttcttcttttattttagggttggcctgtccctctgttgctatggtaacagaaccctttgatctgtccacccacagccctgtttattgtcgtttttctacaaacagcaccaagccgttggtttctctcagaccctcctctgtcagacacaacagggtagttgaacagtgtgcccagggcctgaggtatcctaaagtctccttcaaggggctgttttgtccaggatctccaaacagaaagcctaggcttgggggagagatgatgaaagacctttgtggcccatccctccctcccacttacctacttcagacaccctgtgtgctccggactctgagcacctgaggattccaggtatgggccttgtaatatggtacgcgtcctagcctttgctcatgctgtgtccccttccagaatcttctctgccaagtatatgacttcagtttcagcaccagtgttacctcctatggagaggtgtccctgtgttcactggctccgctggagtcgagaacctgctctgcctcacttcctcccccagcatcccaaacattccccagtcaggactcccagcaagcaacttctccaggacagggccatgtctcagccagcctccacacagcccacccagcaagcacgccacggccggcatcttccatgggaagacacaggtagccatggcagccacagcctcatggcagcctgcaggcaaatcagggagcagactaaacctgcagacgaataaccgtatcacttcagatcactgtcgactctgaaagcagtgagagggaaataaacagaacccagggcttgagaataacaggaaggacccatggaagcaattcaccctgagagagcatactcaagggtccttggaatgcaagtcccctagaggcctactgggggcagcccagtcccccatccttattcatttctgtgccataaatattgatcgatttattttattttattttatttttttggagacagagtctcactctgtcacctaggctggagtgcagtggcatgatcttggctcgctgctcaacctccatctcctgggttcaagtgattctcatgcctcagcctcccaagtagctgggactacaggtgtgcaccaccatgcctgactaaattttgtattcttagtagagataggctttcaccgtgttgtccaggctggtctcaaactcctggcctcaattgatccacctgcctcagcctcccaaagtgctgggattataggtgtgagccacctcgcccagccatttatatgtcataagtacttctgtagcactcgtcatgtgccaggtactgttctaaatgctttacaaatatgaactcatttaatttaatctttataataatcctgtgaggtaggagatatttttgcccccattttatagatgaggaaactgagacacagagaccttcagtgactggcccaggtcactcagccagtgagtggcagagcctggattccaccccaggtggtctgctttcaaccatgttgccacccaaccccacatacgggtggaaagggtccctgaggcaggggatggaggtcctgacttctggtttcaccgcctctttcctctctcaggggctacacacagtccctctcagggcaggctgactgtgtggctgtggtcctggagcctgactccatgacgcccctgccactgccaagcctccagctatggctcagcaccccacagcctcctcatgccccaaagtgattccagcctcactctcacctttttcaccagctatgcatcaggccctgtgagggactccagagagacagcagtgaatgagatgtggcccttccttcaaggaccccttagagcagttaggaagacagacaagtcagtggctaactcacaaccctcatggtacagggtgctgtggagcccgaggagggacgccagtctggcctcatagggtcaaagaagacttttcagctgaaagccaaggaggcctgagctggtatgggagcactcaggcagaggccgctgcatttagagagcaggcagtgtgtccagtgaaccaagtgctgagaggacacaggcagcaaacacaacacacagtgctactccagtgtacattggcacaaccacttggaaaactatttgacatgagtcatgtcaaagatgcacatgccccacagcccagctattccactaggacacatccctaggggaagtctcacacatatgcccaaggagacccaagcctgggtgttcacagcagcactgtttataacagccaaaaactgatagcatcctaaatggcccacaggaacagaatggatacgtgcactatggtattttcaaagaaaggaaggctatacagctgtgggaatgaatgagccacagccatacacatcagtttggaggcatctcaacaacacagcaatgagcaaaaacagcaagtcacgcatgaatacccaaaacaggctttcacacgcttcaagttcaaacactggagaaactgaacagaatattgtttaaggatacatacataggtagcaaaaccattttttaaaaaaagaagaaggcaatttttaacacagaattcaagattgtggttacttcttggtgggcaggataggaggatatgattgagacaggcacacaggtcctgtaaggctctggcaattctgttcttcaaattgtacatatacattatatctcctcttcagaaactatgatgtggggtttttttttttgttgttgttttttgtttgtttgtctgttttgttttgttttgagacaggatctcactctgttacccagactggagtgcaatggcaagatcacggctcactgcacctcccctggctcaggtgatcccccagcctcagccccccaagtagctgggactacaggcatgcgccaccacaccccattaatttttgtattttttgtaaagacggagtttcctcatgttgtctagactggtctccaattcctgggctcaaatattccacctgccctggcctcccaaagtgccgcgatgacaggaatgagccaccatgcccagcagatgtatttaattttttaaattttatttatacttacttaatagactttatttcttagggtagttttaggtttacagaaaaagttaacagaagtacaaagagttctcatgtaccctccacccacccccacaatttcctgttattaatatcttgcattgtctggtacattttttcaaatgatgaaccaatgttgatacattattcgtcactacagtccatagtttacattagggttcactgttctacgggctttgccaaatgcatgtcatgtagtcaccattacaatatcatacagagtagattcactgttctaaatatcctctgtgctttactaatccttgacaaccacggatccatagtttttccttttccagaatgtcatatagttagaatcacagagtatgtagcctttttagactggcttctttcatttagtaatatgcatttaaggttcctacatatatttttgtggtttgatagctcatttctttttatcagtgaataatatcctatttcctggtagctcatttctttttatcactgaataatgtcctatttcctggatgtaccacagattgtttattcattcacccaccgaagggcatcttagttgcttccaagttttggcaattatacataaggctgctacaaactttcatgtgtgagtttttgtgtggacataaattttcaattcatttggataaatacccaggagtgcaagttatgattatatggtaagaggatgtttagttttgtaagaaactaccaaaccgtcttccaaagtgactataccgttttgcaaacccacgagcaatgaatgggagttcctgttgctccacatccttgcctgcatttggtgtcgtcagtgttttggattttagccattctaataggtgtgtgcttgtatctcattgttataatttgcaattccccagtgacatatgatgttgagcatcttttcatatgcttatttgccatctagtgagaagactgttcagaacttttgtgcactttttaaataggttgttttcttattgttgaattttaagaggtccttgtatattttggatgcaagtcctttattagatatgtgtttcataaatattttctctcagtttgtcttattctcttacattgtctttttcagagcaggagttttaaattttaatgaaatcgagcttattacttttttctttcatggatcatacttttgatgtatcaaaacactcattgccaaacacaaagttaccttgatttttttctgttatgttttatggttttacatttaacatttaggcctgtgacccattttgagtaaaattttgtgaaaggtgtaaggtctatgtctagactccttttgcgtgttgtccagttgttccagcactgtttgctgaaaagacgatcttttctccattgtattacctttgcatctttgtgatagatcagttgactgtgtttgtgtgggtgtatttctgagctccctgttccattacattgatctattatttcatcaatcccaccctatgttggttagcatagctttatagtaagtcttaaagtcagggaatgtcacttctccaactttgttctttaatgttgtgtgagatcttctgggtcttttgccactcatgtaaactttggaattagtttgttgatatccacaaaataatctgctgggatttttattgggattacactgaatgtatagatcaagttgggaagtattgacatcttaccaatactgagttttctgatctatgaacgtgaaatatttctccatttatttagatctttttttattttctttcattagagtattgtggatttcctcatgtagatgttttacctaatttgttagatttatacctatttcatttcatttgggtgctaatgtaaatgggattgcgtttttaatttcaaatttcaattgctcatttctggtccaggcatacctcactttattgcactttgcagattttacattttttacaaattgaaatttatggcaaccttacattgagcaaatctataagcaccattttttctgatagcgtttactcactttgtgtctcggtgtcacatgttgataattttcataacatttcaatctttttattatcattatatctattatggtgatctgtgatcagtgatcattcctgttactattgtaattgttttggggtaccacaaaccatgcccagataagagggcagactttatttgttaagtgttctgtgcgttctgactgctctacccactgttcctccatctctcttcctctccttgccctattctctaagacacaatattgaagttaggtcagttaataaccctgcagttgtctctaagtgttcaagtaagagaaagagtcacacatctctcacttcaaaccaaaatcttgaaatgattaagcttagtgaggaaggcaggttgaaggcaggttgaaagcagagataggccaaaagctaggccgactgcactcaacagtcaggttttgaatgcaaaggaaaaattcttgaagggaattaaaagtgctgtttcagtgaacacatgaatgataagaaagcaaaacagccttatggctgatatggagaatatttgagtgatctggataaaagatcaaaccagccacaacattcccttaagtcaaagcctgatcaaatctcagtgaactagatctcttcaattccatgaaggatgacagaggtgaggaagttgcagaagaaaaattaaaagctaacagaggctggttcatgagatttaaaaggaaagaaatcatctctataacataaaagtgcaagatgaagcagcaagtgctgatacagaagctacagaaagttatctagaagatatagctaagatctttgatgaaagtggctacactaaacaacacattttcaatggagatgaaacaggcttatgttggaagaagatgccatctaggtctttcatagccacagaagagaagtcaatgcctggcttcaaagtttcagaggaaaggctgactctcttgttaagagctaatgcaggtagtaactttaagttgaagccagtgcccatttcccatttcaaaaatcctagggccctgaagaattgtgctaaatctactctgcctgtgctctataaatggaacaacaaagcctggatgacagcacatctgttacagcatggtttcctgaataattttaaatctacttttgagacttactgttcagaaataaattaattaattaaaatactcttttcaaaatattattgctcattgacaatgtacctggtgtattagtctgttcccacactgctatgaagaaatacctgagactgggtaatttataaaagaaagaggtttaattgactcacagttctgcattgctgggaaggcctcaggaaactttcaatcatagcagaaggcaaaagagaagcaggcaccttcttcacagggtggcaagatggagtgagtgcaagaaggggaaatgccagacgcttataaaattattagatctcgtgagaatttactatcatgagaacagcatgggggaattccgccacccccccccaccatgatccaattacctccacctggtcccacccttgacatgtggggattatcgggattaccattcaaggtgagatttgggtggagacacagccaaaccatatcacctgattacccaagagctctgatggagatgtaaaagaagatgaatgttgttttcatgcctgttaacacaatatccattctgcagtccatggatcaaggaataattttgactttcaagtcttattatttaagaaatacatctcataagactataggtgccatagatagagatttctctgatggatctgggcaaagtacattgaaaaccttctggaaaggattcaccattctagatgccattaagaacatctgagattcgtgggaggaggtcaaaatgtcaacattaacaggagtttggaagaagtttattccaacttttatggatgactttcagggtttcaagacctcagcagaggaagtaactgcagatctggtggaaatagcaagataattcgaattagaagtggagcctaaagatgtgactggattgctgcaatctcatgataaaactttaacaagatacaccaaatacagcatctaagagagatcaggatcagctcagagccaggagggactctccacagtggggaaaatagatctttagtggtccgcattcccatcacagatgcctgaaatactagccaaggagagctccttagtactcacaggccattagcttagtatagggagctgcctggagtccatacaactgcattttccagaggatttcactctgggtcccattcactcacccccctaaaacccaagctgctgcatcaggacaccattttgagagcccagcacccaccagaatatatcctgctctagggcccaaaagcccctacatctatacatactgaagcccaactgacattcccccacatccacccagagggctgcagcattatgacaccagccataacttgtggcacagccgggtccccaggactctagcccacacagcgtcctatgccccagagaacatcaatgtaccacaccaggaaggctacccccaggacaaagggacccaaagcatgctctccccagagcctgagaattgcctgcctggggatgccgataacccctccccctccagcagcaggaccctcatgcacctgcagacaccttcagggatcttgaggaccagtctgtcccactcaccataaccagcatccatgcacaccatccatggacctgaggacaggtccaccctgcctgctgccatcaccacccacatgtgctatctgggaatctgagtattagtccaccctgcccatgactggcatccatgagcacttcataggggccctagggctggccttcccagccctccagcaccacccacccaaccattatcactacctggtggccttaggactgaccagccacctcttctgccaccagaggtggctatgcaagctgcctaagggcccaaggaccattccacctaggcccaccattgacacttctgatgtccacacacaatacctggggacctgaggactggcacacccagtagacaactgccaccaccagtgcccctacatgccacccaggggccagccccaggaccagcttgcctggtgtccttatctccagtaaagcctcaacatagcctccactaataattacagcctaagctactgagaaattcacagcaatcactgatgttgattacagccaaagaaatcatacagagactacactactaagcccattcagaatcaaagccaaagtaccctacccagccaacactatagacacatgtacaggaaaaattatttccccatgaaagtcaatccctaaaattggaagaagcagctgttataccagatgcacagatatcaatgtaaggatacaagaaatttgaaaaagcaaagaaacatgatacctccaaaggaacacaataattctccaataacatattccaaagaaaggaaatctatgaaatgccagaaaagaaattcaaaatgatgatcttaaggaaattcagtgagatacaagacaacacagatggacaaacacaaagaagttgggaaaactatttgagatctgaatgtgaaattcagcacagagatagatatcattaagaaaggaaccagacagaaatcctagaactgaagaattcaatgaatgaaatttaaaaacacaattgagagcttcaaaaatagactagatcaagcaaaagaaagaatttctaaatttgaataaagccatttcccagataagcaaaaacaggaaattcatcatcactagaccatccctacaagaaatggttaagggattcctacatctgggagtgaaaggatggtatctgccttcatgaaaacacacaaaagtataactcactggtagagaagagacacgaataagaaagagaaagaaatgaaatgttagcaccattgaaaaccaccaaaagacaaaggtaaataataaaagaggaataaaggaacaaaggatatacaacacaatcagaaaacaattaacaaaatgacaggagtaaatctgcacttatcaataacaacattgaatgtaaatggtttaaatacctcaattaaaagacatagactggatgaatggattttttttaaaaagccaactataagctgcctacaagaatctcacttttcctgaaaaagatataaatagactgaaagtgaaggaatggataacaaaattccacacaaatggaaaccaaaagcgtgcagaattagctatacaaatatcaaacaaaatatactttaagtcagaaacataaaaagggacaaaggagaacatgacataatgataaagggatcgattcatcaagcagatataacaattgtgaatatgcacccaatgccagagcacccagatatataaaaaaaattattaaagctaaagaaagaggtagactccaatataataatagttggagatgttaacaccccactttttagcattggacagataatctagacagaaactcaacaaagaagtgtcagaattaatgtacattgtagaccaaatggacctaacagacagttatagaacgtttcatccaatggctacagaatacacgtttttctcatcaacacatggaacattctccaggacagaccatatgttaggccacaaaacaagtctcgacaaattttttttacatcgaaatcatatcaatcatctctcaaatcacagtggaataaaattagaaatcaataacaaaaggaaccttggaaactgtacagaaacatggaaattaaacaacatactcctaaacaactgttaggtcaatgaagaaattaagaaaggaatttgaatatttcttaaaacaaataaaaatgaaaacacaacataccaaaacctatgagatacagcaaaagcagtgcaaagagggaaacgtatagcaattaacactcacatcaaaaaagtagggaaatttcaaataacctaatgatgcacctcaagggaccagaaaatcaagaacaaaataaattcaaaattaatagaaggaaagaaataaatatcagagcaggattaaatgaaatagaggctaaaaaaatacaaaggatgaagaaaatgagaacttgtggggtttttttttttgagaagataaaatcaataaaccactagctagactaaacaagaaaaaaaagatgaaaataaagaaaatgagaaacaaaaaggagacataacaactgatgccacagaaatacagaggatcactagagactattatgaacaactatatccaacaatatggaaaacctaaaggaaatgggtaaatttctggacacatgtaacctaccaagattgaatcggaaaggaatagaaaacctacacagaccaataatgagtaacagaattgaatccatacaagaagtctcccaacaaagaaaagcccaggacaagatggctttattgctgaattctaccaaacttttaaagaactaacataattcttctcaaactattccaaaaatttgaagaggaggaaattctttcttattcattctaccagaccagaattaccctgataccaaaaccagacaagggcacaataaaaaaagaaaactgcagaccaatattcctgatgaacatagatttaaaaatctagatgaaaaaatattctccgggcacagtggctcacgcctgtaatcccagcactttgggaggccagggaaggcggatcacgaggtcaggagttcgagaccagcctgaccaacacggtgaaaccccatctctactgaaaatacaaaaaaattagccaggcctggtggtgcatgcctgtaatcccagctacttgggaggctgagacaggagaatcgcttgcaacccaggaggcggaggttgcaatgagccgagatcatgccattgcactccagcctgggcaactctgtcccgaaaaaaaaaaaaaaaaaaaaaaaaaaaaaacaaaacttcaacaaaatattggcaaaccaaatccaacaacacatcaaaaagataatacaccacgaccaagtgggatttatcctagggttgcaagaatgattcaacgtaaacagatcaataaatgtaatatattgcattaagagaatgaaggacaaaaaccatattgttatctaaataaatacagaaaagcattttataaaattcaacatcccttcatgataaaaaaaaattcaacaaattaggcatagaagaaacatatttcaacatactaaaggccatctatgacaaacctacagctaatatcatactgaatggagaaaggctgaaagcctttcttctaagaactgaaacaagacaaggatgctcactttcactagtcttctttaacacagtactggaagtcctagccagagcaattaggcaagagaaagaaataaagagcatccaaaagggaaaggggggagtcaaattgttcctctttgcagatgatatgatcttatatattttataaaaacctaaagactccaccaaaagtactcttagaacaaatcaataaattcagtaaagttgtaggatagaaaatcaagatgtaaaagtcagtagtatctctatacaccaataacaaattagctgaaaaagaaataaagcaatttcatttataatagctacaaaaaatgtctaggaataaattgaccaaggaagtgaaagacctctacaatgaaaactacaaaacaccaatgaaagaaattgaagagaacacaaagaaatgcaaaaacatctcatgttcggggattagaagaattaatattgttaaaatgaccatactgccccaggcagtccacagattcaacgtaatccctatcaaaaggtcaatgacattcttcacagaaatagaaaaaacaatctgaaaattcatatggaaccacaaaagaccctgaatagccaaggcaatactgagcaaaagatataaagcagaaggcattcaactacttgactgcaaaatatactacaaagctatagtaaccaaagcagatgatatttgtatgaaaacagaccatagaccaacggaacagaatagaaagcccctaaataaatccacatatttatagccaactgatttttgacaaaggtgtcaagaacatatactggggaaaggacaccttctttataaatgatgctgtgaaaactggatattcatatacagaagaatgaaactagacccctgtattagtctgctctcacactgctaataaagacacacccaagactgggtaaattaaaaaggaaagaggtttaatagactcacagttccacatggttgcagaggcttcacaatcatggtggaaggaaaaggagaatcaaaggcacatcttaaatggtggcaggcaagagagcttgcgcagggggactcctatttatgaaaccatcaggtctcgtgagacttacttactatcacaagaatagtatgggggaaattgcccccatgattcaattatctccacctggcgccacccttgacatgtggggattattacaattaaaggtgagatttgggtggggacacagaaccaaaccatatcaacccctatttctcaccatacacaaaaatcaactcaaaatggattaaagacttaaatgtaagccctgaatatatagaactactagaataaaatataggggaaatgcttcaaaacattggtttaagcaaagattttatggctacaactttaaaagcacagacaacaaaaacaaaaatagataaattggactatatgaaacgaaaagacctctgcatagcaaaggaaacaatcaacagagtgaagagacaacctgtaaaatgagagaaaatacttggaaactatttatccaacaagggactaatgtccagaatatacaaggaactcaacaggaaaaaaatgaaataatttgattaaaatgaagacaaaggatcagaatagatatttctcaaaagaagacatacaaatagccaacaaatacatgaaaaagtgttcaccatcactaattatcaaggaaatgcaaatcaaaaccacagtgaggtatcatctcaccccggttagaatggctattttcaaaaagacaaaaagtaacaaatgttggcaaggatgcagaaaaaagagaattcttatacactgttggtgggaatgtaaattagtacaacaattatggaaaataatgtgggggtttctcaggaaactaaaaatagaactaccatatgattcagcaatcccactactgggtgtttatccaaaggaaaggaaatcaatatatcaaaaggatacttgcacccctatatttattgcattattcacagttcctaagatatggaatcaacctcaatgtccatcaacagaaaaatggataaagaaaatgtgctgtatatatacacaatgggatactatttaaccataaaaaagaatgaaatcctgtcattcacaacaacatgaatgagcctggaggatattatgttaagtgaaataagtcaggcacagaaagataaataccatgtgttctcactcatatctggaagcagaaaaaaaaactgagctcatggaagaagagggtagaatcgtgggtactggagattggaaagagtagaaggtaggggagtatggggagaggttggttaacaaatacaaagttacagctagactggaggaatgaattcccgtgttctgcagcactgcaggatgaatacggttaactataatttattatatattttcacaaagctagaagagaggattttgaatgttcacaatataaagaaatgataaatgttcaaggtgataggaatgctaattatgctgatttcattattacacattttatacacacaccaaaatagtctgtatcccataaatatgtacaattattacatgtcaactaaaaataaaaggaaaaaataactttcatgagtgaggagttgcttcttatggaaaagcaaagaaagtggtttcttgagatggaaactactcctgatgaagatgctgtgaacattgttgaaatgacaacaaagaacttagaatattccataaacttagttgataaagcagcagggtttgagaggattgattccaattttgaaagttctactgtgggtaaaatgctatcaaacagcattgcatgatacaaagaaatcatttacgaaaagcagaatcaatcaatgcagcagactccgttattatcttaagaaattgctacagccaccccagccttcagcagaaaccacacgtgggtcagtcagctgccatcaataaggaggtaaaaccctccgctaacgaaaagattaccactcactgaaggctcagatgatcattagcatttttaacaataaggtatttttaattaaagtatgtatattgtttgttagacataatgctactgcacatttaatagaatactgtatagtgtcaacataacttttatgtacactgggaaaccaaaaatttgtgtggctcactgtattgagatatccactttattgcagtggtctggaatctaacctgcagtatctttgaggtgtgcctgtataggaaagcaagtgatttttgtatattagcctaatatcctgaaactttgctataattacctgttagttccaagagtttttgtgttgattctttgggactttctatatagacgatcatgtcatttgcaaacagagacaattttatttcttccttcccagtctgtatacttcttatttcctttcttgacttactgcattaactagaacttctagtacaatgttgaataggagtggtgggaggggacatacttgctttgttctcagtcttcaggaaaagcatctagtttttcaccattaagtaggttaatgtatcttttcttttcttaaaaagttaaaaagccactatgaaatagttttgaatagttttgatggccaaaactgaggatgcctttgaggaaattagaggaaggtcgaatgatgactcaggcagagctaagattgttagggatcttgtgtgctaagaagaggagtttaaacttcaaaattaaagatatctcatcaggggagtgacatgatcagctttgccctggctgcacggtgagaacagatggaggggcgaggctggaagcccagtgatagctggatgtttttgcagtaattcaggcaaaagctgatggcgacctaagccagggcagtcacagtgggaacagagaagggtgtggatttgagagctatgtagggagcagacatgacgagacgtggtgattgactgactctaaggggtagtgatatgggggcagggagggcaatgctcagatttctgcctggggtgcttggggaacctcttcattaaggcaggtgtggaatgagaatgggcttgggaggcaacatggggaattcatttctggccataagtttgagtcacctgagggccttctaggcaaaagggctaagaagatgggctgcagggtcccagtggacaaaagagtagtttgtccagtcggtagagatttgtggggaagcagctagttagcacattgaggatagagtcatgagagtgagtgtagtaacccagagaaagtgggtgcagtgagaagtgaagaagtccccataggagccccgggaatcactgagtgattaaacagccatgcgcacaggaggacgagccagggaaggagaattttaagcagtgggataccaggagagagaaccatcactggtgaggggacaggagagagagctgtccccaggcagatggtcaagagagagccattcacaaatggaagaatttgaaaagggagagtgagggctccagagacaaatgccccagactgaggcaaggactgacaggtgtcccatgaactggccctgtgctcagtgctcctgcatcccatctcagcctttcctcttctttagagtctgatggaaagattggctgtttctgcatttcagatatagcaggtgtagataaacctgccaaatatgttaaaaaggtttttaaaatatgatttgtattcttggaaaaaaggaaaatagctctcttttttgagcacctactctacttgtggtgacggtgagtaggtgttggacatacggatctgaagttcagggagaggtgtgggctggagatgggaactcagatggggcagcttatggatggcaatgacaatcttggatgagggcaccaagagcagtcagagcgatggagaagagaaggggaccaaggactcaccctggatcctgtgcatgtttggagactggaaaggtgggggaaattgacaaagaagacctagcagaagctcagcaataggaagaaaatcagatgagtttggtgtcttggaaaccaaatgaagaaagtgtttcaaggaggaagttttgatgaactgcgtcaaatgctgcttttagatcaagtaagattagggccacgaattgacagtatgtatgtgtgagtatatgcacacacctccatatgggatttttttctttttttcttttttttattttgacggagtcttgctttgtcacccaggctggagtgcagtggggcaatctcggctcactgcaagctccacctcccgggttcacgacattctcctgcctcagcctcctgagtagctgggactacaggcgtccgccaccatacccggctaatttttgtatttttggtagacaagggatttcaccatgttaatcaggctggtctcaaactcctgacctcatgatctgcctgcctcggcctcccaaagtgctgggattacaggtgtgagccaccgcgcccggccaggattcttttcttttaaggaaaataatttgagataattttccccaaaagtaaactcagtacatacagatggtgtgatcctaggtggagggttgttcattttttcccaagccttcctttcatagcaagccaccatttacacctccacctgaccattccaaaatggtcttgaaatggagcgacatggcagacagcactcaaggtcactgaatattgaacacccaggtgagccacggaaccacagggcagccactgtggcaggatcctgaggctgcctgcacaccccgaagtcttctctcatcctggtccccacaggatgccaagcaacctatgtcaggaattccctacactctagcttctgtggctttctggccatttgagcagtaatcaagttaagggccatttgggacaaagggatatttcagaactttcctccagcttccgtagtcttgccattcttctgtggaagcacacaggggatttggaatcatggaactacacttggctttgagcctggtggttataccagttatgtttctatggaaacagatattggaagaggcaaacacatagagttttaaataatttcaactcttaccttctatctccctctacagctgctctggggggaaaaaaagtcaatcctaaagcaggcactttcaggaaacagctggtatcttcataaagcctgtccaagcctgacttcacgctactcatttgaaaataaagagacattgtaatggcctgggtgggggaagtgctggagaccagggtctgccctacccagtaggctgctcacaggtggcctggtggccaaaggctttggatgctaagggtcacactccaagtgatgggtcctcactgctggagccatcagccctgaacagtgagtgaggctggtcttgtcacacatagttatccatggtgccctggatggccaggctggggccccagccagatgcagaccatggtccaggcagggcagtggaactccacaggggccgttggttggtccattacccatgggctgcctccattagcctggccaactcctcctagggaggaccataccccatctgaagttctaaccacatcattctcctgtttaaaattttccccagcagctaaaggatgaagtctgtactccttagctcagctcaggaggcctttgatgatccggctggctcgcctccctagccttatctctcacaacccccttccttgttccttgtgctcagctaccctgagctattgttacttctccaaagcatcccactctcttcctctatgcctgcgcaccttctacccagaacaccccctttccacccccaatatgccatcttcatatgtaaaatccctgcttgacctttgagaggcagcttagaagcatctcctccaggggcctgtggaccacatgggctgcctggatggacacctgtgtcctgtgcttccatctcacactgttcaccctcattctggtcacagaactgatcattgtctgtctgtgtgccggtcccctcttgtctgtgacctcctcaaaggccatggccatctgtgtgtccccagcacccaccaccagtgcctggctcaaagtaagtattcagtaaatatttattgactaaattattccctccacctggagctctccccatgcctccatatgtccaatttcaacccatctgtctgggcccattaagccggcttctcgaagaaatgtctttgccgagttgcaatttaatttaatattacaccctcaccttttgtcaagagcccacttctggggctgaggctgccaagtgaagcatgattcagcatctactacgaaggatgttgttcagtttgtgtccccgagataaagatccacaggttaggtcctcgtggaactgagtaccaggaaatgggctgtgctctctccgtgaacttgtatctacttccttccttccatcaggcaatcgtaactggataagccactctgtgttctttttaaccttggctgccagaaagttggagccaaattcaacgctcagccgcaataaccatcttatctcaggttcctggaggattatctcaccttctgatcattcgtctttatttttaactgtcctgttgtatttaggcttttaatgtgtgctgtcttgagccctctgggagaggaggcaaggtgtaaattctagattaagttattaaaacaagaacttcaggcgagatttaattggaatgatatgccagagagacattttaagggtgtccacagccacgtgccttctggcatggatcctggcccagcctcggctcggctctgcagtcagcattgtgggcacagatgtgtctgggcccagtgtatggacagaatagctctgccagccaccgccgcgattctggaacatcttgtgtggaaaggtgtgttggattcacgagagattgcagttgatttcatcttccttgttggcttcccttatgtctgtgggcagcacatggggccagccagaggcccattaggacacaaatcacaaaagacagagccacagcaccagggccagccctgaagctggaacttctccatctctacctgtccaggaactcttcagggcatgagctgtttgctagaaattctcaagtgtcatgaacagaatgattggaaacttgtgtgacatcctggcttcttctgaccactgtatttgtcttgttaaagccatttttgttcctgagcaaaaagagtctttaaatttttattatttttaacccaatgccacacatccatgttggcagaaatacaggctgcagtccccatgaagaccttccctcttttctgtgggtaaactccaaccaacctacctcttggtaaatggttcatcatcagggtgctccttcagcatttatggggtacccattgtctgccatgctcccttacgtactgcatgtctgatgagcaagattaggtatgtccataaagggtggtgttaccagcttgctgctggtaggtctgtggttgatgctatcagagaaacacacaggcatgagccaggcgtggtggcttatgcctgtaatttcaacactttgggaagccaaggcaagaggatcacttgagcctaggagttcaagactagcctgggcaacatgacgagaccccgtctcaaaaaaaaaaagagagagagagaaacacacacacagaatagattgtaaacaacagcaacagtaccctcttgatgacatttgcctccaaacacttggttttaagtttaagttactgtgctgagacactggacttaattttctaaagtatgaactaagattgaatctgggttaatgtctctcagagggcaaagaagtgagagagaacatgcattagtcagggtctgctaggttttgctgtagtaacaaaaaaaaaaaaaaaacccctcactggattaaagcaataaatgttcttttttcatcacagcacttgtccactgagaaccagctgcagctttcccccaccatggtgtcctaccccgggacacagctggtggcaaagggaaagagtgtgcggcaaagtgtgtgccagctttgagcttccaccccagagtgtcacatgtcacttctacccatatctcattgcccagaatgcatcatatgtccatgcccgagttcagtgagccagggaagagcaatcctaccgtgtgcccagaaggaaagagagaaccaggtattgctattcagccatgatgactacactagcatattcccctggcttttggttgctgtacaaataccacaccattcactagaatgtgagctccatgagaatacagggggagggagggttgtgtttcattcactgctatatcctcaacatctgaaaaagtacctggcacatagtacatactcaataaataatattagttgaataactgaggaaacacaccttagagaaatcttgttagatctatgggctattctctgaaaaattttgtacctgttctgcagacgctattgccaaatcacatcctaatccatcacttctgtctgcctccactgctgtgactggggtccacaccaccgtcatctcttatcatctgccattccagagttggggtgcaatgaggcaaggctacaggtggtgcaaaatgagcaagtggtttggtgaataaagagcctttattgttgaagtcactgagttgtttgtggtggtggatgtaatcatagctttccaaggcagactccagctcattgctccttccaagtcattctctgcatggctgactggcagacagagggatctttttctttttgtttcttttttttttttttttttgagatataattcacatatcataaaattcagtctttaaatgtataccctagtggtttttagcctattcataaagctgtgcaactatcaccactatcttatttgagaaaaacgttgtcaccccaaaaagaaaccttcttttatccatcaccccttctttttcccttccctccagtccctagcaaccactcatctattttcagcctttatggatttgtctattgtggacatttcatgtcaatggaatcaaacaatctatggacttttgtgcctggcttctttcacttagcgtaatgttttcaaggttccttcatgtatctgcactttatttctttttatggctaagtaatatccccttgttttaatatattgcattttgtttttccattcaacatttcatagatattttggttgtttcaactcttgactattatgaataatgctaatgtgagcattcatgcacaaatttttgtgtgaacatatgcttttagttctcttggatatatacctgggagtggaattgctgggctacatggtaaccatgttaactcatgttaacatttttaggaacggccaatttttcacagtagctgcaccattttacattcccaccagcaatatatgagggttccaatttctccacattgctgccaatccttgttatttatctgcctttttgattatagccatcttagtgagtataaaggtttctggtggttttgatgagaatgactatcaaataactaatgactaatggtgctgagtgtctttttacatgcttattggccatttatgtatctttgttggagaaatgtctattcagagactttgcccatttttaattgaattattcatctgttttttgtggagttgtaagagttctttatatattctagatactaggcctttgtcagatatataatttacaaatattttctctcattctgtgagttgtctttgcattttctcaataatgtcctctgacacatgaaaaattttaattttgataaagtgcaatttatatattttttcttttattatttctgctttaggtgtcatagctaagaaactattgtctgatccaagctcatgaagatttacacttatgtcttcttctaagagttttatactatttgttcttacatttaggtatttgatccattctgagttagtttttgtacatggtatgaggtagtgatccaaattaattattttgcacgtggatatatagctgtgcaagcaccacttgtttgttttggttttttcgagacggagtttcactctgtcgcccaggctggagtacagtggcacaatctcagctcactgcaaactcctcctcccaggttcaagcaattctcctgcctcagcctcccgagtaactgggattacaggcacccaccaccatgcctggctaatttttgtttttttagtagagactaaaaaaataggctcttggccagcctggtctcaaactcctgacctcagcctcccaaagtgctgggattataggcgtgagctaccgcccctggacaccacttgttgaaaagaatatcctttccccattgaatagtcttgtaacccatgttgaaaatcagctgaccatggatgtgtacttgtatttctggattctcaattctattccaccaatttatatgtctatccttatgccaacaccatgctgacttgattattgtagctttgtggcaattaaaattggaagtgtgagtcttctgatttttttcttctcttgcaagattgttttagctatgcagggtcccttgagattccatatgatttatacgatcagttttttcatgtctgtaaaaaaggctgttgggattttcataagcgttgatttgagtttgtagataatatggggagtattgccatcttaagaatattgtcttccaattcatgaacatgggctatcttttcatttatttaggtcttctttaatttctttcagcaatttttttttcttccgagatggagtctcactctgtcacccaggcgggagtgcattggtgcaatcttggctcactgcaacctccgcctcccgggttcaagcgattctcgtgcctcggcctcctgagtagctgaggttacaggcacccaccaccatgcctggctaatttttgtatttttagtagagacagggtttcactatgttgtccaggctggtcttcaactcctgacctcaggtaatccacctgtcttggcctcccaaagtgctgggattacaggtgtgagccactgaacccagccttcttggtggattctttagaattttctacccataagattatataatttgcaaatagagagttttgctcctttcattccaatttgtatgcttcatattccattttcctgaatagccaaaaaattctcggatagactttcaacctacttatatctttgaatcaaaagtgagtcacatatacagcaaatatagtcagatcatgttttttttaattcattctgccaatctctgcatttcaattggagtgtttaatccattttatgtaattactggaaaggcaggatttacatctgccattctggaagatacttttttgtttttgagacagagtctccctctgtcgctcaggctggagtcagtggcgtgatcttggctcactgcaacctctgcctcctgggttcaagcgattctcctgcctcagcctcccgagtagctgggactacaggcacatgccaccatgcctggctaatttttgtattttttagtagagacggggtttcaccatattggccaggctggtctcaaactcctgactttgtgatccacccgccttggcctcccaaagtgctgggattataggcatgagccactgcgcccagccagatatcttttttaaacgcacgacgtatcttactattttgcacttaaaattctccaatttaaaataaaacccacacttcttaccttgctacaggtcctacacaatccagtcccactccatatctgacttcatctagttcctctccctgtgctcaccccagtctttagccatgtgggccttctgtctggagctctaacactccaactttattcccaactttgtgcctttgcattcatgattcttctgcctggaacgctcttcctccaaaccttttcagactctttcctgtcattcagatctagcttaaatgccacctccctgatcaccagatccttaaatgtcccccaacattctttctcacctcccctgtttctccatcacattgcttattcctcgttctctcatctatattctatcatccactagaatgtgagccccatgaaacagggcccttaactatcttactcagagctctttctccatggccttgcacagggccagacagacacacagctcaatatatgttggttgaatggatgagtgaatgaatgaacaaaggaatgcgtgcatgaatgaatggatgatggacaagcttccctggcatgattcttgtcagcactgacaacagctgagtaggtaatgtggttgctcagtagctggattgaactattggatgaatatgttgatactaaaaagaaaaataagtaatgttttaaaggtgaagaggaagtttggttgttgttgttgttgttgttgttgaatgatttcaaagagaaacttgactcgtggttctcaatcctgctacatcacccagaaaagatctttttgaaaataccggcccgggtcacaccccccaaaatatctgatttaactggcttagaaagggccctgtgcatcaggaattttttaaagttgccatgggttctggtgtgcagccggagttgagattctctggtccagactctcacgaatctctaggaagggcccaagactgtaccttggataccagggtgataaatagactcaggacaataaatttttacgactagaaagtaaaagaagaaaaggctgaatccagaaaatctgaagtccagttggtccctgccagccagagatgatgatgatgacaaaagaattacagactcagagagaggcccacctggggagttcatgtgtgcagaccccaaagagctacgcaggccctctggtctcatatttttctgaaaatctttgtgttagcatttgaacaattgtttctccagtggaagagagagagcaaggaagaggaaaaaagggaggtttctatgaggtttctatttctgcagcattgttcattgcaatgggaagacagagggtgagcaagttccacaccagaactttaggcaggtttgtttctaagtgctctacaatcacaaggaaaccactgaccacagaaaccaacagggaagaaaaaaggacaagggaaccacagtgtccaggcacctcagcactcatggtggctcggaaaggaaccgccagccctgtggtgggatgttcattcttttctgcccttgtttagcttgaagtttctccctaaagcgatagtggattaagcttcaaatactgagttgttttgtccttgacaaaggatgaaacatttaacatgccccaaagatgctctgttcatgtcagaggaggctgagacaacctgtgaaccaccccttaggggacagcagccagaagaaacacgatcattgctggtcctgcccaaatctcacttcccagcccacccacccatactcttgcccttctctggactggtaccccaactccaggcttaccctactcacatgcaagcacccaatagtaagcaaacacgtactataataatgacaacagtgtctcacatttcaacagcatggcaaagttcacaaagcaccttgacatccccattttagagattcatcagaggaaactaaagctgagtaggtgacctgactggcctgagataaccttgcttgctacgcatgagaactggaacccagcccaagccttgtggtattggatgagtcagtatcccttccactgggattgatccattcacacttcctgcttctttttgcatccgtccctttgttttctttttcttcattgatgctttcaaaattattagcttccaattgtgcataatgttctcttacaaatgcttaaatctctttcacatctgtgattatctggttgatggttcatgagagtgaacagatattcaaatccagcaagtttagatctgagagcttcaccttccagtcccgcttcatccttagtactagatctactcagccttcttctaggatttcaacaaagctgcattgtcttaggagtaacaatagcaaaaataatcatagcaacagcttttcttgagtgcatgctatgtggtaagcactgttccaagttctttgctttatcaactcattcagtcttcacaacaaccccatgtgggaattaccattattatccccagtctacagatgaggaaactgaggcacagaggggttaaataacatgcccatggtcacacagctggtaaatatacaacatgtagcccttagtggttaagcaagtagactctggagctaggcttaactccaaatcccagttcagccacttactgtgtgaagttaggttagtgtactgggctgaattgtcattccccctaaacgatatatgcatccttacccctggacctgtgaaatgtggccttatttgctaaaggggtctttgcagatgtcattatgttaagggtcttcagaagaaatcattttggattacccggatgggccctaaactcgatgacaggtgtccttataaaaaatacacatagagggacacagacacaggggagaaggccatgcggagatggaggcagaatgatgcagccacagcatggaatgcctggggccaccgggagctggagaagacatggcaggattcttctcttgagccttcagaaggagcacagcccaacggacatcttgactttggacttctggcctccagaactgtgcaaggattaattgtctattgttttaagccgcccaatttatggtagtttgttacaacagctctagaaaatgagtatcatttctgagggcttcagccttaaaatgggcctagataggagaagtgcccactttactgagctttggggaggactagaagggatgcctgtaagatttgcccacacccagcacctggagagcacttgatgaaggttagccctcatacagagcatcatttattacccggcctttggctgctctgccctgaacccttgcagagcccacggaagccagcccttcacattgccatcttcttgtgtctgactcgttgccactgggacccctgagcccagcccagcgtgttcctggctcaggaatctcagaggaatcaaatctgactcccagacccaggctgcagaggcctctctgagccattattaccagggctgccagagcgagactatgaacatccacatgtggcgttttaatattttacccaagaagtcattttcttccacgattcagacacagaagactcgaagaattaaagtgagaaaggtactcagggcctgcatgatttccgccaatgggcgtggaggattttcctgtgtctgttcaggctctttctttcttatctgcgtcttacagcagacgggaagccagctgacgagagattgcatgttcataccaattattaaaaatatatggcaggcttctggaaatgcattcacatgccaaggaaatagaatgcagtcaccagcccaggcccctgcactgtgtgctttggaggaacagtgcggcatctgtaaacacaatgatacaaggttttggaccagattctgccacctcccagctgcgtgaccttgggtgagtgacttaacctctctgagccccagtgcccataggggaagttcattcctccctcacaggtttactgtgagcgtcattaactgagataacatgttcaagtacctagttctgagcctggcacatagaaggaggtcaatcagtctgatttgtttccactccctgccccagaatttcctgactccctaagaaaactgacataactaccctgccaacctcccaggtcctgaggtgcactgctgccaagagcaaacgtgcaggatagatttacaccttccagtgcacttccatggccatccactcatttaatcctgcagactctgctgcagagagtgttctgtttccattttgcaggggagcacctggagagctctgaatcacataggtagcaagtggggctcagaggtgagaagccaggcctgctaatccccaaagctcggctccttcataccccatgctgactgtcaaatgagctgatggatgggaaattgctccataggcaacagagctctatcccagcctgagggctggactgttgttatctccagcacctgtctgtgatcaaggctctttgctacctttttgtccatgtgtattgtcctcacttcccccttctaggcatgagcaggttggatcagtctcatttggctcattccaaggcagtctgtgaacttgccgcatgtgtggttaaaatgtatgcatgctcccactcccacttcccatgtgccttctcatgctccacgctctctgccccacccacactcactggctcgcacatccaggaggtgctcagcacagcctgtcctctgttatgaagaagacttcgtggagctcaggtgcaccatagagccactagagagacacgtgtcattcattcatctgccaaacccacatttactgggcacccactatgtgccagatgctggagccacaatgatgggttaggtgcagcccctgatctcaggactcccccagtccagggggacaagttaattgacaatggcagtgtaggtggcaagtgctagaatagctccgcccggggccctgtggaaacgcagaggaggtggctgctcatcctgccttgagaaatgtttcacaaaaaaaaaaaaaaaaaaaaaaaaagaagagggacttttcccccaagtcttcaaagaacaaataggatttggataaagaaaacagaagctgtgcaaaatagttcatcctttcctgaaaacgttaaacagagttactattaagacccagcaagttcactcctaggtatacacacaaggaaaatgaaaacatctgctcaaaaacatagacatgaatgtttataggagagctatttataatgccaaaaagtggaaacaacccaaatgttcatctgctgatgaatgaataaacaaaatgtggtctatccatacagggaaatattactcagctgcaaaaagaatgaagtactgacgcatgctacaacgttgatgaaccttgaaaacattatgttcagtgaaagaagccagacgcaaaaggccacatattgtatgattctattggtgtaaaatgtcccaaaccggcaaatccacagagacagaaactagattagtggttgcttcgggctagggaaggagagatggagagtgattgctaatggatatgggtttcttttgggggtgatgaaaactatgagatagccgtgctaattgcacagcattgtgactatattaaaaactactgaattatacacctaaaatggtttaaattgtgaattttgtgctatgtgaatcttacctcactttcaaaaagaaaaagacaggaaaagatacataaggacattccaggtaaagaaacagtgaaagcaaaggtagagagagggggacatgctcttggagaagagcaagtgtccaatactggagcatgatgcactatatttttcttctgtggcttcacagctttagaaggctaaatgattgtcgggtccaatacctgtagtatctgttagatgttgtcggttgcaagtaactcaaactggcataaacaatagagggaatatattggcatcttgaaaaggtccagcagtaaagtggacttcaggcacagtttgatcagggatcagttccatttctgtgatttttttgtccctgctctcctccatgtatgaaatatgtcattacatttgcttctcaggtgtcatggagatatgaaaagaaagatgcatgcatttcaactagagtgattttagagggtttcttggacaacatagaatttttgccaagtcttcaaaagatgggtaaaacctcaaggagtcgatattccaggtagatgaaaccccttgagcaggaaaatgtagggtgtatctggagaagagttcaagaattggttgggtctggcagcttgccgatagaaagtagatgcagggctggagggagcttggactttaacctggaggcactggagagccatacaggaaattcagcagtggagaatgtgatgagctcttgataacgcctactctggttgtcagataattttacgaaattatttttacttttaatagatatgataatattgtggttatgtacattcatgctgaagtgtcatggagtctgcaattgactttcaaacagtttaggagggaaagtgtgcatgtgtgtgtgtgagagagagagagagagaagaagaagaaaaggagaggagaggagagatggggagggaagggagagaggagcagatatggcaaaatgttagccatcattgactcctggaggagaatacacaagggtgtgttgtactgttcagctttgctgtatgagaaaaagaaaaaaatgagagtgggagagacaaagcactctgatagagggacaggctcaggaggtggtacagtgagggggcaagagagaatgagccccgaagggcagggccgagatgccccattggtgagatgcctcaggggcccaagccacagggctcagggtgggtgaacgtggctagggacgtgtataggcacagtagcccaatgactctgcagcttccagcccaagggtccaagaggacccttgtgcctggaatagagcttgaaggcagcagaggaggagaaggagcccccaggcagggctggttttgctccctccataattaacaattgtctgtgtgactaggtgtttagtcatagaatttcagagccggaaacgacccaagaaatctaagcaaatctctcattttcctgatggggaaaccaaggcatagatttacctggactttcagagtcagataggtgactaaggacaagctaccagtttaaaccattcctacaaacaccctggtgactgtccacagcagaaatgacctgaggagacaccagcttgctctgcccttccttggtgaatctttgaaaccttttctgagtgcatatgtcatcagggagctgcttcttgagtgggttgccacgtggggtttcactcgggccaggcactcgctggtctaggggctttatacatattgggccatttaatcctcaatcctatgagacaggtgctatgtctagccccattttacagatggtaatgataaggttacatggtggccacaaggtcacctcatttgtaagtggcagaattgagattagagctcaggcagcctggctccaaagctggcacctttaaccaccttgctacccaccataccccctgtctcctagtcgactggacttccccacattctcagtgactggctgactgatgaattgatgtgtttattgtccagggagagggtcaccaggcagttctggccccagcctcattggtatgtctgcagtaagtcaaggcctatttattactcatagagtattttgggggtctgtgataaagaaaaaatgcaaaacttaatttcacttccctgctacactgctcattcttttttaataaccctctcttatcagcctcctggcagcttttgcacttcctgtgcatgttaattactttattaattacattgatatctttggttctgcccagcatttcttggtactttttgtttgcaacgtgcacccattttgccttgctcattggcatatgcgggcccagttcccatttctaaaagggattctttgagcctcggtaaacacatggctttcaattagtcgcacaatcatcatttcccatttttcaaatcagccacgtcactaatagagtgtttttaacattctcccaaatagaggctgtattgttaagtttctgacattcttcctcaatccttgttttctctccacgtcacagctcaaagaaccccatataccctagcatggagtgagatgctagacactaagaagtctagggggaggaagcacgggaattgaaccctgggacagatggagacaggggtttgtgagatgaggctggagggtggccttggaccaggtcctgggaggaccttaaatgtgaccttgagaagtacagactttatcctaaaagccaatatccacccaaagtatatggtttagaatattgatcccattagctgtcccaaaataaaagggaatggaagatcatacggtctgaagtttaagaaatcctcaaaactacatatctgcttcttggaaatgtataatatacttttagcaggttaaaggctctggaaagttctgcagttttattttattttattttattttttttgagacagtctcactctgtcacccaggctggagtgcagtggcgcaatcttgactcactgtaacttccacctcccaggttcaagcgattcttgtgccttagcctcccgagtagctgggattacaggtgcacaccatcacgcctggctaatgtttgtatttttagtagagacggggtttcaccatgttgaccaggctggtctcaaactcctgacctcaagtgatccgcccgccccagcctcccaaagtgctgggattacagacatcagccactgcgcccggccttatattttttagttaataaatttaattttatttgttaaaaatgtttaaatttgcatttccaaaacttctttggctatgggaccattagccaaagaagttttagaaatggccaatttaaaattttagcacaaaattaaaatatatagcatatttatacctacctattctaaggagttgaattcaggaagtgctgctggaggggccaaggagccgctgtgggttttgagcaggtgggggcaggcttaggttctgttttagaaagtgacaccagcagtcgagaggataaagggagactggaggcagaggtttgaggaagcccccgaacagttcccgcaagacataatgaggatctaaaccacaggtttaaaatgtttccatgttttctttccattttacttcaagctgcattgttgtcttaaaattggaaaatcagtgctgctataataaatcatagcacaaggattttactcaggcataaaatctgaatgagaaagcaatctgcacagtcttccatcttcaaaagaagcgtttagcccaacagggtattgaaacacagtagccatctgtttctgcaaatctccagagttcatcgaggccttccaatcacacagacccagattcagggcccaggcccacacctttgtagctctatgaccctgagcaagtaggctttactgctctgtgcctcagcttccccatatagtacaaagaggaaataatacttttctcacaaaatagtttcaaaaattgaatgaggtgacatatacagagtgcctagcaaagtacctgactcgtgatgacataaaaataaatgtaattgcccttctgtattggccaggtccaataaggaacctctaaatctcagcagctcagtgcaacaagggtttattcctcactcacacaaaatccagctgtgaagccaggtggttctccagggcagccatcttccatgaggcaactctgtgttctggaccacaacacaaggcagcaggccaatcttgcaacaggtcttcagtgcttcagcccacaagagtcaaatgtcacttccacccacagcccattggccagacttagtcacatgatctcccacacccaccacctaattataaaaaagctgagaatatgcatgagcagatgggatgttggtggcatcagcctctaccactctctcttttctttggtcagttccttgagcctccctgagcctcaggttcctcctctgtaaattaggtctaatacttcctgtcctaccttgcatgggattattacaggagcacatgagattatatatgtgacaaatgctaaattatagttagaggcagttatatgctcactgttttgctgtgccaaagctacctcacattctttggttcatagaaaaaaatgtacaacttcaactttccttaaatctgcattcctgttcttattcccccggccccatctttcctttggattggccactcccttctctcatttggctcttcccaattacttgtcgtgagatcattaaggtcacttatcagtagcctttggtagcctatttttggaatttcgcacaaggctgcatatcctcaaaggtcatgagggacgagatgacaaggaggtcactagagtatttctcctgggcagcagaggaaaatattgggggttctgaatcataggatgcatgggcccttaggtctttgaagaacaccaaagaggtgtgtgtttgtgcttgtgcatgtatatgtgtgagaacatcatgtgcatgtgtgtgtgtgactattgcaagccccaaaattccataaatgtggacattaaccatgcaatctgccaagctccatgctgtggtttggctgccagataactaaggcaagttcaggaacagccccaggtgaacagggtgctaggcatgggaaggggacaactgtcttgccctactcagatccccttggaaacctatagttggctcagagggcacaactgctgtctctaacctcagaattgctgtgctaggccaggtgcagtggctcatgcctgtaatcccagcactttggaagaccgagatgggtagatcacctgaggtcaggagttcaagaccagcctgaccaacatggggaaaccccatctctactaaaaatataaaaatcagccgggtgttgtggcatgcacgtgtaatctcagctactcaggaggctgaggcagaagaattacttgaacctaggaggtagaggttgcagtgagccaagatcacaccactgcactccagcctgggtgacagagcaagactctgtctcaaaaaaaaaaaaaaaaaaaaaaaaaagaattgctgtcctagagccaagggaagagccccagaggacagatcctgggacagtggaaaaagtccctgaagtatagatttcagctcaaaataaggaagaaagttcacacatttaagtccaatctaaccataaatgaactgggcttccttaggaggtagtgagtgtctcatcaccagaggtatgcaaagaaagactggacagtgggccgttggcagagactgtaccctaaggaagagatatgagagaagacacttgagtctcttcaagcccgaaagttgcgtaaccctataaactagaataatgtaacctcagaagacttatatgtgtgtgcgtgtgtgtgtatatgtgtgtgtacaaagtttataggttcatttctatatatttgttgccagagggtatatgagagatgagttgagaacaggtttatagttataatgaaatcggagcatcctgagcatcactggtaactccgtcatcagaggaggattgcaggcaggcaagaacctggcccagaaaaatgagccccactgcagagcacagaaggagggatgcacactctctggtggcctgctgctacccaggtatccccacacaccgccagcagtggccacagcagccattacgcatcctgttttggaaaagtctttgcaacattgcacttttgtggctcccagtgcactcgcctctctgaatgacaacaggaaaatgaaatgagtatattgttctggaatgcactactctgtgtgtgtgtgtgtgtgtgtgtgtgtgtgtgtgtgtgtgtgtgtgtgtcggctctgtagtcttttgtcttactgtgctcttgcttcatactaagaacagccctcaaagcaggtgaccccagcatttctcagaggagaacccggggctcagggtgagcatgtcacagtcctggggccagaccctagttcaagtgcaaggcccatggctgtccgttacaccagggcactgcagtgtgcccaggctgcctttagccaaggacacactgtaaaatctaagatgtagcagggaacaggagaaggaacacttgaagttcatccaggcagcagcctgccttcctccgtgtgagctgggagtcccagaatcagccagagtcccagggaggagcatgaaaaaccgacagggccctgagcctgcagtcaagatgctcgaggttcagttgccctgaattcttgatgtgtgagcttgggtaagttccagcccactcctgggcttagtattctcctgcgcaaaatgtgagggaggctgatggccctactaacctcctagggtggttgggcagatctaatgaaactgaaaaccttgacattgagtgcacacactcagctgtagtagagtagaatagctctgtccgggatcccacgtggtacagagtcctgatttagagaatcttcgcactctagttctgtcacctctccattcacgccaagctgggcttggacttgacagcagggagtcaccatgaacagccaaccaggttgtgcactgagttctcagcagagccctgtgagaaggtgatgagagacacagcctctgcacggccatgccagggctgagtgggaacagctcagctgcctcaaggtctaggctgggaggtccaaggcctgggtgggagggatgccagcctggacgaggactggagctggacagcttgggcagggccctctgggagctctactcactttaggggccacagatctgaccccaagcccaaggccaaccaccaccctctcccccacagagaggctccttggccagaggagtctggcccagggcaagatgcagctgggtggggcacttgaacaggcactcctaggccaggcaggaactatggggaagagggctgcccttgccagctcagggccacaatcaagtctaatttatggcagggctttccatcctctttcacatcacagcacacaatattagcacagcaccctggtgaccacagagcctgctcgtggctggcagtgcctggcctatccatgtgccccaaggcaggcggaggagagcactgtcgtggggcccttctacccagtcccgccacaccatgaccagggcacactgttggaagatctagattagtggtttagagaaaaggtttcaagaggagttaggcggacctgggttcaagtcacagttccactccccttcactcctgtgtaacgtggagcgggtcactcagccttacggagcctcgtttaatgtcccctaaaatggtgtggtgctggcgctcgtgtctgcggtggttgattgattgggtgaaatgggacagtgtatataacactcagcacagaatctggcccacagtgagcagttagtaaatgtgagggggtcagaggaagtacagatgacaggggtgggggcgatagcggaacaggaaagagtccaacacagatacctctaacacagactaagtcctcccgaaaaagacaggaaggaagatgttttgggcagtggatgtgggaggagcccagaggcctggaggaatggatgcgaacttcaccgtcctatgaagaagggtatcccagggcaaggaaaccccacaataagggcaccaggaggagagatgatggactgtgtcataggaggagagatgatggactgactcatggctgagactgggggatggggaacaaggctggacgggtatgggggggtcagatcatggagggggatgggagccaggatcatggggcccggatgtctttactgcagtctggggagtcactgaaggtcttggagcatggaattagcacggcgcggatgatcacttggaggcaacatagaggaggaatgggttgggaagagacaggagaccaggtcctgaccgagggcaagagcctggggcaggagggaaggcaaaggggagagaacttcacacaggtgcattcacctgcatgtgacaggcggctggatgttggagccagggtgggcattgaagaatgagaaaggctggagagacgccaggttctggtctcacctgggcagacagtgggctgctttctgagctagccaacccagaggaacagcaggtttaagggagaaggcaataaattcagactgggagaggctaggcaggagtagagggtgcccctggtgccccctctgggccagcccagagggcctggaagcagaggaccaaataggatcccctgcatctggccaccaagagttccctggaaatgatgggggagcaattcagcagaactaggctggagagcggtgggaggggaagatgatggatgggagtgtgaggactcctttttcaagaagcttgctgaaggggaagaaagaggggaccaagaggctgagaagcagaaagcagggaaggacgagtttcaggccagggctgggctgtggccctgggcaggggaagggggcaaaagcatgcaagagagaaggcaatcaaggaagcaagtaagggcaaggtgcttttctctctcagtcatttagtgccaagtataagccacacaactgtgctgtcgtcatgttcttactttatttcttctccgggtttaattgacagctgtcaggatcttactgtaccatgccatgtctgagggaccaggttcctcttcagctccttttgtctttctctgtctcctgtcatcattctccccatcgtctgcctgctgggtcagggtcctacagtggtccccaccgcccaccttggctctgcctgctgctggtaggtcaggcttgtccctggactacaggaggaaagcagggctccactctcaggacagaggtggttcagccactggttgcacccacgtgcactcccgggcaatgccaccctgatgacttctgccaggttggggcatgaggggtccaggctgccccatcctgctgagggtggggtacaggcaagagcccagcaaccaggcctgggagtgtctgctcttgtctagtgttgctaccatggaatcactgaatgtgggcatggagggggcctctgaggggaagggatttgcttgcctgaggtcagcaagcagaaacgtccactcaataatgtgccttcaacaaaaatcgggtgaccatgtgaatagtttcttgtcccacgtcagctgggacctcctgggtattgagatccaggaaatattgcctcagaccccccagggccgagtcctgggaaggtcctgagcctgctggagactcctgccctttcccaggcctttcctgtaggctccaggtcctgttcctgggtcacaaatgcaccagtggtccccttacccctcaagcagttcctgaattttattttatttatttatttattttgtattattatactttaagttttagggtacatgtgcacattgtgcaggttagttacatgcgtatacatgtgccatgctggtgtgctgcacccactaactcgtcatctagtattaagtatatctcccaatgctatccctcccccctccccccacaccacaacagtccccagagtgtgatgttccccttcctgtgtccatgtgatctcattgttcaattcccacctatgagtgagaatatgcggtgtttggttttttgttcttgcgatagtttactgagaatgatgacttccaatttcatccatgtccctacaaaggacatgaactcatcattttttaaggctgcacagtattccatggtgtatatgtgccacatttgcttaacccagtctatcgttgttggacatttgggttggttccaagtctttgctattgtgaataatgctgcaataaacatacgtgtgcatgtgtctttctagcagcatgatttatagtcctttgggtatatacccagtaatgggatggctgggtcaaatggtatttctagttctagatccctgaggaatcgccacactgacttccacagtggttgaactagtttacagtcccaccaacagtgtaaaagtgttcctatttctccacatcctctccagcacctgttgtttcctgactttttaatgatcgccattctaactggtgtgagatggtatctcattgtcgttttgatttgcatttctctgatggccagtgatggtgagcattttttcatgtgttttttggctgcacaaatgtcttcttttgagaagtgtctgttcatgtccttcgcccactttttgatggggttgtttgtttttttcttgtaaatttgtttgagttcattgtagattctggatattagccctttgtcagatgagtaggttgcgaaaattttctcccattttgtaggttgtctgttcactctgatggtagtttcttttgctgtgcagaagctctttagtttaattagatcccatttgtcaattttgtcttttgttgccattgcttttggtgttttagacatgaagtccttgcccatgcctatgtcctgaatcttactgcctagtaagattactgaattttagtagaacttcctgaaggtgaggaggagcaggccctttccacaagaggcatggctctcccagggggcatctcatctggctgccaaaacagctgctagttccaggttcttttctgcgcctgcgtttctccacctataagaagagaaactggatcaatgcagaaccccattcgtgtttggaaatggggagacgggagggagatcagggctgtcacagtgactagaggacattcatggcctttagtacgcggggtccaggggttctgtgcaccccacccagcacagaatagtccctcccaacaaataattgctctctgcatccccaaagaaaagtggctggaagtgcccatgttgagaaaccctggtgggtgatcttacatgtcctttccagatctctgattctggaaaaaaaaaaaaaatcacccaaacttgtaatcataacattctacaaaaaaaatgcttacttgaaatgacagcttctagctttgttgcctcagaggtgcggggctgctgctgtggagataagcagtccagcccctgagggatctggaaggttcctcccagctccagcgctctgtggctgtctgcagtgggggataataatgatgctttccacatcaggagcaggctttcccgtctctccagcttgcgagtcacaccgcacctcctttgatcatcttgccagccctgggaggttgtagatgaggaagttatggctcagagaggctgggagacatgtgcaaagtcacacagctggcaagaggtggacttgggatctgagtccagggccctttcccctccctgcctaggcatccttgttggcaccccaaaagaggccatgttgactcacctgccttcccaggaaaggagaaccatctcaaaactctgaaatgcagtctgggaaggccaaacacaccccctaatacacacacaccacacacacacacacacccccaacacacacacacacacacacacaaactcacatttacatgcacacctacactcacccccagcagaaaaacctaccaattttaccatatactttaaaaatcaactttggaatttgaaaaaagaaaagaggcaggtatggcccagggagaaagttctgcatgccaacttctgggagctggtcagaaggtggaaagcaccccctccctcaaaggagcactggccgggccgggctgggctgggcctaggaaccctttccacccacagtggtggcaggaataaaaggtccgagtgacccgcgccaagagccccgtgatcagaggtgaattgcgtggccctcctcatgtgcaccatctggactccccatcctccctgcctgggcctgttgcctcgcccacccctaaccgccctggccagccctgcacaggacacacagaagcacatgattgtcaaggtctggtccagggtcagaaacatacagaggagccctgtcaagtctggccttgcgctaagtcatcactctgtgtcagaggtgtgcgggtgacaaagagaatctgcgttcttaaccagactgcttctaagctgagaaccaaatattaccctactgtttcaaatcctttaaggccttgctgcccaaagggtggcccctggatcagctcctcccctggaactgcttagaaatgcagcatcccaggccccacccgggaccgcgcacctgaatctgcattttaacaagctccccaggcactttgtgctcacattatcgagtgagaagccatgctgtcctctcgcttatcacacttcagcctctctggccacatgagggttcctcaaatatgctgatgtctttgcatttcaggttcttttcccttgccatgccttctgccatgcgtgctcttcccctagcttttcacatggctggcatttcttatctgccgggtctcagactaaatgtcaccactgcagagtagccatcccaggctacctgatctgaaacaacttccctcattagcacccctccaagtgcccgtagtttcctttaggaatatttatcactgtttgtattcataactgtactgtgtggtttgttgaatgcctgtgtttgttgagcagcccccgttccactggaatgtaccctccaagaaggcaagcgccatgttggtctcattcatcctgtacccccacaccaacatggtgcatgacacacagcaggcacatgacaaatcctcatggagtcgatttcgaatgaatgaatgtaggacaaatacagtcatgaaatgtaggacagatagagtcatctcccaatgactcagactcccattaactacactgtaaatcaacccatgggctcccttcacaaatgggaaactgaggtctagaaaagggcagggatttgcccaagatcacccagcaagtctgtagcaggaccaaggcttttgacctttcaggcctcaacacctccacttatgctccaactccctgcctgtcagtttgtgcagccggacagagcgggatatttgcagggggcactgacctacattgtgagtaattgcattatgcagagggactctcgggccagctgctctccttttgccgcacagatgggagaggctttccccggcagcttctgcgtgcctcctgctgagcagcagcctgaccagaagtcaggtgtgagcacttccatcttctggccgtcccaaaccggtgtggcctcactgctggacacggtgccctgccaggcaggaaagagcattttatcagcctgagttcagctcgcagcaccaaagcgcagccttcaccctaaagctctgggggcttcaggggaagccactgttgaatatttaacgattaagttcttcctccctcaaataagcactttgcagtttatagagccggttacacccactgtctcctccgatttgacacaatgatgcacgtgagaggagggcacatcagggaaggctcatggtgaaggaggagggagtgctggtttgagagtcacacacgcctgggtttaatctcagccccgagacttactagctggagatcttgggcaagttacttcacctctctgtgactctgtttcctcatctgtgaaataagtataacaccttgttggatttttgtgacttcaacaagatgacgggtgtagagttcccaacccagcagtgagcacatcattgtcactcatgataaggcagctcttggtgtccttatggctgatgttatctggtgaagtcagccctctctctctgaggctgcctctcatgggaactgtcctggtcttactggaatgggagagccatgaggacagggctcttgtctatccaggttattgctgcatgcccagaacagtatctggcaaatggtagtgcttaacagttattcactgtatgaatgaatgaatgaatgatttcttaggcaattgccaaagagagcaacaagtaaggaagaaaaataacaaaagtggccgggtgcagcggctcacgtctgtaatcccagcactttgggaggctgaggcaggcagaccatctgaggttgggagttcgagaccagtctgaccaacatggagaaaccccgtctctaataaaaatacaaaaattagctgggcgtggtggcgcatgcctgtaatcccagctattcgggagcctgaggcaggagaatcgcttgaacccaggaggcagaggttgcagtgagctgagattgcgccattgcactccagcctgggcaacaagagtgaaactctgtctcgaaaaaaaaaaaagccagttgaaaattttgcaggccagctatccagagcaagaaaaacattctaagggcaatgcaaatgctgtcctgtacagaagagaagaggccgaagcccgggcttaggccctgaccctgatgtctgcaggggtcagtgccctgtgctcgctggccctggcctgcgtggacagtccacactgggaacaggccgagtgcagtgcccaagtatagcctgaatacttccccaacagctgctccagaagtgggggagtcccccatggtgcttggaaatctggcctcatgtaaggccagtgggtgccttccagagtagcacaagatgctgctgacagcttcaccgtttccggccccaccgatctatagtagttggtagttctgtgtccccagcagagggtaatccaccaccaccaggctggacccttcatgtggctctttggtgccctctagtggtgctgctttggtgcacgacaatgacaaggaagcactgggggttggggggtgggtagcccacctgcccctgcaggttgcatgctcaggtgcatctctccccatgtgtggctgcacagaccactgcgaactccaggcccaggtagaatctggatggattagacaacacctacagcttgtacagtctgctttgtggttcagtgcaggagtcacttgattttcttccagatgcccattgccagcctcacaggaacaggaacatcatcactcccaaaactatcccaacccctgccaccgtaacctctgacctgtgacagggagatggggctgcatgaggatgacattagtgaccagaacatttttgcagtttatttctggatcagcacctgaatatggggaaggtgggtgtgggagcagctcggccaccccaggaccactgacttccatgaactctcagtggacccatcgtgtttgtttgctaccctcctgccaggactgtgcttaaggctgctgagatgggtgcggaactgaaaggccaaagataagaattcagatttcaagattccgagaggtcagagcggtgaaggtggggttgcgggggaaggggagcagctaagagaaaggtaaaggtagccaggctggaatgtcagcagcacagggggaaagactgggctagcagcagttctgtgaaaactacctgatgggtcttggtccaacctgaaggaacacatgaatcactggtggaagattatatagaaagccaaggagacccagagaaagaggtcaagctgacttgctcagcacttgacttgctcagcactgcctggagtactgagctccattcaaagcctgtaggagtggtaaatctgtagagcagtggtaaactccagcaggttgactgacaaggtggcctgggtggaggaaggcacagtggtgtgtcccctctctgtagatcttccctcctgtggaaggtgtgcagactcaaagagagagcttggaattattctggggaaccccaggggagagatgagccccggtgagtggaggtccaggaggagaaggctgtggctccgtgaaagcactgtgtactacctcaccgggagcaggagggaggggctccctgccactgcagtgtgtaagccaggcaagccttgtcagtttcctgtgaagagcacttcatcccattgagcaatgctgtatgacacaactaattttctccacaccgagaatctaagattccatcataaattactgctgttcattgtagaggaaaagacaggatcaccgttaatgggtttgccattcatgcataactggaatgggtccgtgctactgcattctgatgttggcctgattgtcacacactggagaaacccagattctgccactaagtcagttgaccttgggaccaagccagttctgtcaccttaattaaacaatgaaaggatgtcaggaaacccccattgcccttaataaaatgcagcccagctcctgggtgggtagcagtggaggggaaatctctacccctggccactctgactttagtttctggagatcacctccctccggggtgtttcttactgcagagccttcaggaaaccacattatcccctctagcactccagcccaagtgtggactcaatgcacatggacccaaagaggttgagctaaggctttctgtggcttgggacagcgaaaggcaaatcaagcctgagagaacacacagcaggatgatctggtcaaaaaatggcctgaacccccaggtcccacccctcctagctcctcctgctttcacgtgggagcaccatctttcccccacctcacagaagcccaggtccattgcctgcttcaaaggtcacacctggagagcaagaccaaaaaactagtttctaaacgctacccgtctaagacctgccttctacccctgggtcccatcaaagtaccttcttcctagtgattgaccctggggatgcccatgccttaccctcaggagtgtggctttaccctgggcctcaacagcacaactccatcagaatataacatcctgaacacagttatttggtgatatactcccagtggcaaacagattgcaaaggaatcttcaactttacttagtaagtttgtgcttgacagttgtatggatgtatcaattttgcaactatttagtgtctaatgtaggactgaacaaatcagtaaatattttgatgttgttcgaaggcagggattccactgttggagaagagtgatgaaaatatggaatggggaaggcaagcaagaactcggcagtgttggatcttatctagacagacagacagacagatttatttttaaaagagcttagaagtagtgacaacttaggaacagtgagaccatcaagtgcctacatcttggtttctaaacaccattctccactaaaaagaacaaggactccttggagaaatggttgattgcaaggctgggagcaagaagagttcaaggagtgctggaatcgttgtgccaagaagtaagaaagtgctcaaaaaaattatggtgatgtgtggaaaaaacatagaaggcagcatgaagttgttttccactggcccaatctggaaaaatttaagcatcaacatgaataagatagcaaaggattataagacattgaattaaaaaggaacatactaggccagacatggtggcccatgcctgtaatcccagccctttgggaggcggagacgggcagatcacctaaggtcggcagctcaagaccggcctggccagcatggtgaaaccccatctctaataaaaatacaaaaattagccaggcatggtggcggccgcctataatcccagctactcaagaggctgagacatgagaattgcttgaactcaggaggcagaagttgcagtgagcggagatcacgacattgcactccagcctgggtgacagagactctatctcaaaaaaaaggaacatactgatatacataaataaatgggaggaaaggaaagctcttctttgcagtagaatgccaagtgtttaaatagaatggtagagttagaaaatcaccattttgcagctaccaaagtaataaatgactcaggtaagaattatcaatggttgctgaaaccactgcgtgaacatttgtgggggaacaggatacttacacagtctcaaagtagctcccacagattatttattaattacaaatggggaaatgatacctttgaaatggatgtctgacagaaatcatgtcaaccaagtgatcacagagtgccaacgcgtccccctgatgtgactcttacttatgtaggattcctgacaagaatacataaaatctgaatataaaacattcaggctaatccaaattgaggggcttctacaaaataactgaactagatttttcagaaacaatgacatgaaagaccaaagtaggctgaagaattgtttgagattaaaggaaaccaaagacacgtaagtgcaataatgatgctggattggatcctgcattggaaaatccacagttgctttaaaggacgttattaagccaattggcaaaatctgaaaatggctagtatattagataatacactgtatcagtgttaaattttctgaatttagtaagtgtatgtgattgtgcaagggaatcccttgttcttaggaaatatatgctaggatattcaggggtgaagggtcaggatatctgcaatttactctcaaatggttcagaaaaaaataaatgtacagtagatgttgtttcattccctgggtgtctttttgtcttgttgccaccatctggccaattatctcccagagtttcccaattcaagttcctgccagagagaatgtgctcaggagggatcctctccatcaaccctcattaggcagagcactttgtaggaggaaacctcataggtatctgacaagcctctggattggctgcctggggtcaggtgcccattctttgtccagtcagctctggccaaggatgagtcatgtggtacacaacctggctgccatcactgctccagcagtggggctgtgggcaagagggtctcctcagaagggtttggcaggccccaggcttgggcaggccagtatatcctatatctccagttgcacagaggtaaccccagagatacctgaagacctcctgacctaactttatacctcattctcacaacaaatattagcggtacctgcattgggccaggttttgtgttagatcctaggggcaaagaagtgacccagttcctaccctcaggagctctgactcaaattggagaggcatgaattatgcagagaactggagtgcagggttgaattgctaccaacaaacagaaggcagtcaacgctagttgaggcctgggctccacaccttaggaacacagagatggggtccaaatggcctgctgaacagtggcattggctatggctcacaggagggaaaagggctctcagataaggacccagttgctggaagagtgtcctgtgccatccctgagtctctgttttctctttgcacagccggacccagcaggacgggatatctccatccgccctctcctggagcactgtgagaacacccatatgaccatctggcttggcatcgtctatgcctacaagggacttctcatggtaggtgcagagcaggagacagtgttgaggggggacacttctttgttgggcctctgtctcccaggggcctccatcaatgtaaaaataaacagagcctccatgactaagcagttactctctgtggactcagtgcctgccacatgctatctcagttcctgcagcaaccctatgagataggtacaaataacatcctcatttcactgatgacactgaggcttggtgtcttgcccaaggtcatctggctagtaagtggcagagtcaagatcttaaccagagagtaacccaaaaactcgtggctgtgccttacagctgtcactgcactactcccaggaagagcagtctgccgacatccagtgcatgttcatgtccagcatttcagcggaccctctcttaagtccatgggaggtgggcaggatcatccccatttaatagatgaggagggtaagcctcagagaggttaaatgatttgccaaaagctgcctagtaacctccaaactgcaaacccagcactctttccactttactcatcttttgaaatcaaagatcatgctaggtgctgtggctcatgcttgcaatgccagcactttgagaggccgaggtgggtgggtcacctgaggtcaggagttcgagaccagcctgaccaacgtggcaaaaccccatctctactaaaaatacaaaattagctgggtgtggttgtgggcgcctgtaatcccaattactttggaggctgaggcaggagaatcgcttgaacccgggaggcagaggttgcggtgggccgagatcaggccattgcactccagcctgggcaacaagagcgaaactccgtctcaaaaaaaaaaatcaaagatcacataccaagcccacgttgtgaaattccaacattaggaagaacttgaaaggtcagctccaccatatttcagcccaggttgatccttgaatcttctctcctatatcctatataaaccatgcttccactgaaagccatctagtgacacaaagctggtcactgcgccctcctcagatctttccacagggaggttaagtcaccattcacccccgtttgaccccacttagaggccaaaaatgaagccctctctccaaaagtcaaataaactggaatctcttgtgctgctcaaatgcattcttacctgctgctgcatcactgaagtgttagtgattgatcctgtgtcctttgagaggccatgccagaagggcatgtaagaggaccctagacaaagattggtccccacttcataccagttgacacccttttatggttttccatagaagtcttttgagctcccatgcaagcaacaggaccactgggctgcaatctgagcacaaggtaatgaccctgggggtgtccacaggaggtacccaatatagaaataggaacttgaggactggccaaaggtcctgggtttggacaaggacacactcatagtcaccagaaacttggaagagctctcagcaatgggtggcacagacctgagggcagaaccgtcagccccaagcaaagttgctggaaggcagactccatctccatgtaaagatggattcttgtaacaggcagccctgtccatagatgccatggagcccctaagaaggacaagctccctgtcatgggaaagcatgtcatgtcaatgacctgtgcctccctgaccctggttgaatagagagaatctagactgtctccgtgatccttccatccttaatgttccttgattctgagactcattccgtgaaaatagattacgatgaatcatattgacatctttaaactggatttatttgtaatgttttgatcattcattgtcttctcccacctacttccaaagtggttggagatgagaaatgactgtatgtcttcccgtgaagctaacagcttcagccagctcatgtcaacaaaagctatatttaatagcacaaatgcttcaccatttagaacatgcaaggaactgtccccagcctcctggcccttaaggtttatgactaaaatcccactgccatccccctaatccttctattttagagccacagaatctcaaggctgggagaagcacacacagccctttgggtccaccccactgccagatgttttggccccaatccccagcccaccctgagcatcccccaaagcattcattgactaactgcttctatacctccagtgatggggcgctcgccctcttcaaaggagcctgtgccattcgtggatgatgtgttcgtttcctttggctgtcataacaaattaccacaaaacagtggcttacaaaacaaacagaaatgtattctttcctagttgtggaggccagaggtccaaaatccagacagacacttgtggtccctctgaaggctccaggagagaatccgtccttgcctcttccggcacctgatggttccaggcatgccttggcttgtgaccgcatgactctagtttctgcctctgtctccacatggccttctcttcttctccccaagggtctcctttgtgtgtcctttataaggacacttatcattggatttggggtccttccagataatccaggatgatctcatctcaagatccttcattatatctgcaaataccctttttccaaataaggtcacattcacggtttccaggaattaagatatggacatatcttttagagtcaccattcaacccacagatggagtgcttttctagaaagttcttcctaatcctcagcggaaatcttcctcagtgtaacttgtgcccatgaaccctcattctactttttgagggcctaagaacaagttactttgtgtttcctcctgacactctttagagatttacagccaaccaccaggtccccagagtagcccacatttattgtggagaccttcacagtggcttggtggcccatcagtagcatggctgataggatctctgctcactgcaacctccgcctcctgggttcaagcgattctcctgcctcagcctcccaagtagctaaaattacaggcatgcaccaccatgcccagctaatttttatatttttagtagagttggggtttcaccaccttgcccaggctggtctcaaactcgtgacctcagataatccacctgccttggcctcccaaagtgctgggattacaggtgtgagccaccatgcctagcctggttccccattttaaaaggaattttttaaaaggaataaatcaggctgtgagataacacatttagagaaaggataaaagacaagggagaggaaaacaatcatgcttgtataaaataagatcaattacaaatagctttgaaattaccttggtacagaacatttcagtctacagagtgctttgacatccatcctcccatttcatccacacacaaaccctgtgacatagatattattattattattattcccagtccacagacgttgaaagtaaggtcctgagaggtgaagtgacttgcccaggtcacccagccaacagatggcagagcagattccatatcccctggccttgtgtccagccctgcttctaccacacagcgttatgctgccatcgaatctctaaacacaggtcctcagtgtgatgttaaatggttcatgcagctgtcagacgcctgaagctgccctgctgaagccgaagggaagaggggcctttgtgagagagaaggcctcttggaggggctgcactaaagcagaggtccctgtaccagtcagccatcttggctcttcctcctgcccaccacaccaccattctgccctacacccacctgagctgtccctgcagcccgccctccccttagaccacccataagggttaaaccctcgacaccctgcttcagatcatagttggcctctaccctgtccatttctgtcaagacatctattggttaggagtagagctgcaagtcacagaaaaacccaaaataataatggttgaagagacaggaaatgttcctctcaggtaaacctagtccagaggtaagcagtctagggctggggtaaggctcccagaatctcagttccttgcatcttgcagcccccacatcatcattacacaggttccacgtcatagccttgtgatctaagacggatgctgaagctccacccatcacattccactccagctgttaggaaggaggaaaagcaacacctcttccctttaaagacacttcccagaacatgtgcacaccacttctatttacaggcattgtccagaagctagcaatatgccacgcctagcctctagggcagctgaaaaatgtagtcgctattctgggtgtctgtgtgtgcttggggacaatagaagtctcagacacaagggatctgcttagtttaatagaaaaaagactggagtgaatttctaaaaacacagcccatttttgctaccatattgctgtgcggccttgggcagacctcttcacccttctggatattagtattccctagagagtgagggagaaagctgagatcttatctgaagttcccttccactgtagccttgggcaggtctgtgcatgaaccagtcataggggtgcaggagaactggacagctgtcacatccccagtctgcatttgctcagcaggactcagcagggccacaagtggggacagatggtgacatccagaagacccggctgacagcaaggcccccgaccctccctccctgcagcccacctcctgagtaaccctccactccacagcttctcagagcagcctgtgtgtgccaccccttggtaacgatcatctctcccctttctgttcaccatttcagttgttcggttgtttcttagcttgggagacccgcaacgtcagcatccccgcactcaacgacagcaagtacatcgggatgagtgtctacaacgtggggatcatgtgcatcatcggggccgctgtctccttcctgacccgggaccagcccaatgtgcagttctgcatcgtggctctggtcatcatcttctgcagcaccatcaccctctgcctggtattcgtgccgaaggtacaggcgctggccccaccacctggcctctgccctctgactccagcacaggggcattgctggcttttctccattctctaaaaggtttacccattcctttttttttttatgatgaagacaattcacattatagaaaattcagaaaatgcacagtagtaaaggccaggtttttcagaaatttcccatagtcccaccacccaaaaatcatcactggtcatgttttgttggggtgttctttactgttaatgtttttgatgtgtttccttccagcctttttcttaatggctaggagatgatgccttttttttttttccctcactctgccacccaggctggagtgcagtgatgtgatctctcggctcactgcaacctcaacctcccggaatcgagcaattctcctgcctcaacctaccaagtagctgggactacaggcttgcaccaccacgcctggctaatttttaaattttttatagagacggggtctccctatgttgcccaagctggtcttggactcctgggctcaagcgatcctccggccttggcctcccaaagtgctgagattacaggcatgagccacctcgcccagcctatggtgatactttttaagatatggccataactatagcacacattttgttctttgcttaatgttttgtcctttgtattttcccacattcataactgtcattgagggaatttccttaatttacttgcccacttgatcttatattggtgagcattggattttagaaatgaacattttttctgcataacacagtttccttttttccaattattcctttaatgtggaatcacagaagtagtattgttgggtccaaaaaaataactgtttttagtagccacttatatgttccatttatttgaagggctgacctttaggaccaccttgaagagaaatttttcgaacatcatcctaccttgcaatgggtgggtgagccagaggcctttcttcttaggagtccctgcagtagggtgatctgtgttgagggaagcctgacctaagtgagtctcaaaagtaaaggaaggtggccaggcatggtggctcgtgcctgtaatcccagcactttgggagaccaaggaaggaggatcacttgaggctaggagttcaagaccagcctgagcaacatggtgacaccctgtctctactaaaaatacaaaaaaaaagccaggtgtggtggtacacacctgtagtcctggctactcaggaggctgaagtaggaagatcacttgagcctggaggagcagaggttgtggtgagctaagattgcgccattgcactctagccttggtgacagagtgagaccctttacccgcccctccaaaaaaggaaagaacaggacacagagttgcaaagctgggaggggttactgacccaagtgggaggcatctgcttcagagcaggggagaggaaagatcatctgggtccatttcagcaaacaggctacccatggtgcctccatcctcctggacatgcagtcagcccccaggcactgtgagctctgcactggaatacctctggtgtacacaccttagtcgtccacacctgcccagcctaaagggcaacaccgtgacttctctgcctgcactctgacattctttccatcctgtaaaagaggccagatgattctctaagccaagcttcaattgcggcactctgctctgttacgcccaatagctccccattgtcctcctggctctaggatcaggtttctgatgttgggctggctctcaggacccttgggtctcctctagtctccccagagaaccctgtccaccacccagcctgcccttccccttccatttaccccaggcctccctgcgttgccagacaccagttcttcccttggagttcccttccccccaccatccctccagaccgccctcaaagcccagcaggccatggcactgtggtaggctgtccctgatacccgctggcctggtgaagattgagtccttccttcatccccatcccacgcctctggaccatgaagtcccaatgggcaggggccatgggtcactcagctcctgctttccagagctgagcccagagcctgcttcgaccggagatgtttctagaataagcgggtaagggtcaagtggcaactttttgttttctatacaaaatgttttggatgtagctaagcaatgcccagacccctgactcacggaaactgtgagataataaccatgtgttgttttaagctgctaaaaaacaagcttttgtcagtgacagagcttgttactagcctgcttccagaactcatcaatggtttaacagaggccttcgctctcctctgtctctttgttgtcacaactgttgccctcggggcttattttttccacaaggagcaaggcctaaggcagcgtgctaggcagctggagtgaggcctcgggggccctggttgggatgcaggtggcatcagggtcaggagactagactcttagtgaccaggaaggacatggaggcttggtgaggggagggggcctgccccaggtcacacacaagcgagtagcagagtctggcctgagcctaggtctcctgactcccagcctgtggctttcctggggcctcttatcgcctccagagcaggatctgctgggagagtctgccatgtgggatgggaggaaggactcaaggctctctcttcaaccccgccccaacctttgtcctttcagctcatcaccctgagaacaaacccagatgcagcaacgcagaacaggcgattccagttcactcagaatcagaagaaagaagattctaaaacgtccacctcggtcaccagtgtgaaccaagccagcacatcccgcctggagggcctacagtcagaaaaccatcgcctgcgaatgaagatcacagaggtacctccctctgcatctggtagctgggccctgtctgccactgaagcccctctaaccctgtgcggggactctcaggctcctctagaccatccctgcagcatgaccgtgcagtctcatcagctgcagttgcagctgcgagagccaggggtgacataaaccacacagaggcatttgtcagaatccaacatgagcttattgcccacctcacccaggctcttggaggccagcaacacctgattcaagccatccccagacagaaaggaactcagggagatttgtgagcttctggattatcatagcttcctacgtcagtgtctctttatctgtgtctctctccctctcagtttttcactctcccagcacaacccagcaaccaccacatctatgtgatgtacaagagaagagaaagtgaaaagaaacttttcaagagagagtgctgcagcagacctcgcctttgtcctgagggttctcaactggttcttgaatattccagagagaccatagccagattgccttgtgcccaagccaggcttggcttgtagaccagggaagggaaaacaaattacctcccctcctctacccctccctttgggttggaggtatgcctgaacccgtgctctgcaggctgtgtgttgctttaatagaggaattctgattagggagggggacaggaaagggaccaaggaaagtacattggttacaatgctggctaaacaaggccccaaaataaagtggcccagagaaaatatgtttatttcccttttacctaatggccgtgaaaagagagggcccggttggggcagctctgctccccaaggtcattgctgggcttggttcctgccctctggttttccccactctccagggtgttctcttcattcatagcgggagagctgggtggacagcatgtcctgttcacagtgtcaggaggggaagagatagaaagtccacatgagggattgccttttaagcagtaacaccaaaaattgtgcatattttggttctgccctagtcacatcaacaaaaactgacatgagcacacctagtgagaggagaggctgggaaacgtcgtctctagctggacagctgcaaggaagaagtgagacatagggttgccagattagatatgggatgcccagttaaattcagacttcagatcaacaaccaatcatattttcagtaaaagtttagcccaagtaatacttgaatatacttatactaaaaaagaacccattatctgaaactcaaatttgactggacattctggatttttatttgctagatctggccgccctttggggggctcacagaattctgccacagagagccaccatacagttgtctgtgcacctaaagatgactgctttaggatgaggtaacccaccatcagctgccagagcaaactaagaagggtttctgtcccccaaagcccattacaggctctgtttcaatatcagacctctcctgatgagtacgaccatgtcactgcatttcacttctacttgcacacttcagcaatgaagagttcagtcacattaggaaacccaggccactatttaaaactcttaaatgttgtgttatttttcccggaaatgaatcacaatctggcctcctgttgtccccaccctttgatcctactcctgccatttaagtcacatagaaaagagtatctctttccctcctcctccacatgaaaacgtgttaaacaatttcatggctgtgttcctgacatcagaacagcctctgatagtttatcaggtctcctcccttatactacagcaggatgctgtttggaaaaatcctctaaccatgtttttcctgtgctcttgcaccaacacaacagtcaacgcagaagacttctgtgaccaaatgtgtgtggggttttccccaccaacgagcagcaggcacccgctgggtgcctccagttcaaatccaatgctacatatctagagatagcttcagatcccacaggttgagggctcagtccccaaggctccccctgacccccaccctaccctcagataccagtcataagtcaggcctctggaacttctgaccagccagcttcaagttgggactcccaggatcctgctttgggttgaattaatttgctagaggggctcacggaacccagggaaacacatttaccagcttattaccaaggacatgaatgaagagatgcacagagcgaggacgggtgaaggggtgtggagcttccctgcctccctgggccccatgctccaggaaccttcacgtgttcagctacccagaagatcttcataccctgttcttttgagtttttatggaggcttcattacacgaggcatgactgacaactgtgtagaaatgtgattggacaaaaatgcatgatctaaacccagcaaggcctttctgctcagaattttcttggcctctctgtagcattccttcctccagggtatggggcaagactttctctctgtgataaaggtcttttgacctacatcagattacagtcctgccttgagcaggtgagaaaggacaggagaaggtcagagagagtgattctgtttcatgaggcccgctcctgaggcctaaaatgccccaacattataacaaaagactcttacaagagatatagcagccaggaatcatggatgaaagccattctattatacagatatggtaatatcacagatgttcaacacccatcccgactaccacccccaacaactaccaacactcatattgcccaggcttctctggggctgaattgcccccaggacttgcacctgatttttgtataacctgggaatgggccaggtgctgtggctcacacctgtaatcccaacgctttgggaggacaaagtgggaggatcgctcgagcccaggagttcaagaccggcctgggcaacatagagaagacttgtctctaaaaataaaaacgtggggatgactgggacccatcctgattaactcctctgagtgagaccctgcaggtcagagtctccatgatagtgtgaggctcagagctcgcgagccctgcatgtctgtcctccactgtgggtcctattaagtatcagtaatagtaattataaggccaggcacagtagttcatgcctgtaaacccagcactttgggaggccaaagtgggaggattgcttgagctcaggagttcaagaccagcctgaggaacatagagagaccccatctctaccaaaaaaaaaaaaaattagccagacatggtagcatgcacgtgtagtcccagctactcaggagggtgagacaggaggattgcttgagcctaggagatcaaggttgcagtaagctataattgcaccactgcactctaatctgggtgacagagtgagaccctgtaataatagtaatattattatagtagcaagttgcccttattatgtttcagacactgggctaaactttccatgtattatcttgtttgatctgcacaacctccccctgaggtaggtactattattaccccattctacagaaaaagaaattgagactgggttctcacaagccagaagaacatcactgcaagtaaggggcagccttgggtttgcataagtcctgtccagagccttagctcgtatgctctccctgcccttcctccctgagcttgcttgtctgcttcatcaaggcccaagcctacactgaacacataattgcaaagcccaggtccctcttatcatagcttctccttgaacaaagagccgccaggatccttctgcatctcctcaccaaaatgcagtaacccctctgattctcagggcactcctgaatacaggtaaaggcccagccctgtgagctaccttttggccctagtggcctagctgccagggctgggccagggacctgactcaactggaacctttgtcttgtagctggataaagacttggaagaggtcaccatgcagctgcaggacacaccagaaaagaccacctacattaaacagaaccactaccaagagctcaatgacatcctcaacctgggaaacttcactgagagcacaggtaagagagccagggccccagaatgtggtagggaccttggtttcaaacaccagctgttcatcttccattttttagatgaagaaactgaggctcagacagggcacaggactggtatgaagtcacacacacagagctggagcatctggaacctctgtctgctgaccacagttcagtgtccgctttgagccccaccctgcctgggcctgggtcttcgatttctcatccctcggcttgcagttccacacctacacagtggggccagcattcccagtgtcctgactgggggcaggcacattttattttcccttttgttcttagcgaatagtttaccctttcttctctgaacgatatttcacagtttcaaacacacctcatcaatgtgcaagaaaagaatggtcagttagttatgatagaatgcttaatctcaccacccacttgggaattgcaagctacaataacacaaacctgccaggtgcaatggctcatgcctgtaatcccagcattttgggaggccaaggctagagaatctctttgagtccaggaatttgagatcagcctggacagcatagcaagaccccatctctacaaaaataaatttaaaaaaaaccacaaaccatttttgcctaccttttagaaaaaaaattttaaaggttaccagagttggtaagagtatttggaaatgagcattctcctgcaatgcattagaagtcagtctagcactgtctaaatgctccatgttaaacctcttgacctggcagttctactagcaggaacctgccccttgcaaatactcccaggtgtgcagagatgaacacagagatgttcatcacagtgctgtctgtaggtgagaaaaactgcagttaacttaaatgttcattatttgggggtggtttcattaattaagatatagcaaaacatggcacattttatagctattaaaaagtgaggtgggtctacttgtgcagatatggaaagatctccaggtgaaaaaagcaagatgaaagccaacattatgattatgggacacacaaatgcatacatgtgtgtgtgaatgcattttttaaaaggtttagaaaaacaaacaccaaattgctaacagtattcactcgtgtgaaaagaaatggtattgtggaaagtgagtgagaagggactattttacattacttttttttttttttttttaagatggagtctcactctgtcacccaggctggagtgcagtggcatgattccagctcactgcaaccttctcactggagaattctcactggagaattgttcaagcaattctcctacctcagcctccttagtagctgggattacaggtgcccaccaccacacccagctaatttttttttttttttagtagagacagggtttcaccatgttggccaggctggtctggaactcctgacctcaagtgattcgcctgcctcagcctcccaaagtgctgggattataggcatgagccaccacgcctggccacattaccttttttgtatttctctatggcttggatttttccattagcatgtattcatcaatttgttataatattattttaaatcaatgaaaaatctttattttatttatttattttttatttttttgagacggggtttcgctcttgttgcccaggctggagtgcaatggcacgatctcggctcactgcaacctccacctcccaagttcaagcaattcttctgcctcagcctcctgagtagctgggattacaggtgcctgccactgcacccagctaatttttgtgtacttttagtagagacggggtttcaccatgttggccaggctggtctcgaactcctgacctcaggtgatccacccacctcagcctcccaaagtactgggattacaggcataagccaccatgcctggccttttattctgattatataagtagtaagtggtcttattacagtagcaatattctataattaatattatataacatggttattgcaaaaacgtttaaattgagataacaaggaaattacaagaataaaaattacttctaataactttcgtatctggtaaaagtgggcattttaaatttgtgggaaaaatgaattattcaataaatttcattgggataaatgggtaggcatctggaggagaataaggtagatcctaaactcacacctacacaaaaattaattccaatgaataaaatatttaaatataaaaaatgaaaacatgaaagtactagaagaaaccaaagtaaaatttttaaaaaataatctcagagagtggaggacctgtctcagtttgatgcaaaacagaaatcacaaaaggaaaggttgataaatttaggtacaaaaagaatttctttcataatgcaaaagccatgataagtacagtcaaaaaaatcaaacaaagccaaaaattaactcagataacaagcttatgcccttatatataaggagaaatgatgtgtaacaatacaaaaagtatgtataattatataccaattagtaagaaaaagaccaacatctcaaaagaaaaatgagcaaaagagagttctcataaaaggaactggaaattgttcttacacttatgaaaagatgatcaatctcattccttattaaaggaatgcaaattaaatctgcaatgagataccatttttgcctcaaagactggcgaagatcagagatcaaaaagctgctcagagtgccaggcaacaggttataagagaggcattctcaaatgctgctggttgaaacagaaatcattcagacccagcaatcccacttttgggatttgttctccatgccttagtctgtttgtgctgctgtaacacaatactgcagacttggtaatttataaacaacagaaatgtatttcttacagttctggaggctggggagtcctaaatcaaggtgccagtaggttcagtgtctgaggagggtccagcctccacttctgagatggcacctggattgctgcatcctctggaggggaggaactctacatcttcatgtggcagaaggagtggaaggggtaaacccactttctcaagcccttttgtaagggccctaacctcatccatgcgggctccgccttcacgacttaattacctcctaaaggccccacctcttacactatcacattggtcattcagtttcaacacatgaatttggggggacacattcagaccatagcagtatggatatacagtcgattctgctgattcaccgtagcggtagttatgttctttctgtaaagcctccatcaacagtggattgtgaatactgaaccattgctcctatacaggattagttcctgggaatctctcacaggctgacatcacaagctgacatttttgtccaccaatcaatatataattttgttgtatgcatgtttctctttaaagacatcttatttaggctgagcacagtggctcaagcctgtaatcccagcactttgggaggccaaagtgggcggatcacgaggtcaagagatcgagaccatcctggccaacatggtgaaaccctgtctccactgaaaatacaaaaattagccgggcatggtagcacgtgcctgtagtcccagctacttgggaggctgaggcaggagaatcacatgaacctgggaggcggaggttgcagtgagcccaagatggcaccacggcactcctcctggagacagagtgagactccgtctcaaaaaaaaagacatctcatttaatatatatggtttaattagcattgcactcacagccaacagcactatagctcatgcctgatggaagcttatctaactcatgtattttctctccataaggcacatcacagccctcttgtgcttagggacactagccagcacttcagcgctgtgcttgggggccattttaaacagcaaactcaccaacacacagcacaaaatgtgaaaaacatgtcactaaataaccttcaggaagatacttatttacaatataaaagctaagcgctaaggcagtgcatcaccttgctcaacctcagctgggaacacgtgcatcatgcaactcacattttcccacaccgtgcatgtcagcaaatgaccacaaaagcattgaaatattgatttggggattacaaataaattttagtcagaagaagagttcgcaaatacaaaattcatgaataatgaggatcaactgtacacacgtaggtgcaaaatgacatacatataaggttgcccactggagcaaaaacaaagacccctccagaccacatgaatccaaatctcgggtgggaacctgatttttatatttctttaaatctccttgtatggtcctgaagcacagagagagttgagagaatttgaatcacatattttgtggctacacaatattattttgaatggaggtcctataacttctgtaactaatccattattaccaaattcagatgagttccaacattttaatattataaatgatgctgaggttgtggctgggcgcagcggctcacacctgtaatcctagcactttgggagactaaggcagttggatcacctgaggtcaggagttcgagaccaccctgaccaatatggtgaaaccccatctctactacaaatacaaaaaattagctgggcatggtggcatgcgcctgtagtcctagctgcttggagctgacacaggagaattgcttgaacctgggaggtggaagttgcagtgagccaagataatgccactggtggcacgatctgagtgacagaaaaaaaaaaaaaagatgccgaggttgaacatcttgtatatatctttgcacagatccttaattatttccttaggataatttcgagaagtggaaattccgggtaaaaaataggtccttttatggtgtttgacacagatcagcagtgcccccagtaagattatgtccatttattctcccaccagcagtttactgactattctttttctttgcaatctttgctgctctatgaaaaatataccttggaggttttttctttgtcttacatccctatgtgcctgtgaaaaagaatgttagaacctcttgtttctaagttatgtttcctacattagtcgacttgattttcccctttttgttcttggaaaggagagcgtggggcatgccacacacatccccagcacattgcttccatccctgactgctggaggcttctcagctcaccgccttggtcccgggagagccactacacagacctcagcttagagaacacagagggataatgggctcttttgcattctgtctcttggggcatcatcctacaaaaagttgcattgttgatttttaaaaactaagttaaccgaacatgttgtggtattgttgttttgcattcagatggaggaaaggccattttaaaaaatcacctcgatcaaaatccccagctacagtggaacacaacagagccctctcgaacatgcaaagatcctatagaagatataaactctccagaacagtaagtaccttctccttgagaattataactgaagaagaaatacgtcactcctgcacaagagtttgcaatttgcacgatgttttcacatccattattttatttgctttccacagccatcccatgatgcagtccaattacagtgctctttttacagatgaaaaactaatattcaaaaaggggaggtgacttgccaaaggtcactcaattgctacatgcaggaagtaggacttgaactcacatctttccaacatcaaatcccatgttgtctaccacaagacgctgcctttgttatgtgtaaaatttaaccttgctaaatgcatttacttaacagtttactgagacctcctgtatgtcaggcataggtgctagggttacagcggtgaagaaaacggactaaaattcctatcttcatagagcttccattctatctaggaggctgatagcttaattaaaaagcaagaagtggcatgtcaaacaataggagctttggaggaaaagcacagaagggggtcagggagtgtcattttaaatagggtggtcagagaagactcaatgagatggtgacatcaaagcaaagacctgaacatctctgttagctttgttcccacaggcaattttaggccttcccatcttatagcacattggaagcagaagctggaaatacaaactttgaaacttggcctctggaagtgacaagcaatgaggaaccagcaaaagcagccaaatcaccaattgcagcatcatttggggctctttagtattagagctaagggcctgtcaacccaactagctccaaggcctggccagcttacagtccaggacagtgagtgagagttacatggaatttgtcagcagtttgcctagcagttgcctccagtagagtgtaagcaccttgagagtaagttatgagtccttcatgtgtcccctgcaccgaacacaggttctgccagtgaataggttcttgacaagcatttgttgaatgaatgaaaggtgaacaggatcctaacagacagaagaatgctctgacaaccacaggacccaccttgcctaggcagatagccctgccctgggtgcttggacaggacacccttttcccaggtcacagtttattcttccctttttgtcctggacttcttgccagcatgatcttgccttaagacacagacttcagctgacattatacaggtccaactttaacttcagaatgagatctccaacactgtagttccatgcacacctgtgaggtgtctcttgggaggaatctttctggaaagtgtgggcagcacttcgtctgtacccatctatctcagaacccaccagtgacctaaatgaaccccaagggcacacccagttgggataaggctgcccccatgagttgattcgcctccaccacaaaacaatgtggttgaacagaagcagcaagaattccagcttccccagttctggttttgtttccatggggaagttacctgaactctgtactcttccctcttctttataatgggaatagcagtatttcttttgcctattgggtgtctgttaagctctggggtttttgtttttcgcttttttgcacgtgagtggccaggcactgggaacacaagaaggcataagaactcagtcccttctctcaaggaatgcggtgtgaaagttgcacccatggagaactgtgcaagaatgcagctgagccgagcagaggagcagtcacctgggcacatttgccgcaagcagccttttcaacaaagtgacatgacagtcattaagaccagaagggtgtggcaatgagaagggagtcagagggcagctcccttttcccttgctgctcctccatcacgtgctaacccacacccagctccatcttgcctccagctttttctggcttcatttctgagtatttacctagggttctgcttagcagaggaagggttctcctagcagagagtgagcacaaacaaggtgatatttaaactggatcttgaaggagacacagttcatcatgtcaggaagcagagaaagagtcttccagacagggaaacagcagaagagcacccaggagcagggtttccagggaaactggctgccagagggcagggcttacaggtggaaaggatggaagattcacctggaaaattctgatccaaagatggaacttagggggccccaaatatcacatcagtgtccctttttttcccttccttggcttcctagtgttggaaagataacactagttaccaaagaagctggaagagcctgtgggaattggcccagcaagaagagatgcggtcctgggcaaagcagaggcagacgggagagaggaaggatggagcaggcgagaagtctttcagggatgaaactgaaagccctgtggaggtttgcaagagtagagaatgcgaactatctggtttgcagcaaagccctgatagaaaggcaaagctttgtccttagtaatacagacagtccccaacttaccatttttcaaatttacaatggtgtgaaagtgatacacattcagtacagtattcagtaaattgcatgagatatttaacacttttttataaaataggccttgtgttagatgatatggcccaactgtaagtgttctgagcacatttaaggtaggcgaggctcagctaggatatttggtaggttaggtggattaaatgcatttttcaacttacgatattttcaacttacaatgggtttatgggaatgtaaccccatcgtaagtcaaggagcatcttttctgctagggtatttataataaccaccaaatcctggcccaaagctcgagaaaattcatctcccttgtttattcaagtctccctggtcattcccagggcagtagctggtacatatgggccctcattaaatacctgctggattgctgaatggttagatgattggatggacagatcttggattcagagaaaaatatgctcctgtcatcagcttttttagccaaagcaagtccaaggaactttctggtaagcgcccagctacccttcactaacactcctccctctccttctcttcagcatccagcgtcggctgtccctccagctccccatcctccaccacgcctacctcccatccatcggaggcgtggacgccagctgtgtcagcccctgcgtcagccccaccgccagcccccgccacagacatgtgccaccctccttccgagtcatggtctcgggcctgtaagggtgggaggcctgggcccggggcctcccccgtgacagaaccacactgggcagaggggtctgctgcagaaacactgtcggctctggctgcggagaagctgggcaccatggctggcctctcaggaccactcggatggcactcaggtggacaggacggggcagggggagacttggcacctgacctcgagccttatttgtgaa

SEQ ID NO: 1464 - protein, 941 aa, Homo sapiens
MASPRSSGQPGPPPPPPPPPARLLLLLLLPLLLPLAPGAWGWARGAPRPPPSSPPLSIMGLMPLTKEVAKGSIGRGVLPAVELAIEQIRNESLLRPYFLDLRLYDTECDNAKGLKAFYDAIKYGPNHLMVFGGVCPSVTSIIAESLQGWNLVQLSFAATTPVLADKKKYPYFFRTVPSDNAVNPAILKLLKHYQWKRVGTLTQDVQRFSEVRNDLTGVLYGEDIEISDTESFSNDPCTSVKKLKGNDVRIILGQFDQNMAAKVFCCAYEENMYGSKYQWIIPGWYEPSWWEQVHTEANSSRCLRKNLLAAMEGYIGVDFEPLSSKQIKTISGKTPQQYEREYNNKRSGVGPSKFHGYAYDGIWVIAKTLQRAMETLHASSRHQRIQDFNYTDHTLGRIILNAMNETNFFGVTGQVVFRNGERMGTIKFTQFQDSREVKVGEYNAVADTLEIINDTIRFQGSEPPKDKTIILEQLRKISLPLYSILSALTILGMIMASAFLFFNIKNRNQKLIKMSSPYMNNLIILGGMLSYASIFLFGLDGSFVSEKTFETLCTVRTWILTVGYTTAFGAMFAKTWRVHAIFKNVKMKKKIIKDQKLLVIVGGMLLIDLCILICWQAVDPLRRTVEKYSMEPDPAGRDISIRPLLEHCENTHMTIWLGIVYAYKGLLMLFGCFLAWETRNVSIPALNDSKYIGMSVYNVGIMCIIGAAVSFLTRDQPNVQFCIVALVIIFCSTITLCLVFVPKLITLRTNPDAATQNRRFQFTQNQKKEDSKTSTSVTSVNQASTSRLEGLQSENHRLRMKITELDKDLEEVTMQLQDTPEKTTYIKQNHYQELNDILNLGNFTESTDGGKAILKNHLDQNPQLQWNTTEPSRTCKDPIEDINSPEHIQRRLSLQLPILHHAYLPSIGGVDASCVSPCVSPTASPRHRHVPPSFRVMVSGL

SEQ ID NO: 1465 - DNA, 1066 bp, Homo sapiens
  source
  (1)..(1066)
  CDS (201)..(866)
cggccagtgttgccgggcacttcctggttcccgcgcgccccgggtgcagctccctgcacccagtgctggcgctcctcagaagggagggggccagaggcgagatgtcgcaaccgcctccctccctctttccccgccttggcactcagtcgcctcccagatgagcactctctcagaccgctgcgggccgccaggcgccgggaatgtcccctgaatgcgcgcgggcagcgggcgacgcgcccttgcgcagcctggagcaagccaaccgcacccgctttcccttcttctccgacgtcaagggcgaccaccggctggtgctggccgcggtggagacaaccgtgctggtgctcatctttgcagtgtcgctgctgggcaacgtgtgcgccctggtgctggtggcgcgccgacgacgccgcggcgcgactgcctgcctggtactcaacctcttctgcgcggacctgctcttcatcagcgctatccctctggtgctggccgtgcgctggactgaggcctggctgctgggccccgttgcctgccacctgctcttctacgtgatgaccctgagcggcagcgtcaccatcctcacgctggccgcggtcagcctggagcgcatggtgtgcatcgtgcacctgcagcgcggcgtgcggggtcctgggcggcgggcgcgggcagtgctgctggcgctcatctggggctattcggcggtcgccgctctgcctctctgcgtcttcttccgagtcgtcccgcaacggctccccggcgccgaccaggtgagcgcccctctgtgtgtgccgggcaggtgtcctgcgcaggctgggaagcggggccccgacggaagctgggatgaggatgatcaagaacaacaatagccatttattgcacttaatcgttgtgccaaatcttgtgcccatggctgtgaagtttaatctcttaaatctcactacaacgctgtgcacacgccctcctaaatgatgtaagtggagtcccccaaattcttgcaaaatgcaatgactgttgcgaggttaattaacgagtagtttaggagcgagacggaactttgggggtgcag

SEQ ID NO: 1466 - protein, 221 aa, Homo sapiens
MSPECARAAGDAPLRSLEQANRTRFPFFSDVKGDHRLVLAAVETTVLVLIFAVSLLGNVCALVLVARRRRRGATACLVLNLFCADLLFISAIPLVLAVRWTEAWLLGPVACHLLFYVMTLSGSVTILTLAAVSLERMVCIVHLQRGVRGPGRRARAVLLALIWGYSAVAALPLCVFFRVVPQRLPGADQVSAPLCVPGRCPAQAGKRGPDGSWDEDDQEQQ

SEQ ID NO: 1467 - DNA, 889 bp, Homo sapiens
  source
  (1)..(889)
  CDS (201)..(689)
cttaccatcatagaccgataacatagccagttttacttgcttgtttcttgaattccttttccttttaatgtgagaaaaggctagcataagggcaggaatgaagcaggtgcttaatacttgtttgtattcttttctaacctccctacaaaactagtaagagaattgaaaacatagatgtactttgataaattgcctagcatatggtatctgtttattctgtttttgtgtttagacttttttttttttttaaattaagtctaatagtttctgtctctctctctttttttttttttaggcagagtctcgctctgttgcccaggctaaagtgcagtggtgtgatctcagcccactgcaacctctgctccccgggttcaagcgattctcctgcctcagcctcccaagtaggtgggattacaggcacacaccaccatgcctgggcaatttttgtatttttagagacggagtttcaccatgttggccaggctggtctcgagcttctgacctcaggtcatcctcccacctcaacctctcaggtagctggaactataggtacacaccgccatgcctgtgtaatttctacattttttgtacggatggggtctcactatgttgctaggctggtctcgatctcctgggttcaagggatcctccagccttggcctcccaaagtactgggactacaggcgtgagctaccctgcctggtttttgctaatttccaagacaaaaatatacagcagtgttattactttttggtgttaatttttatttttttcctctgtgattaatatttgttctgtatttcagctttccttgtgttttttttcttctaagactataagactaaatctttgtatatcttcttattgctttttttttttttttttttga

SEQ ID NO: 1468 - protein, 162 aa, Homo sapiens
MVSVYSVFVFRLFFFFKLSLIVSVSLSFFFFRQSLALLPRLKCSGVISAHCNLCSPGSSDSPASASQVGGITGTHHHAWAIFVFLETEFHHVGQAGLELLTSGHPPTSTSQVAGTIGTHRHACVISTFFVRMGSHYVARLVSISWVQGILQPWPPKVLGLQA

SEQ ID NO: 1469 - DNA, 949 bp, Homo sapiens
  source
  (1)..(949)
  CDS (201)..(749)
agcctcatgcacacagtcattaccctgtgccaggctgctacctgagccaccggcccaggcctcctgcctggagcacaggcgttcacagccccactgcctcctgcctcctaagagggtacagctccagttccccttccagggagcaactccctccctccagcacccacagcctctgggaagggccccaagtcagctcctaaatggggtggggatgcagcggaggcctcgggagacggatgcccctcctcaaaggcagagtaggggcatgggctctggagcaattctgcacatgcgtgtttatgtgtacacaggcatgtgtttgcatgcaggcacgtttatgcatgcacaggcatgtgtgtgtttgcatgcagatgtgtttatgcgtgtacaggcatgtgtgtttgcatgcaggcatgtgtttatgtgtgcaacggcatgtgtgtttgtatgcaggcatgtgtgtgcatgcaggcacatgtttatgcatacacaggcatgtgtgtgtttgcatgcaggcacgtgtttatgtgtgcacaggcatgtgtgtgtgcatgcaggcatgtttatgtgtgcacaggcatgtgtgtgtttgcatgcaggcatgtttatgtgtgcacaggcatgtgtgtgtttgcatgcaggcacatgtttatgtgtgtgtgcatgcaggcacgtgtttatgtgtatgcaggcatgtgtgtctttgcatgcaggcatttactcagatacattcacacacaggcctataaacacgcatcatctctaggtcattctggagcttgagtttgaggcttccccacatcagagatgcagcagcgtccccagtccagcgtgggccctgctggcttctcaggtgtggaggtgaggaggcagcagggaggctgccagcgctaggtgccatgcggttcttggctctgcaggcaccagctatgagactaggagcccagat

SEQ ID NO: 1470 - protein, 182 aa, Homo sapiens [sequence omitted]

SEQ ID NO: 1471 - DNA, 1108 bp, Homo sapiens
  source
  (1)..(1108)
  CDS (201)..(908)
aagtaccaacacagcctaattggtatttatattaaatctgggtggaatttctaagaacttgctgctaatgttgtttttaattttaacagcctcaagtactacagccttccagcagccttcccagacccacagatcacacccagggaaaactaataaagccacaacgtatcgaggcccgcagtgaatgctcaatccaagacatgcatcagggcggtgcacatccggaagaaagctttacacacgtcttgcaccaagaaagcaactatggtttggaagagcagcctttttcatcaggcccacaattaacaatggatgtggctaagagtacaccttctgaagcaaacttaaacattactgtaaatgctcaagagccttatcatttggcaaacaatcaaattagtgacatgcagtttatacccacttctcttcagacacctcccgagtcaagtacagtagaccaggctaagagagttggaagaaatcagtctccgccagtgggttatatgtctcagcccaagtccttgcagcttttaaagccatccatattgagttctttggtaccgcctccagtttctgaatcatctccaagtaggactcccacttgtaaaaagtcaccaataatcacaacatgtaattcagcaaaacttcagccaacatctagtcaaacaaatcttgcaaataatcagaatctgaaagcatctaagctccgccccccctcaggctctttcaaacaaaaacaaacaaacagcccccaactagagcctcaaagcttccaggccaagacaagcatcccaaggccactaacacaacgaaaagaaatcatgcagaatccaaatggcaatttgcattctggggattgtttggcctctaatcgatattctcgtcttcctaaaccaaagatacattaagtacatagccatcacctgccaatttgtttcttaaaaacaatctcttctgtaatagctttatgtgcagcttgcagcttgctactgtggtggaggttccattgaaagcctgcaaatcttaaattaaaatgtggaagcttctactagtttggctccttcattttatatcctggttgaagtacatgccatttgagcataattat

SEQ ID NO: 1472 - protein, 235 aa, Homo sapiens [sequence omitted]

SEQ ID NO: 1473 - DNA, 1920 bp, Homo sapiens
  source
  (1)..(1920)
  CDS (201)..(257)
  CDS (445)..(642)
  CDS (1523)..(1720)
gaatgctttgaagaaactcttcctaagctagtgtgagaggagaatccctcgtgtctgaacttgagtgggcgatgggaaaaaatatggtgggcagggagcgatgcatcttcttgcctctgaaaaatagaaagatctaaagatttgagcaagggaatcactgacattatttactgttccttggacttttgtatgttcctcaaatgagggaaccatgggccttcttcatccagatcaatgacctccaggagctgggggtggtaagtgtcagggcctagagacaagccctggttattaggccagtctctgcaagaaaggagcactggccctgccaagaacttcccctgggcttacctccagacaactgcattgcagttgccctccctgatggtcctgttgcaaatagtggctttgaaatagctgctgttgctctgtctgcccctctaggtgaattacaagaaaggctttgaacactcaaaggcgcagttccatctgccgttggacatggccgccctggtgcatgccaagaaggctcagaccctggccagcaatcaggactacaaacatccactgccccagtacacttccttggcagaagacctgaggctgagctgtgccaagaaagctcacaaattgcagagtgaggtaaggagacctggcctctttctcagggccccttcttctcttaggacctcagggtggtgacctccaggctcctgttggctcagtgaaatctctggaagtgagaaatcctaaacccaagtcttattttgaaacccagtctgagagttcctgcacatcccttaagcacagttacacaaatctaatcataaccacaatttattattttttgctgcactctaagcattgttttatgcattatctcacaatcagcccatatcattagtttattctcattttacagagaaattacagtgaaatgcagagaagttaaatatcttgtccaagatcacacagctatagttagaaagagagggctgggatttgaacttgaggtttgaatgacaaagatgccctcaaggttcatggttgtgcatgtttaagatttgccaatgatattgcctctggcctcaagtctcaggaaggattcctcttggtgcttcatgcgttcctgtgccacccgccttctgaggagggctaagatctgttgggagaggctgctcagaacctgtcaggactgacgcacttcagggagtggagagggaaatcagggccctggagaccctccttgggtccctttgaggagtctttgtactcctctgacatgcatttctcactcgtgatcccgatttctgaagcagacaggcccaggagggtcaggaagcattggagacttcctcactcccaaggagagccagagtgttcttcccaacaggcatccacatcctgttcactactcaccttatttcccagcttgctaggtttccatgctatgagatttgcaggtaatgggcccgcttaggaaaagaaaactccgcacaaaacctctttcctggtttggcagtgcctgcgatctgagcggcactcagatctgggtgtctgtcgtctgtttggattttacgcctgtgtacagcgtttactgaatgacataaactgtcaggaacctgagagcagctgtaggaacgagggagctgccacgctcatctcgggggcccgtttgtcacttgagcggagccctcacttgccctgcctctggttgtgatagcgattggaaggcaggacgcccagggggcgcctcactggctgaaggggagtgaatgtgggaactctttaaactgtcagcccgaatcattcaggtacacagactggcccccacccacacgaactcaggcaggcctttgccagattcttttggatttatttattagttctttcttaacccatgattaattaatgccaccc

SEQ ID NO: 1474 - protein, 150 aa, Homo sapiens
MREPWAFFIQINDLQELGVVNYKKGFEHSKAQFHLPLDMAALVHAKKAQTLASNQDYKHPLPQYTSLAEDLRLSCAKKAHKLQSECLRSERHSDLGVCRLFGFYACVQRLLNDINCQEPESSCRNEGAATLISGARLSLERSPHLPCLWL

SEQ ID NO: 1475 - DNA, 1633 bp, Homo sapiens
  source
  (1)..(1633)
  CDS (201)..(1433)
gtgtgccccttcccaaagagactccaaggaccccctgttcggggcccctcaaaccataaactccaggaatggtgggggacagtatctgggacttgctctctgggaccctggtggcctctctagtctggcctgtcagccaccagagggcgctaaaggaccatgggcagagtctgaggcagtggtggtaacgggtgaaggtgatggtggtggtggtgatgatggtggcagtagtggtggtggtggtgatgatgatattgatggtcatgatggtggtggtgacaatgatcatggggaccgtgctgatggcggtgtttgtgatgatggtggcggtggtggtgatggtggtgggcatgagggtagttggggtggtgatggcattaccgttgatgagggtggtgatgatagtgatggtgatggtggtgggaatgatgacgaagatgatgatgatagtggtgcaaatggcagtggtggtggtagtgactgtggtgttgttgatggtattagtgctgataaaggtggtgatgatgatgatggtggtgggtgacgaaggtggtggtggtgatgattgtggtggggataatggtggtgatggtggttattgcagtggtagtgttgatcatggtggtggtagtgatggtggtcatgatgttggtggtgttggtgttggtattggtgttggtgatggtgatggtggtggtaataatcatgggatgatgatagtagtcatggtggtagtgacaatggtgacagtggaggggatggtggtggtgataatgattgtggtggtgatggtgatagtgttggtactggtggtggtgatgatggttgtggtggtggtgatgatagtggaggtggtagtaatgatgatggtggtggtagctggtagtggtggcagtggtggtgatggtgatgattgtggtgatggtgatggggtagtggtggttatggtggtgttggttgttatggtggtagtgatgatcatggtggtggtgactatagtcactggtgatgctggtgttcatggtgatggtgatgatgatagtggtggtggttgtggcagtgctgctgctgatggtggtggtgatgatgagggtgatgatgacaatgagtatgatgatggtggtggtgatgatcgtggttgtggtgtgttgatggtggtgtttattgtggcggtgatgatgatagtgttaataattgtggtgatgttggtgatggtggtgatggagacgatgatggtgatgattgtactggtggtgttggtgatggtgtggtacgatggtggtgctgatggtcatgatggtggtgggggtgataatgatcctggtggtggccatggtggtgtttttgataacgtgataatgttggagatggtggtgattgtggtggtgataatggtggtcatggtgatggtgatatcagtgtgggtgatgtagtggtggggatggttcagatgttggtgatggtggtggtgatggcagtgatagttaggatgatggtgatgatgatgatggcatgggtgcttgatatggtttggctctgtgttcccttccaagttgtaatcaccataatccccatgtgtcaaaggcgggaccaggtggaggtaatcggatcatgggggtggtttcctccatgc

SEQ ID NO: 1476 - protein, 410 aa, Homo sapiens [sequence omitted]

SEQ ID NO: 1477 - DNA, 1345 bp, Homo sapiens
  source
  (1)..(1345)
  CDS (201)..(1145)
tcagaattatagtaaaaataggcaaagacttccttaagtatatgagactctatccaacagcagaaggttctgatcaagactggaagtgcaataaaagcaatgaagataagtatcagatatgaatgctcttctgcaatggtttgattgtaaatttattaatgatacaaagtattaaaaacttggattttttgtctctggagatggccaccgaattggacaaaatctttctgattctggcaatagcagaattcatcatcagcatgctggggaatgtgttcattggactggtaaactgctctgaagggatcaagaaccaaaaggtcttctcagctgacttcatcctcacctgcttggctatctccacaattggacaactgttggtgatactgtttgattcatttctagtgggacttgcttcacatttatataccacatatagactaggaaaaactgttattatgctttggcacatgactaatcacttgacaacctggcttgccacctgcctaagcattttctatttctttaagatagcccacttcccccactcccttttcctctggctgaggtggaggatgaacggaatgattgttatgcttcttatattgtctttgttcttactgatttttgacagtttagtgctagaaatatttattgatatctcactcaatataatagataaaagtaatctgactttatatttagatgaaagtaaaactctctatgataaactctctattttaaaaactcttctcagcttaaccagttttatccccttttctctgttcctgacctccttgctttttttatttctgtccttggtgagacatactagaaatttgaagctcagttccttgggctctagagactccagcacagaggcccataggagggccatgaaaatggtgatgtctttccttttcctcttcatagttcattttttttccttacaagtggccaatgggatattttttatgttgtggaacaacaagtacataaagtttgtcatgttagccttaaatgcctttccctcgtgccactcatttattctcattctgggaaacagcaagctgcgacagacagctgtgaggctactgtggcatcttaggaactatacaaaaacaccaaatgctttacctttgtagacagactttccagaagcttttctaagagaataactcaacgaggtgcatttggggatcacgtccactgtttttttttttttttttctactgggtttctctaagtattttggaacataaatgaaatcctaccaggttgcttttgatggtaattcacacattgccggtcgataccattttaaaagtaatcatttttgtttgga

SEQ ID NO: 1478 - protein, 314 aa, Homo sapiens
MATELDKIFLILAIAEFIISMLGNVFIGLVNCSEGIKNQKVFSADFILTCLAISTIGQLLVILFDSFLVGLASHLYTTYRLGKTVIMLWHMTNHLTTWLATCLSIFYFFKIAHFPHSLFLWLRWRMNGMIVMLLILSLFLLIFDSLVLEIFIDISLNIIDKSNLTLYLDESKTLYDKLSILKTLLSLTSFIPFSLFLTSLLFLFLSLVRHTRNLKLSSLGSRDSSTEAHRRAMKMVMSFLFLFIVHFFSLQVANGIFFMLWNNKYIKFVMLALNAFPSCHSFILILGNSKLRQTAVRLLWHLRNYTKTPNALPL

SEQ ID NO: 1479 - DNA, 1300 bp, Homo sapiens
  source
  (1)..(1300)
  CDS (201)..(1100)
tctttgggtccacaccgtctttaagagctgaaaccttgctactgctcagccctggggccatgccatctttaagagctgtaacatcactgcaaaggtccgtgcctccattcttgaagtcagcgagaccacgaacccacctgcaggaaccaactccggatacaacaccagcattttaaaaatttctttttgtctgttcagacatgataacttttctgcccatcatattttccattctagtagtggttacatttgttattggaaattttgctaatggcttcatagcgttggtaaattccaccgagtgggtgaagagacaaaagatctcctttgctgaccaaattgtcactgctctggcggtctccagagttggtttgctctgggtgttattattaaattggtattcaactgtgttgaatccagctttttatagtgtagaattaagaactactgcttataatatctgggcagtaaccggccatttcagcaactggcctgctactagcctcagcatattttatttgctcaagattgccaatttctccaaccttatttttcttcgcttaaagaggagagttaagagtgtcattctggtggtgctgttggggcctttgctatttttggcttgtcatctttttgtggtaaacatgaatcagattgtatggacaaaagaatatgaaggaaacatgacttggaagatcaaattgaggcgtgcaatgtacctttcagatacgactgtaaccatgctagcaaacttagtaccctttactgtaaccctgatatcttttctgctgttagtctgttctctgtgtaaacatctcaagaagatgcagctccatggcaaaggatctcaagatcccagtaccaaggtccacataaaagttttgcaaactgtgatctccttcttcttgttatgtgccatttactttgtgtctgtaataatatcagtttggagttttaagaatctggaaaacaaacctgtcttcatgttctgccaagctattggattcagctgttcttcagcccacccgttcatcctgatttggggaaacaagaagctaaagcagacttatctttcagttttgtggcaaatgaggtactgagtgaaaggagagaagccttcatctccatagattcagaagaggggcattgtgtgtcttctagcagaaaacaaactggtggtgtatgaaacattttatatttcttacagtgttttctgtaatgtatgtgtatgaataatttccaaacatatacctagataaatctttaacctagtctaaaaaatgtatgtatgtgtgtgtgt

SEQ ID NO: 1480 - protein, 299 aa, Homo sapiens [sequence omitted]

SEQ ID NO: 1481 - DNA, 1360 bp, Homo sapiens
  source
  (1)..(1360)
  CDS (201)..(1160)
taaagagagcattgaacttatccattagcatgccatggtgatttctgacttgacactggtcacagcaattaaaagtaaaaagaatgtcacagcacatacacaaatcaggtgcatatagaatttaaggtcaggatattcaagcaatcacaaccagtgatattacaccagcattttaaaaatttctttttgtctgttcagacatgataacttttctgcccatcattttttccattctaatagtggttatatttgttattggaaattttgctaatggcttcatagcattggtaaattccattgagtgggtcaagagacaaaagatctcctttgttgaccaaattctcactgctctggcggtctccagagttggtttgctctgggtgttattactacattggtatgcaactcagttgaatccagctttttatagtgtagaagtaagaattactgcttataatgtctgggcagtaaccaaccatttcagcagctggcttgctactagcctcagcatgttttatttgctcaggattgccaatttctccaaccttatttttcttcgcataaagaggagagttaagagtgttgttctggtgatactgttggggcctttgctatttttggtttgtcatctttttgtgataaacatggatgagactgtatggacaaaagaatatgaaggaaacgtgacttggaagatcaaattgaggagtgcaatgtaccattcaaatatgactctaaccatgctagcaaactttgtacccctcactctgaccctgatatcttttctgctgttaatctgttctctgtgtaaacatctcaagaagatgcagctccatggcaaaggatctcaagatcccagcaccaaggtccacataaaagctttgcaaactgtgacctcctttcttctgttatgtgccatttactttctgtccatgatcatatcagtttgtaattttgggaggctggaaaagcaacctgtcttcatgttctgccaagctattatattcagctatccttcaacccacccattcatcctgattttgggaaacaagaagctaaagcagatttttctttcagttttgcggcatgtgaggtactgggtgaaagacagaagccttcgtctccatagattcacaagaggggcattgtgtgtcttctagcagaaaacaaactggtggtgtatgaaacattttatatttcttactgggttttctgtaatatatgtatatgaataatttccacatgtatacctagaaaagtcttttacctaaagttagtctagaaaagtacatatatatagatgtgtgtgtgtgtgtgtgtgtgtatgaaaaactgaagaacattgacaataacatgcttt

SEQ ID NO: 1482 - protein, 319 aa, Homo sapiens
MITFLPIIFSILIVVIFVIGNFANGFIALVNSIEWVKRQKISFVDQILTALAVSRVGLLWVLLLHWYATQLNPAFYSVEVRITAYNVWAVTNHFSSWLATSLSMFYLLRIANFSNLIFLRIKRRVKSVVLVILLGPLLFLVCHLFVINMDETVWTKEYEGNVTWKIKLRSAMYHSNMTLTMLANFVPLTLTLISFLLLICSLCKHLKKMQLHGKGSQDPSTKVHIKALQTVTSFLLLCAIYFLSMIISVCNFGRLEKQPVFMFCQAIIFSYPSTHPFILILGNKKLKQIFLSVLRHVRYWVKDRSLRLHRFTRGALCVF

SEQ ID NO: 1483 - DNA, 1330 bp, Homo sapiens
  source
  (1)..(1330)
  CDS (201)..(1130)
cccataaaggcagcattgaactcattcattagtttaagctggtgcttttctgttgacattgttcacagaatttaaaagtataaagaatgttattggacattcaggaatcaagtgcatatttaacttaaagtcttgaatatcagaggagtcaccatcagtgacattaggcctgaattttttacttgcttttttgtttagacatgatgagttttctacacattgttttttccattctagtagtggttgcatttattcttggaaattttgccaatggctttatagcactgataaatttcattgcctgggtcaagagacaaaagatctcctcagctgatcaaattattgctgctctggcagtctccagagttggtttgctctgggtaatattattacattggtattcaactgtgttgaatccaacttcatctaatttaaaagtaataatttttatttctaatgcctgggcagtaaccaatcatttcagcatctggcttgctactagcctcagcatattttatttgctcaagatcgtcaatttctccagacttatttttcatcacttaaaaaggaaggctaagagtgtagttctggtgatagtgttggggtctttgttctttttggtttgtcaccttgtgatgaaacacacgtatataaatgtgtggacagaagaatgtgaaggaaacgtaacttggaagatcaaactgaggaatgcaatgcacctttccaacttgactgtagccatgctagcaaacttgataccattcactctgaccctgatatcttttctgctgttaatctactctctgtgtaaacatctgaagaagatgcagctccatggcaaaggatctcaagatcccagcaccaagatccacataaaagctctgcaaactgtgacctccttcctcatattacttgccatttactttctgtgtctaatcatatcgttttggaattttaagatgcgaccaaaagaaattgtcttaatgctttgccaagcttttggaatcatatatccatcattccactcattcattctgatttgggggaacaagacgctaaagcagacctttctttcagttttgtggcaggtgacttgctgggcaaaaggacagaaccagtcaactccatagattcacaagaggtgcattgtgtgttttctagcagaaaacaaattgatggtgtctggaacattttatatttcccacaagtttttccgtagtctatgtatttgagtaatttccaaaagttgacatagaaaagtcttttacctaagtttattatataaaagtatatatatataatatacatttgcgtgtgtgtgtatgtctga

SEQ ID NO: 1484 - protein, 309 aa, Homo sapiens
MMSFLHIVFSILVVVAFILGNFANGFIALINFIAWVKRQKISSADQIIAALAVSRVGLLWVILLHWYSTVLNPTSSNLKVIIFISNAWAVTNHFSIWLATSLSIFYLLKIVNFSRLIFHHLKRKAKSVVLVIVLGSLFFLVCHLVMKHTYINVWTEECEGNVTWKIKLRNAMHLSNLTVAMLANLIPFTLTLISFLLLIYSLCKHLKKMQLHGKGSQDPSTKIHIKALQTVTSFLILLAIYFLCLIISFWNFKMRPKEIVLMLCQAFGIIYPSFHSFILIWGNKTLKQTFLSVLWQVTCWAKGQNQSTP

SEQ ID NO: 1485 - DNA, 1300 bp, Homo sapiens
  source
  (1)..(1300)
  CDS (201)..(1100)
cttttctatttctataaagacagttttgaattcatctattagcatatgctggtgcttgcctgttgacactagtcactgaatttaaaggcagaaaatgttattgcacatttagtaatcaagtgttcatcgaagttaacatctggatgttaaaggactcagaacaagtgttactaagcctgcatttttttatctgttcaaacatgatgtgttttctgctcatcatttcatcaattctggtagtgtttgcatttgttcttggaaatgttgccaatggcttcatagccctagtaaatgtcattgactgggttaacacacgaaagatctcctcagctgagcaaattctcactgctctggtggtctccagaattggtttactctgggtcatgttattcctttggtatgcaactgtgtttaattctgctttatatggtttagaagtaagaattgttgcttctaatgcctgggctgtaacgaaccatttcagcatgtggcttgctgctagcctcagcatattttgtttgctcaagattgccaatttctccaaccttatttctctccacctaaagaagagaattaagagtgttgttctggtgatactgttggggcccttggtatttctgatttgtaatcttgctgtgataaccatggatgagagagtgtggacaaaagaatatgaaggaaatgtgacttggaagatcaaattgaggaatgcaatacacctttcaagcttgactgtaactactctagcaaacctcataccctttactctgagcctaatatgttttctgctgttaatctgttctctttgtaaacatctcaagaagatgcggctccatagcaaaggatctcaagatcccagcaccaaggtccatataaaagctttgcaaactgtgacctccttcctcatgttatttgccatttactttctgtgtataatcacatcaacttggaatcttaggacacagcagagcaaacttgtactcctgctttgccaaactgttgcaatcatgtatccttcattccactcattcatcctgattatgggaagtaggaagctaaaacagacctttctttcagttttgtggcagatgacacgctgagtgaaagaagagaaaccctcaactccatagattcacaaggggagcatcgtgggtcttctagcagaaaacaaactgatggtgtctggaacattttatatttctatcagtttttccatagtgtttgtatgtgagtaatttcaaaacagatacctagaaaagtcatatatatatttatgggtgtatatgtgtgcatgtgtgtg

SEQ ID NO: 1486 - protein, 299 aa, Homo sapiens
MMCFLLIISSILVVFAFVLGNVANGFIALVNVIDWVNTRKISSAEQILTALVVSRIGLLWVMLFLWYATVFNSALYGLEVRIVASNAWAVTNHFSMWLAASLSIFCLLKIANFSNLISLHLKKRIKSVVLVILLGPLVFLICNLAVITMDERVWTKEYEGNVTWKIKLRNAIHLSSLTVTTLANLIPFTLSLICFLLLICSLCKHLKKMRLHSKGSQDPSTKVHIKALQTVTSFLMLFAIYFLCIITSTWNLRTQQSKLVLLLCQTVAIMYPSFHSFILIMGSRKLKQTFLSVLWQMTR

SEQ ID NO: 1487 - DNA, 1300 bp, Homo sapiens
  source
  (1)..(1300)
  CDS (201)..(1100)
tccgtaaagatgacatcaaactcatccattagcataagctggtactttcttgtttgacactggtcacagtgtttaaaagtaaaaagaatgttactgcacattcagaaatcagatgcacataaaatttaaggtcagagtattaaagaaatcacaaccagtgatattaggcttgcattttctttctttttttctgctcagatatgataacttttctatacatttttttttcaattctaataatggttttatttgttctcggaaactttgccaatggcttcatagcactggtaaatttcattgactgggtgaagagaaaaaagatctcctcagctgaccaaattctcactgctctggcggtctccagaattggtttgctctgggcattattattaaattggtatttaactgtgttgaatccagctttttatagtgtagaattaagaattacttcttataatgcctgggttgtaaccaaccatttcagcatgtggcttgctgctaacctcagcatattttatttgctcaagattgccaatttctccaaccttctttttcttcatttaaagaggagagttaggagtgtcattctggtgatactgttggggactttgatatttttggtttgtcatcttcttgtggcaaacatggatgagagtatgtgggcagaagaatatgaaggaaacatgactgggaagatgaaattgaggaatacagtacatctttcatatttgactgtaactaccctatggagcttcataccctttactctgtccctgatatcttttctgatgctaatctgttctctgtgtaaacatctcaagaagatgcagctccatggagaaggatcgcaagatctcagcaccaaggtccacataaaagctttgcaaactctgatctccttcctcttgttatgtgccattttctttctattcctaatcgtttcggtttggagtcctaggaggctgcggaatgacccggttgtcatggttagcaaggctgttggaaacatatatcttgcattcgactcattcatcctaatttggagaaccaagaagctaaaacacacctttcttttgattttgtgtcagattaggtgctgagtaaaagacctgaaactctcaactctctagattcacaagtgggacattgtgtgtgtattctaggagaaaacaaactgatagtgtctggaacattttatactttttactgttttttctgtagtgtatgtttttgagtattttctgaaagcatacctagaaaagtcttttacctaaagttagtctaaaagtgtatctatgtg

SEQ ID NO: 1488 - protein, 299 aa, Homo sapiens
MITFLYIFFSILIMVLFVLGNFANGFIALVNFIDWVKRKKISSADQILTALAVSRIGLLWALLLNWYLTVLNPAFYSVELRITSYNAWVVTNHFSMWLAANLSIFYLLKIANFSNLLFLHLKRRVRSVILVILLGTLIFLVCHLLVANMDESMWAEEYEGNMTGKMKLRNTVHLSYLTVTTLWSFIPFTLSLISFLMLICSLCKHLKKMQLHGEGSQDLSTKVHIKALQTLISFLLLCAIFFLFLIVSVWSPRRLRNDPVVMVSKAVGNIYLAFDSFILIWRTKKLKHTFLLILCQIRC

SEQ ID NO: 1489 - DNA, 1171 bp, Homo sapiens
  source
  (1)..(1171)
  CDS (201)..(971)
tccataaatacattattgaactatcaattagcataaactgctactttcttgtttgacactggtcacagtatttgaaagtaaaaagaatgttactgcacattcagaaatcaggtccacataaaatttaaggtcaggatattaaaggatcacagccagtgctgttaggccttcatttattctatctttttgtctgttcagacatgataacttttctacccatcattttttccattctagtagtggttacatttgttcttgggaattttgctaatggcttcatagtgttggtaaattccattgagtgggtcaagagacaaaagatctcctttgctgaccaaattctcactgctctggcagtctccagagttggtttgctctgggtaatattattacattggtatgcaactgttttgaatccaggttcatatagtttaggagtaagaattactactattaatgcctgggctgtaaccaaccatttcagcatctgggttgctactagcctcagcatattttatttcctcaagattgccaatttctccaactttatttttcttcacttaaaaaggagaattaagagtgtcattccagtgatactattggggtctttgttatttttggtttgtcatcttgttgtggtaaacatggatgagagtatgtggacaaaagaatatgaaggaaacgtgagttgggagatcaaattgagtgatccgacgcacctttcagatatgactgtaaccacgcttgcaaacttaataccctttactctgtccctgttatcttttctgctcttaatctgttctttgtgtaaacatctcaagaagatgcagttccatggcaaaggatctccagattccaacaccaaggtccacataaaagctttgcaaacggtgacctccttcctcttgttatttgctgtttactttctgtccctaatcacatcgatttggaattttaggaggaggctgtagaacgaacctgtcctcatgctcagccaaactactgcaattatatacccttcatttcattcattcatcctaatttggggaagcaagaagctgaaacagacctttcttttgattttgtgtcagattaagtgctgagtaaaagacctgaaactctcaaatttctagattcacaagtgggacatcgtgtgtctccaagagaaaac

SEQ ID NO: 1490 - protein, 256 aa, Homo sapiens [sequence omitted]

SEQ ID NO: 1491 - DNA, 1330 bp, Homo sapiens
  source
  (1)..(1330)
  CDS (201)..(1130)
ggaagctttgtcctttctctcttctcaataaaccttgctgttgctcactctttgggtccacaccatctttaagagcagcaacactcaccgtgaaggtcagtggctcccttttgaagtcagcgagaccacgaacccacctgcaggaaccaattccggacacaacaccagcatttaaaaaaattttttttgtctgttcagacatgataacttttctacccatcattttttccagtctggtagtggttacatttgttattggaaattttgctaatggcttcatagcactggtaaattccattgagtggttcaagagacaaaagatctcctttgctgaccaaattctcactgctctggcggtctccagagttggtttgctctgggtattattattaaactggtattcaactgtgttgaatccagcttttaatagtgtagaagtaagaactactgcttataatatctgggcagtgatcaaccatttcagcaactggcttgctactaccctcagcatattttatttgctcaagattgccaatttctccaactttatttttcttcacttaaagaggagagttaagagtgtcattctggtgatgttgttggggcctttgctatttttggcttgtcatctttttgtgataaacatgaatgagattgtgcggacaaaagaatttgaaggaaacatgacttggaagatcaaattgaagagtgcaatgtacttttcaaatatgactgtaaccatggtagcaaacttagtacccttcactctgaccctactatcttttatgctgttaatctgttctttgtgtaaacatctcaagaagatgcagctccatggtaaaggatctcaagatcccagcaccaaggtccacataaaagctttgcaaactgtgatctccttcctcttgttatgtgccatttactttctgtccataatgatatcagtttggagttttggaagtctggaaaacaaacctgtcttcatgttctgcaaagctattagattcagctatccttcaatccacccattcatcctgatttggggaaacaagaagctaaagcagacttttctttcagttttttggcaaatgaggtactgggtgaaaggagagaagacttcatctccatagattcacgagaggggcattgtgtatcttctagcaggaaacaaactggtggtgtatgaaacattttatatttcttactggtttttctatactgtatgtgtatgaataatttccaaacgtatacctagaaaagtctttgacccaatggcagtctagaaaatatatatatatatatatatatatatatgtgtgtgtgtgtgtgt

SEQ ID NO: 1492 - protein, 309 aa, Homo sapiens
MITFLPIIFSSLVVVTFVIGNFANGFIALVNSIEWFKRQKISFADQILTALAVSRVGLLWVLLLNWYSTVLNPAFNSVEVRTTAYNIWAVINHFSNWLATTLSIFYLLKIANFSNFIFLHLKRRVKSVILVMLLGPLLFLACHLFVINMNEIVRTKEFEGNMTWKIKLKSAMYFSNMTVTMVANLVPFTLTLLSFMLLICSLCKHLKKMQLHGKGSQDPSTKVHIKALQTVISFLLLCAIYFLSIMISVWSFGSLENKPVFMFCKAIRFSYPSIHPFILIWGNKKLKQTFLSVFWQMRYWVKGEKTSSP

SEQ ID NO: 1493 - DNA, 1330 bp, Homo sapiens
  source
  (1)..(1330)
  CDS (201)..(1130)
gaagctttgtcctttctctcttctcaataaaccttgctgttgctcactctttgggtccatgccatctttaagagcagcaacactcaccgtgaaggtcggtggctccatttttgaagtcagggagaccacgaacccacctgcaggaaccaactccggacacaacaccagcattaaaacaatttttttttgtctgttcagacatgacaacttttatacccatcattttttccagtgtggtagtggttctatttgttattggaaattttgctaatggcttcatagcattggtaaattccattgagcgggtcaagagacaaaagatctcttttgctgaccagattctcactgctctggcggtctccagagttggtttgctctgggtattattattaaattggtattcaactgtgtttaatccagctttttatagtgtagaagtaagaactactgcttataatgtctgggcagtaaccggccatttcagcaactggcttgctactagcctcagcatattttatttgctcaagattgccaatttctccaaccttatttttcttcacttaaagaggagagttaagagtgtcattctggtgatgctgttggggcctttactatttttggcttgtcaactttttgtgataaacatgaaagagattgtacggacaaaagaatatgaaggaaacttgacttggaagatcaaattgaggagtgcagtgtacctttcagatgcgactgtaaccacgctaggaaacttagtgcccttcactctgaccctgctatgttttttgctgttaatctgttctctgtgtaaacatctcaagaagatgcagctccatggtaaaggatctcaagatcccagcaccaaggtccacataaaagctttgcaaactgtgatctttttcctcttgttatgtgccgtttactttctgtccataatgatatcagtttggagttttgggagtctggaaaacaaacctgtcttcatgttctgcaaagctattagattcagctatccttcaatccacccattcatcctgatttggggaaacaagaagctaaagcagacttttctttcagttttgcggcaagtgaggtactgggtgaaaggagagaagccttcatctccatagattcatgagaggggcattgtgtgtcttctagcagaaaacaaactggtggtgtatgaaacattttatatttcttactggtttttctatactgtatgtgtatgaataatttcccaacgtatacctagaaaagcctttgacctaatattagtctagaaaaaaaaatatatatatgtgtgtgtttatgtgtgtatgaaaactta

SEQ ID NO: 1494 - protein, 309 aa, Homo sapiens
MTTFIPIIFSSVVVVLFVIGNFANGFIALVNSIERVKRQKISFADQILTALAVSRVGLLWVLLLNWYSTVFNPAFYSVEVRTTAYNVWAVTGHFSNWLATSLSIFYLLKIANFSNLIFLHLKRRVKSVILVMLLGPLLFLACQLFVINMKEIVRTKEYEGNLTWKIKLRSAVYLSDATVTTLGNLVPFTLTLLCFLLLICSLCKHLKKMQLHGKGSQDPSTKVHIKALQTVIFFLLLCAVYFLSIMISVWSFGSLENKPVFMFCKAIRFSYPSIHPFILIWGNKKLKQTFLSVLRQVRYWVKGEKPSSP

SEQ ID NO: 1495 - DNA, 1648 bp, Homo sapiens
  source
  (1)..(1648)
  CDS (201)..(1448)
  modified_base (212)..(311): a, t, c, g, unknown or other
tctgtaacaacaactacggtctttttcagctcacttttgttctacctatgattccttagtatgcttagagtcctaggaactgccattttgtctgattgtatttctacaagtcactagcaatagttctctttcctcctctcctctacactctagttgaatgccttgttgtaagtagataagagaatataattttttataggatggtatttgannnnnnnnnnnnnnnnnnnnnnnnnnnnnnnnnnnnnnnnnnnnnnnnnnnnnnnnnnnnnnnnnnnnnnnnnnnnnnnnnnnnnnnnnnnnnnnnnnnngggggggaagggaaaaggaaaaggggggagggggggaagggaaaaggggaaaaaagagggaaagaagaaaaaaaagggaaaagaaaaagggggggaagggaaaagggaagaaagagggaaaaggggagaaaggaagaagagaagggaaaggagggaggagggggagggaaggagaggggagaagaaaggaggagagggaaaagggagaaaaaaaaaagaaaaagaggagaggagaaaaaagggaaaaaaggggagaaggaagggaaaagggaaaaaaaaaaggggggggaagaaaaaggaaggaaaaaaaaaagaaaaaaaggggaaggagggaggggaaggaaaaagagggggaaaaaaaggaagaggggagggaaagaaaaaaggggagggggggggaaaaggggaagaggggaagaaggaggaaaaggggggagaggggaagggaaggaagggaaaaggggaggaaaaaaaaaaaagagaaaaagaaagggaaagagaaggaaaggagggagggagggggcctcctcccctcccctccccttccctccccacccacctctgctgccctcctctcccctccgctcccctccgctcccctccgctcccctccgctcggctcctctcctctccgctcctctcttctctcctccttctcttctcttttctcttctcttctcttctcttctcttctcttctcttctcttctcttctctcctctcctctcttctcttcctttctttctttctttctttcctttctttctttcttttgtccttccttccttccttccttccttccttcctttctctctctctctccctctctctctttctttctttctttctttctttctttctttctttctttctttctttcatctgtctgtctgtctttctttctttctgtctttttttaatggagtcttgctctgtcacccaggctggagtgcagtcgtgtgatctcggctcactgcaacttctgcctgctgagttcaagcaattctcctgcctcagcctcccaagtagctgggattgcaggtgggtaccaccacgcctggctaatttttgtctttgtagtagagatggggcttcaccatgttggccaggttggtcccaaactcatgacctctggtgatccaccagcctcggcctccgaaagtgctggaattacaggcatgagccactacgcccagccagcaatagttctttttctaatcctttgaatgaatcaatcaaaataaagtcaacaagacacttgaattactaatgttcaaagtataaacatatattatctactttaggcaacctgaatgaataatcattttcagcacccta

SEQ ID NO: 1496 - protein, 415 aa, Homo sapiens
  MOD_RES (4)..(37): Variable amino acid
MVFXXXXXXXXXXXXXXXXXXXXXXXXXXXXXXXXXXGGEGKRKRGEGGKGKGEKRGKEEKKGKRKRGGREKGRKREKGRKEEEKGKEGGGGGKERGEERRRGKREKKKRKRGEEKKGKKGEKEGKREKKKGGEEKGRKKKRKKGEGGRGRKKRGKKRKRGGKEKRGGGGKRGRGEEGGKGGRGEGKEGKRGGKKKKRKRKGKRRKGGREGASSPPLPFPPHPPLLPSSPLRSPPLPSAPLRSAPLLSAPLFSPPSLLFSLLFSSLLFSSLLFSSLLSSLLFLSFFLSFLSFFLLSFLPSFLPSFLSLSLSLSLFLSFFLSFFLSFFLSFICLSVFLSFCLFLMESCSVTQAGVQSCDLGSLQLLPAEFKQFSCLSLPSSWDCRWVPPRLANFCLCSRDGASPCWPGWSQTHDLW

SEQ ID NO: 1497 - DNA, 874 bp, Homo sapiens
  source
  (1)..(874)
  CDS (201)..(674)
gtatagttttaaaactcagaatgctcttttacccctattcaggtttttactaaattctataaaacacaagagagggagccatggaatgacaaataggccctatcatgaggcaccaaactgctgaatcacataggcagtagagagctaattcattatctcagttagcataagggtttttatttttaaccaagggaaaaaaaatgaacaagctcacaaaaaaaccttcagaaaccctgaactactgcgtctcgtataaaaagaacaagtcattttgttttcatgaagcacctggaatatatgctcagagaagatcatggtgccaaagatatagagacaatgttttcaaagggtgggaagggcacgtgagagggaaaaaagagaaaggggaaggaggaaaggagggaaggaaggaaagaaggaaggaaggaaggaaggaaggaaaaggaatggaaggaaggaagggaaagaaggaaagaaaccccgaaagaaagagaaagactattcccttgagaaagaagataaacagaggaataccctggggcggcctcctcctcctagggatcaataggtcttcatctttgtctttcagaagctgctgtagaagagaaaaatatttctttcaaaaaataaatcacaaatactataaacatataaacctacatatgtactcataaaaattaagaataaatataaataaaaaccaaaaattaatacatcttttttattaacaaaaaaatctctagcaattgcttgtgaaatggtatctttaatgagtgaggtaattttgacagatagacatagtattctgcagaaactgaaaatattatatttcatgcaaatcaaaaccacaatgagataccatctcacactactc

SEQ ID NO: 1498 - protein, 157 aa, Homo sapiens [sequence omitted]

SEQ ID NO: 1499 - DNA, 973 bp, Homo sapiens
  source
  (1)..(973)
  CDS (201)..(773)
taatcccagcactatgaggggactgaggcgggcagattacgtgaggtcaggagtttgagaccagcctggccaacatggcgaaacctcatctctactaaaaatacacaaattagctgggcgtggtggcaggtgcctgtaatcctagctattcaggaggctacggcaggagaattgcttgaatctggaaggcagacgttgcaatgagtcgagattgtgctactgcaccaccccagcctgggcaacagagcaagactctgtcaaaaaaaaaaaaaaaaaaaaaaaagaaagaacgacggaaggaaggaaagagagagagaaagaaagacagaaagacagacagacagaaagaaagaaagaaacacagaaacaaagaaagaaacaaagaaagagagaaaaagtgcatgtcccatataatccagcaacttcccttttgggttcctccccagagcagtcattctcaaccagggttgactttgccctccccgcccccaccatggatatatctggagacatttttgatggtcgtgatgtgtgtgcacaggtactcctggctttgggtgggtagaggccagggatgctgctcaacatcctacaatgcacaggacaggcccccaccacaaagaattatctggccccaaatgtcaatagtgttgaggttcaaaaacctctcctacagaaataccagcacagatgcacaggaaagaatgaaaaagatgcccagagagcctttttttttttttttttccaatagcaaagacttggaaacagtttgaatatgcattaacaggggactggtaggggactggctaaatgaataagcattgaccctggctgcacattaaaatcactaggggattgtagcacactgatgcccaggccggagcctcggagttctgattcaactctgctagggacaggccttggcatccatattttataaaggactcctccctcccccacataaacacacacc

SEQ ID NO: 1500 - protein, 190 aa, Homo sapiens [sequence omitted]

SEQ ID NO: 1501 - DNA, 1132 bp, Homo sapiens
  source
  (1)..(1132)
  CDS (201)..(320)
  CDS (597)..(932)
atcagacccagagagtcctttaaaaaaataaaaagattctatcgcagtggaaactgaacaactttttttctaagacgaccacccctcgggaacaaaagttatatttcagtcacatgttgggtgtaggaatagggagcaggttttttttttttgttttttgttttttttttttttaagcgcactaattacgggggtgttttacggttctggagacaatccgggttgctctgaccaattgtgaccggcatttcattgtcaaaaagcaagggggtgggggccgaggagccggcaggggctcggcggtgggggggagtagcaaggttacgctaaagggtacagcagccaccgcgagctgcatctctttccctctcgccccaaataatttcctgcgaacagagcaactgcaacagcctgctctgaggagcccagcacgactgccctggccggtgcagctcagggtttccaccacgtagaaggaggggagaagatttttaccttaatgctacactgagcaggagtctcagacatgtctcacagcgagagagatcaggaagttctcaggttttttccactttcctttcctctccccaacccagaaaggctccacggccagccagacgcggtcatttaagaagtttcttccagcatctctcccggcagccgccccgggggtctggagcgcgcggggcggggcggggcggccggcggagttgggcgcgcggggcggcgggggcgtgggagacgggcccgagcgcggcggcggggtctgcaggtcgcggcgcggcgcggggacccgggacgcagcccggccggcctcccggtctctcctcccacccgcagccggcgcccccgccccccgccctcccgcggctctccctcgctctctcgaatgttttccttcctggaagagagaaactgaaaggcagaactgagaaagctctttgctcattgatcttgagagtttcagtgcagaaactgacgtgaattcccagcactgagctctgcctcttaaaggagccaccaggaaataaaagctcgggttacagcccggcatcggggaaataaaagctgcgcgggggaggggcggccgcgggggcgcgggcggaggaaacccgggtagcggggccgcgtg

SEQ ID NO: 1502 - protein, 151 aa, Homo sapiens
TVLETIRVALTNCDRHFIVKKQGGGGRGAGRGSAVGGSSKKGSTASQTRSFKKFLPASLPAAAPGVWSARGGAGRPAELGARGGGGVGDGPERGGGVCRSRRGAGTRDAARPASRSLLPPAAGAPAPRPPAALPRSLECFPSWKRETERQN

SEQ ID NO: 1503 - DNA, 862 bp, Homo sapiens
  source
  (1)..(862)
  CDS (201)..(662)
gttaccaatttacaggctctttaacttccaggtctaataatttgtttgattttagacatgattcatactacctacaaatattctctttatatagtacacttgtattaaaatgatttgacaacttctagaatttttcttaagggtgagatacaaaacattgaggtcagatttgattggctggcaacaataagaacattgtaatggtgtcatttgggataaacaacaaaaaacagtaccaacaaactttcgacaaagaagaaggagactttagaggacaaaatacatatttgttagtcactttccatgtgttatttaacttattcctcagaaaacccctacaaattaggtattcccattttacagatgaggaaagattaatcagtcagaccctgcaggaatggagcctcagtggcttttattattattgtatttatttatttatttatttatttattatttatttatttatttatttatttatttatttatttattttgagatggagtctcgctctgtctcccaggctagagtgcagtggcgcgatctcggctcactgcaacctccgcctcccggattcaagcgattctcctgcctcagactcccgcgtagctgggactacaggcgcccaccgccatgcccgactaatttttttgtgtttttagtagagacggggtttcgccacgttggccaaattggtctcgaactcctgacctgaggtgatccacctgtctcggcctcccaaagcgctgggattacagacgtgagtcaccacgcccggccggtttttctttctttccttcttttttgagacggagctcactccgtcgcccaagctggagtgaagtgttgcaatctcggctca

SEQ ID NO: 1504 - protein, 153 aa, Homo sapiens
MVSFGINNKKQYQQTFDKEEGDFRGQNTYLLVTFHVLFNLFLRKPLQIRYSHFTDEERLISQTLQEWSLSGFYYYCIYLFIYLFIIYLFIYLFIYLFILRWSLALSPRLECSGAISAHCNLRLPDSSDSPASDSRVAGTTGAHRHARLIFLCF

SEQ ID NO: 1505 - DNA, 871 bp, Homo sapiens
  source
  (1)..(871)
  CDS (201)..(671)
tttcatgtgccatgttccgcttggggtggttacgacagacaatattcagaaaatggaagaatcagaaagagaagaaagtggaacacacaagagaaagaaaaccaaggccctcctccctcctgccatggccctctctgtcttcagccctagttctggaaaagaaaagggtgtgttgtcactagaggcctccaggcaggtccatgccactgagtcacatttcaagctgtgtttgcttcctacaccaacaaggcatatcttttctgaattgtgcaatattctggccacctgggtttttctacttggtataccaactcctagtactcaacaaccattccctttactcttttttttttttttttttttttttttttgagacagagtctcactctgcacaatctcggctcactgcaacctccgcctcccaagttcaagcgattctccctgtctcagcctcccaagtagctgggactacaggtgcccaccgccatgcccagctaatttcttttttacttttagtagagacagggcttctccatgttggccaggctggtctcaaactcctgacctcaggtgatctgcctgcctcagcctcccaaagtgctgggattacaggtgtgagccactgcgcctggcccccctttactcttaaatacagtgtgtgccagctgtagtagtttatgcctgtactccgagcatctcaggaggctgaggcaggaggatcacttgagcccaagagctttaggctgtagtaagccaaggtcacaccactgcattctagcctgggcaacagagcaagaccctgactcttaaaaaaaaatacaatgtgtaatggtgatataataattcaaaggttaatcatctctacttttga

SEQ ID NO: 1506 - protein, 156 aa, Homo sapiens
MPLSHISSCVCFLHQQGISFLNCAIFWPPGFFYLVYQLLVLNNHSLYSFFFFFFFFFETESHSAQSRLTATSASQVQAILPVSASQVAGTTGAHRHAQLISFLLLVETGLLHVGQAGLKLLTSGDLPASASQSAGITGVSHCAWPPFTLKYSVCQL

SEQ ID NO: 1507 - DNA, 943 bp, Homo sapiens
  source
  (1)..(943)
  CDS (201)..(743)
tgatttagggtatctggaggaagaaatttctaagcagcaaagcattcaagaggtgacttgggtgctgtaaaaggcattcagttttataagagaagcagagcataaaagttcagaaaatttgtagcctgacaatgtgatagaaaagaaaatcccattttctgagaagaaattcaagccagctgcagagatttgcataagtaatgagaagccgaatgttaatccccaagacaatggggaaaatgtctccagggcatgtcagagatcttcacagcagctgttcccatcacagacccagaggcctaggaggaaaaactggtcttgtgggctgggcccagggtccacaggttgtatgcagcctagggacttggtgccctgcatcccggccactccagtcgtggctgaaagggcccaatgcagagctcaggttgcggcttcagagggtgccagccccaagccttggcagcttcctcatggtattgagcctgggagtgaacagaagtcaagaattggggtttgggaacctctgcctagatttcagaggatggagtatggaaacacctgtatgtccagggagaagtttgctgaagggacagggccctcatggaggacctctgctacggcagtgcagacaggaaatgtggggtcagagcccccacacagtctctactggggccctctctagtggagctgtgagaagagtgccaccatcctgcagaccccagaatggtagatccactgactgacatcttgcactgtgcacctggaaaagctgcagacactcaatgccagcctgtgaaagcagccaggaaggaggctgtaccttgcaaagccacaagggtagagctatgcaagaccaaaggaacccaccttttgtatcagcatgacctctatgtgagacatggagtcaaaggagatcattacagggcttttagatttgactgcc

SEQ ID NO: 1508 - protein, 180 aa, Homo sapiens
MRSRMLIPKTMGKMSPGHVRDLHSSCSHHRPRGLGGKTGLVGWAQGPQVVCSLGTWCPASRPLQSWLKGPNAELRLRLQRVPAPSLGSFLMVLSLGVNRSQELGFGNLCLDFRGWSMETPVCPGRSLLKGQGPHGGPLLRQCRQEMWGQSPHTVSTGALSSGAVRRVPPSCRPQNGRSTD

SEQ ID NO: 1509 - DNA, 862 bp, Homo sapiens
  source
  (1)..(862)
  CDS (201)..(662)
ccgcctcccaggttcacgccattctcctgcctcagcctcccgagtagctgggactacaggtgcccgccaccatgcccggctaattttttttttgtatttttagtagagacggggtttcaccttgttagccaggatggtctcgatctcctgacctcgtgatccgcccgcgtcggcctcccaaagtgcttgggattacaggcatgagccaccatgcccggcctttttttactatctctatagctttgtcttttacacaatgtcatataattggaattatacagtatgttgccttttccggctgccttctttcacctagcaatacatatctttttttttctttgagacacagtctcactttgttgcccaggttgaagtgcagtggcaccatctcacctcactgcaatatctcactcccgggttcaagtgattctcgtgcctcagcctcccaagtagctgggattacaggcgtgcaccgccaccccccgctaatttttgtatttttagtaaagatggggtttcaccatgttggccaagctggtctcaaactcctgacctcaagtgatctgcctgcctcggcctcccaaattgctgggattacaggcgtcagccaacctcctggcagcaatacacatttgaagaggttcatgtctctactaaaataattaactctactagttctgtctctactaaaataattaaaataatgcatgtctttttctggcttcacagctcatttctttctttctttctttcttttttttttgagatggagtcttgctctgctgcccaggctggagtgcagtggtgtgttctcggctcactgcaacctctgacccccgggttcaatcgattcttctgcctc

SEQ ID NO: 1510 - protein, 153 aa, Homo sapiens [sequence omitted]

SEQ ID NO: 1511 - DNA, 943 bp, Homo sapiens
  source
  (1)..(943)
  CDS (201)..(743)
ccctcccctcacttcccagcgcctcgggccatcctgcttctccaggcctgagaggaactttctggaagtgctgcgtatcttcaagaggccggccagaagtgaaagccgcggcaggcctgagcgccggccccaggggaggggtccctcgggccctcgtcgtcccggggccgcttccccgactgtaaataagtgtctttaggatgaaacgccacgcgatagtgtcctcggaaccttcgcacgagatccagcacacaacatccgaccacacactggggcggccagcctcccgcgttcgcccgcctctgctcttggttgcttcgggcgcgcatttcggtccacggatgacctttaacaggtctcctgcagtggaaccaggggtgagggcctcgtccaagggcgtgaggggcgcgtggaaatggaacaacctcccaggctcgcatcctcctcggggacctcccagaaggctcaaccggaagaaaacccgcgacccgcgcgaggacagcgaaagcgcaaacgccggccgccaggagtcgcagcgcgcctgcgtccagttcacgctccggctcccaggcgcgccccgccccccggcccggaagtgcgcaggcgctggcaagatggcgggaggggtgcgcccgctgcggggcctccgcgccttgtgtcgcgtgctgctcttcctctcgcagttctgcattctgtcgggcggtggtgagtcaaaggctgggttcagcgccgggtggggctgagtggcagcagggccccgggagctgcgaggaggccgggcccacgggcggacgctgacgcggggaggaggccgagtgccgggctccgggccgcttgtcgctgcatctggagtctggcgccctggccgcccggcccgaggccgcccctccgctccggcgacaccgagcccgccatcgcggctgcggagccctggcacggagat

SEQ ID NO: 1512 - protein, 180 aa, Homo sapiens
MKRHAIVSSEPSHEIQHTTSDHTLGRPASRVRPPLLLVASGAHFGPRMTFNRSPAVEPGVRASSKGVRGAWKWNNLPGSHPPRGPPRRLNRKKTRDPREDSESANAGRQESQRACVQFTLRLPGAPRPPARKCAGAGKMAGGVRPLRGLRALCRVLLFLSQFCILSGGGESKAGFSAGWG

SEQ ID NO: 1513 - DNA, 3163 bp, Homo sapiens
  source
  (1)..(3163)
  CDS (201)..(2963)
  modified_base (556)..(655): a, t, c, g, unknown or other
  modified_base (658)..(669): a, t, c, g, unknown or other
  modified_base (671)..(697): a, t, c, g, unknown or other
  modified_base (704)..(707): a, t, c, g, unknown or other
  modified_base (709)..(736): a, t, c, g, unknown or other
  modified_base (739)..(743): a, t, c, g, unknown or other
  modified_base (745)..(747): a, t, c, g, unknown or other
  modified_base (750)..(750): a, t, c, g, unknown or other
  modified_base (752)..(752): a, t, c, g, unknown or other
  modified_base (754)..(756): a, t, c, g, unknown or other
  modified_base (761)..(761): a, t, c, g, unknown or other
  modified_base (763)..(763): a, t, c, g, unknown or other
  modified_base (818)..(818): a, t, c, g, unknown or other
  modified_base (843)..(843): a, t, c, g, unknown or other
  modified_base (892)..(892): a, t, c, g, unknown or other
  modified_base (897)..(897): a, t, c, g, unknown or other
  modified_base (920)..(920): a, t, c, g, unknown or other
  modified_base (941)..(941): a, t, c, g, unknown or other
  modified_base (993)..(993): a, t, c, g, unknown or other
  modified_base (995)..(995): a, t, c, g, unknown or other
  modified_base (1066)..(1067): a, t, c, g, unknown or other
  modified_base (1082)..(1084): a, t, c, g, unknown or other
  modified_base (1105)..(1107): a, t, c, g, unknown or other
  modified_base (1130)..(1130): a, t, c, g, unknown or other
  modified_base (1147)..(1147): a, t, c, g, unknown or other
  modified_base (1162)..(1162): a, t, c, g, unknown or other
  modified_base (1202)..(1202): a, t, c, g, unknown or other
  modified_base (1233)..(1233): a, t, c, g, unknown or other
  modified_base (1247)..(1248): a, t, c, g, unknown or other
  modified_base (1261)..(1261): a, t, c, g, unknown or other
  modified_base (1485)..(1485): a, t, c, g, unknown or other
  modified_base (1500)..(1500): a, t, c, g, unknown or other
  modified_base (1544)..(1544): a, t, c, g, unknown or other
  modified_base (1601)..(1601): a, t, c, g, unknown or other
  modified_base (1605)..(1605): a, t, c, g, unknown or other
  modified_base (1635)..(1635): a, t, c, g, unknown or other
  modified_base (1637)..(1637): a, t, c, g, unknown or other
  modified_base (1654)..(1654): a, t, c, g, unknown or other
  modified_base (1674)..(1674): a, t, c, g, unknown or other
  modified_base (1695)..(1695): a, t, c, g, unknown or other
  modified_base (1852)..(1852): a, t, c, g, unknown or other
  modified_base (1866)..(1965): a, t, c, g, unknown or other
  modified_base (1968)..(1980): a, t, c, g, unknown or other
  modified_base (1982)..(2009): a, t, c, g, unknown or other
  modified_base (2020)..(2020): a, t, c, g, unknown or other
  modified_base (2022)..(2023): a, t, c, g, unknown or other
  modified_base (2025)..(2042): a, t, c, g, unknown or other
  modified_base (2044)..(2049): a, t, c, g, unknown or other
  modified_base (2051)..(2062): a, t, c, g, unknown or other
  modified_base (2065)..(2066): a, t, c, g, unknown or other
  modified_base (2069)..(2072): a, t, c, g, unknown or other
  modified_base (2074)..(2074): a, t, c, g, unknown or other
  modified_base (2078)..(2078): a, t, c, g, unknown or other
  modified_base (2081)..(2081): a, t, c, g, unknown or other
  modified_base (2087)..(2087): a, t, c, g, unknown or other
  modified_base (2091)..(2091): a, t, c, g, unknown or other
  modified_base (2097)..(2097): a, t, c, g, unknown or other
  modified_base (2105)..(2106): a, t, c, g, unknown or other
  modified_base (2124)..(2125): a, t, c, g, unknown or other
  modified_base (2129)..(2129): a, t, c, g, unknown or other
  modified_base (2133)..(2133): a, t, c, g, unknown or other
  modified_base (2151)..(2151): a, t, c, g, unknown or other
  modified_base (2153)..(2153): a, t, c, g, unknown or other
  modified_base (2159)..(2159): a, t, c, g, unknown or other
  modified_base (2164)..(2164): a, t, c, g, unknown or other
  modified_base (2166)..(2166): a, t, c, g, unknown or other
  modified_base (2190)..(2190): a, t, c, g, unknown or other
  modified_base (2210)..(2212): a, t, c, g, unknown or other
  modified_base (2227)..(2227): a, t, c, g, unknown or other
  modified_base (2233)..(2233): a, t, c, g, unknown or other
  modified_base (2247)..(2248): a, t, c, g, unknown or other
  modified_base (2251)..(2251): a, t, c, g, unknown or other
  modified_base (2292)..(2292): a, t, c, g, unknown or other
  modified_base (2294)..(2294): a, t, c, g, unknown or other
  modified_base (2296)..(2296): a, t, c, g, unknown or other
  modified_base (2318)..(2318): a, t, c, g, unknown or other
  modified_base (2327)..(2327): a, t, c, g, unknown or other
  modified_base (2344)..(2344): a, t, c, g, unknown or other
  modified_base (2357)..(2357): a, t, c, g, unknown or other
  modified_base (2366)..(2366): a, t, c, g, unknown or other
  modified_base (2368)..(2369): a, t, c, g, unknown or other
  modified_base (2374)..(2374): a, t, c, g, unknown or other
  modified_base (2377)..(2377): a, t, c, g, unknown or other
  modified_base (2387)..(2387): a, t, c, g, unknown or other
  modified_base (2391)..(2391): a, t, c, g, unknown or other
  modified_base (2406)..(2406): a, t, c, g, unknown or other
  modified_base (2432)..(2433): a, t, c, g, unknown or other
  modified_base (2437)..(2437): a, t, c, g, unknown or other
  modified_base (2454)..(2454): a, t, c, g, unknown or other
  modified_base (2470)..(2470): a, t, c, g, unknown or other
  modified_base (2477)..(2477): a, t, c, g, unknown or other
  modified_base (2480)..(2480): a, t, c, g, unknown or other
  modified_base (2499)..(2499): a, t, c, g, unknown or other
  modified_base (2536)..(2536): a, t, c, g, unknown or other
  modified_base (2725)..(2725): a, t, c, g, unknown or other
  modified_base (2814)..(2814): a, t, c, g, unknown or other
  modified_base (2840)..(2840): a, t, c, g, unknown or other
  modified_base (2867)..(2867): a, t, c, g, unknown or other
  modified_base (2890)..(2890): a, t, c, g, unknown or other
  modified_base (3118)..(3163): a, t, c, g, unknown or other
gggggaacgacgaaagaagcgggaaaagggggggagacaggcgggggggacaggcacaggaaaacaagagaaaaaaaaaagcaggggggaggggaaaagaagggggagagggggaaaagggagggaaatagccgcaaagagagaggagaaggaagagcggggacgggaggagaagaaggcagaagaaaagacgggcgaaaatgacgggggaaggagagagagggcaacaacggggcagaaaagaaggggcaaaaagggggagaaaaagaggacagaggagaaggggaggagaaacggagggagacagaaggaggagaaagaagaggggagaaagaggagcgaaaagccagctgagagggcagaagggacacaacgaaggggacgacgagaaagcgcagaggaagcgggggagaagaaaaggagaggaaagaacaccggagaggaaagagaacaggagggaacgaaggcaagagagaagggggaggaaagaggagaaacgcggaaagagtgacgagcagagaagaccggagacaggagaaggagggggtgcagggannnnnnnnnnnnnnnnnnnnnnnnnnnnnnnnnnnnnnnnnnnnnnnnnnnnnnnnnnnnnnnnnnnnnnnnnnnnnnnnnnnnnnnnnnnnnnnnnnnnaannnnnnnnnnnntnnnnnnnnnnnnnnnnnnnnnnnnnnnggggggnnnntnnnnnnnnnnnnnnnnnnnnnnnnnnnnggnnnnngnnnggngngnnnggggngnggggggggggggggggggggggggggggggggggggggggggggggggggggggnggggggggggggggggggggggggnggggggggggggggggggggggggggggggggggggggggggggggggnggggnggggggggggggggggggggggnggggtgggggggggggggggngggggggggggggggggggggggggggggggggggggggggggggggggggngnggggggggggggggggggggggggggggggggggggggggggggggggggggggggggggggggggggggnnggggggggggggggnnngggggggggggggggtggggnnngggggggggggggggggttgggnggggggcgggggggggnggggggggggggggnggggggggggggggggggggggggggggggggggggcggngggggggggggggggggccgcgggggcccgngggggggggggggnnggggggttcgggngggggtgtttgtgtggtttgtttgttttttttttttgttttgttttgtttctttttgttttttctcctcttctttcttcctcttttctcctcctctttctccttctctctttctcttcctctccccgcctccttcgtcgctcctctcttctcctttctctctctttcctctttctcccctctttgctcctctccttctctcttttcctctctctttctctctcnctctgcctctctgcngtctgctgctcctctccgcctcctcttcttctcccctccttctncctctctcgcattctgtcgtctcttctcttcttctctcctgtcctctcttcctcttnctcntcctcgcgtctctcctctgtctctctgatncnccgtttcttcttctttncttccttcctctccgtctcnctcatgtcatcgcgcgctttntactttctctccgtctcttgtgcgctgtgtccactcttcttcaagcactcactgtcatatatcttctagtacggttctatactcatacaacacttcataacatcttcacatataacacacactatctacaatataacactgcactcctatatactcnacatctactccaannnnnnnnnnnnnnnnnnnnnnnnnnnnnnnnnnnnnnnnnnnnnnnnnnnnnnnnnnnnnnnnnnnnnnnnnnnnnnnnnnnnnnnnnnnnnnnnnnnnaannnnnnnnnnnnntnnnnnnnnnnnnnnnnnnnnnnnnnnnngggggggggtntnntnnnnnnnnnnnnnnnnnngnnnnnngnnnnnnnnnnnnggnnggnnnngngggnggngggggngggngggggngggggggnngggggggggggggggggnngggngggngggggggggggggggggngngggggnggggngngggggggggggggggggggggggngggggggggggggggggggnnnggggggggggggggngggggngggggggggggggnnggnggggggggggggggggggggggggggggggggggggggggngngngggggggggggggggggggggnggggggggnggggggggggggggggnggggggggggggngtttggggngnnggggnggngggggggggngggnggggggggggggtgngggggggggggggggggggggggggnngggnggggggggggggggggngggggggggggggggnggggggnggngggttttgggggggggggnggggggggggggggggggggggggggggggggggggngggggggggggggggttgggtggtgttttttttgttgtgttttgtttgttttgtggtgttggtttgtttgtttgttggtttttgtgtgtgggtttttgatgttttgtgtgggtttttttgtttgtgttttgttgtgttcgttttttttgttgtttgttgtgttgtttgtgtgttttgttgtttgttttngttgtgtttttttggttgtgtgttttggtgttgtttgttgttgtgtttgtttgttgttttgttttttttgtttttgttttgttggtttngttttggtggttgtgtgttgtttgtngtttgttttgttgtttgtgttgtgttnggttgttgtttgttttgtactgntttgtgttatttgttgtgttctgttgtcttgttgtttgtctggccgtgtggtctttcccctttcttgccctagtctgttccttcaccttttaccgtgtgcgtcttcgacgaagtatctaatcttactcagcaacaacactttcacactatcatcattatcattacataccgttaagcaagaagatcctcttatctactcgacacaatactactcctctacctaacacnnnnnnnnnnnnnnnnnnnnnnnnnnnnnnnnnnnnnnnnnnnnnn

SEQ ID NO: 1514 - protein, 920 aa, Homo sapiens
  MOD_RES (119)..(166): Variable amino acid
  MOD_RES (169)..(186): Variable amino acid
  MOD_RES (188)..(188): Variable amino acid
  MOD_RES (215)..(215): Variable amino acid
  MOD_RES (231)..(231): Variable amino acid
  MOD_RES (233)..(233): Variable amino acid
  MOD_RES (265)..(265): Variable amino acid
  MOD_RES (289)..(289): Variable amino acid
  MOD_RES (295)..(295): Variable amino acid
  MOD_RES (302)..(303): Variable amino acid
  MOD_RES (316)..(316): Variable amino acid
  MOD_RES (321)..(321): Variable amino acid
  MOD_RES (345)..(345): Variable amino acid
  MOD_RES (350)..(350): Variable amino acid
  MOD_RES (354)..(354): Variable amino acid
  MOD_RES (429)..(429): Variable amino acid
  MOD_RES (434)..(434): Variable amino acid
  MOD_RES (467)..(467): Variable amino acid
  MOD_RES (469)..(469): Variable amino acid
  MOD_RES (479)..(479): Variable amino acid
  MOD_RES (485)..(485): Variable amino acid
  MOD_RES (492)..(492): Variable amino acid
  MOD_RES (499)..(499): Variable amino acid
  MOD_RES (551)..(551): Variable amino acid
  MOD_RES (556)..(603): Variable amino acid
  MOD_RES (607)..(622): Variable amino acid
  MOD_RES (624)..(625): Variable amino acid
  MOD_RES (631)..(631): Variable amino acid
  MOD_RES (633)..(633): Variable amino acid
  MOD_RES (636)..(636): Variable amino acid
  MOD_RES (642)..(642): Variable amino acid
  MOD_RES (645)..(645): Variable amino acid
  MOD_RES (651)..(651): Variable amino acid
  MOD_RES (655)..(656): Variable amino acid
  MOD_RES (664)..(664): Variable amino acid
  MOD_RES (671)..(671): Variable amino acid
  MOD_RES (676)..(676): Variable amino acid
  MOD_RES (678)..(678): Variable amino acid
  MOD_RES (683)..(684): Variable amino acid
  MOD_RES (698)..(699): Variable amino acid
  MOD_RES (715)..(715): Variable amino acid
  MOD_RES (723)..(723): Variable amino acid
  MOD_RES (725)..(726): Variable amino acid
  MOD_RES (731)..(731): Variable amino acid
  MOD_RES (736)..(736): Variable amino acid
  MOD_RES (745)..(746): Variable amino acid
  MOD_RES (752)..(752): Variable amino acid
  MOD_RES (757)..(757): Variable amino acid
  MOD_RES (767)..(767): Variable amino acid
  MOD_RES (779)..(779): Variable amino acid
  MOD_RES (842)..(842): Variable amino acid
  MOD_RES (872)..(872): Variable amino acid
  MOD_RES (889)..(889): Variable amino acid
  MOD_RES (897)..(897): Variable amino acid
MTGEGERGQQRGRKEGAKRGRKRGQRRRGGETEGDRRRRKKRGERGAKSQLRGQKGHNEGDDEKAQRKRGRRKGEERTPERKENRRERRQERRGRKEEKRGKSDEQRRPETGEGGGAGXXXXXXXXXXXXXXXXXXXXXXXXXXXXXXXXXXXXXXXXXXXXXXXXGGXXXXXXXXXXXXXXXXXXGXGGGGGGGGGGGGGGGGGGGGGGGGGGXGGGGGGGGGGGGGGGXGXGGGGGGGGVGGGGGGGGGGGGGGGGGGGGGGXGGGGGGGGGGGGGGGGGGGGGGGXGGGGGXGGGGGGXXGGGGGLGGGRGGXGGGGXGGGGGGGGGGGGGGGGGGGRGGPXGGGGXGVRXGVFVWFVCFFFLFCFVSFCFFSSSFFLFSPPLSPSLFLFLSPPPSSLLSSPFSLFPLSPLFAPLLLSFPLSFSLXLPLCXLLLLSASSSSPLLLPLSHSVVSSLLLSCPLFLXLXLASLLCLSDXPFLLLXFLPLRLXHVIARFXLSLRLLCAVSTLLQALTVIYLLVRFYTHTTLHNIFTYNTHYLQYNTALLYTXHLLQXXXXXXXXXXXXXXXXXXXXXXXXXXXXXXXXXXXXXXXXXXXXXXXXGGGXXXXXXXXXXXXXXXXGXXGGGGGXGXGGXGGGGGXGGXGGGGGXGGGXXGGGGGGGXGGGGGGXGGGGXGXGGGGXXGGGGGGGGGGGGGXXGGGGGGGGGGGGGGGXGGGGVWGXGXXGGGGXGGGVXGGGGGGGGXXGGGGGXGGGGXGGGGFWGGGXGGGGGGGGGGGXGGGGGWVVFFLLCFVCFVVLVCLFVGFCVWVFDVLCGFFCLCFVVFVFFVVCCVVCVFCCLFXLCFFGCVFWCCLLLCLFVVLFFLFLFCWFXFGGCVLFVVCFVVCVVXGCCLFCTXLCYLLCSVVLLFVWPCGLSPFLP

SEQ ID NO: 1515 - DNA, 982 bp, Homo sapiens
  source
  (1)..(982)
  CDS (201)..(782)
tatgaaaatgaaaaggcaaaggagaaattggaaaacaatctgcaaaacgtatctgacaaaggaattatgtctagaatatatgttttaaaaactcttacaactaagtaatataaaaagaaaaaagtccattcaaaaaaatgggcaaaaaattgaacagacacttgaccaaaaaaaatatatagcaatggcaaaaaaagtacatggaaagatacttaccacacatcatcagtgacatgcaaatcaaaccagtgagatactactatacacccactagaatggccaacattagaacaaatgataaatacaaaaggttgggaaagacatggagcaactggaactccttagtaactgctgctgggaaggtcaaatggtacagtttggtagtttctgaaaatattaaacatagatcttccttcaaccctgccatgctaggtattcatccaagagaaataagaacatgtccacacaaagatttgtccacaaatgttcatagaagttttaattgccccaaactggaaacaatccaaatgtccaagatgggaatggatagacacattgtgatatataaaaacaatggaatactactgagcaataaagaggagggaattactgatacatgcaacagcatagataaatctcagaaacattattcttcccaaaaggaaccagacacaaaagaatacatactatgtgattccattttatctgtactgacagaaagcaaatcaattattgcttggggcatgagaaatttttttgtgagtaatggaaacatcctctaacatgattgtagtgatgtttacctgactgcatacatttgctaaaactcatcaagttgtactcttaaaattggtgaaatttattgtcttaattctgtctcaatttttaaaaatgaggcagctctacaaggtacatatggaatagactccaaagttcatagttaagtggaaaaaactaggtgcagaaatatgtatacagtata

SEQ ID NO: 1516 - protein, 193 aa, Homo sapiens
MERYLPHIISDMQIKPVRYYYTPTRMANIRTNDKYKRLGKTWSNWNSLVTAAGKVKWYSLVVSENIKHRSSFNPAMLGIHPREIRTCPHKDLSTNVHRSFNCPKLETIQMSKMGMDRHIVIYKNNGILLSNKEEGITDTCNSIDKSQKHYSSQKEPDTKEYILCDSILSVLTESKSIIAWGMRNFFVSNGNIL

SEQ ID NO: 1517 - DNA, 856 bp, Homo sapiens
  source
  (1)..(856)
  CDS (201)..(656)
gagccacctagggcgtaaacccacgccaccccctgcccgcgcctcctctgtcctgcgaatgacactctggggcgccgtccagcaggtggctgcctctcaaccacctgtgcagtgagcacgagtgtgtgtggcggaagcggcccaggccccacgctccgcctacagcccatccggcacccacctcacagacgtgctctcatatgggacaggcaccagagtggcagtatgtccccagccggctcccggctgcctcacccatggcagcagcccacgcaagagccacctccattcaccgcttttcctcactggtcacaatcgcctgtcccaagttctggggctgcagccttcaacgttcgtcatcgctctccctgcacctacagctacagcccacacccacgccaccatcatctcttccccagacagccgcacaaacccgcacacagcgcgcctcctcccaccgcctggcgggtcctcttccagcaccttcctgtggtgggcgggtctggcccacacgccacctccccaaggctccttccccttcagagctctgccacgctcagagcacaccatgcttgggtctgggttctttttgtttcacatcctaccaggacacagccactcccttgggggcggagatggggttttgtttgttctgaaacggagtctcgcactgtctcctgggctggagtgcaacggcgcaatctaggctcactgcaacctccgcctcccgggttcaagcgattctcctgcctcaacctccctcgtagctgggattacaggtgccccctcccacaaccggctaaatttttgtatttttagtagagatggggtttcactgtgttagccaggctggtct

SEQ ID NO: 1518 - protein, 151 aa, Homo sapiens
MGQAPEWQYVPSRLPAASPMAAAHARATSIHRFSSLVTIACPKFWGCSLQRSSSLSLHLQLQPTPTPPSSLPQTAAQTRTQRASSHRLAGPLPAPSCGGRVWPTRHLPKAPSPSELCHAQSTPCLGLGSFCFTSYQDTATPLGAEMGFCLF

SEQ ID NO: 1519 - DNA, 931 bp, Homo sapiens
  source
  (1)..(931)
  CDS (201)..(731)
aacctcttgtctcctgggttcaagcagttcttctgcctcagcctcccgagtagctagaactacaggcttgtgccaccacacccggataatttttaaattttcagtagagacgggcttttggcatgttggccaggctggtctcaaactcctgacttcaagtgatctctcctcctcggcctctcacagtgctgggattacagatgggagacaccgcgcccggccccagattgttttctcttttttttttgagattgagtcttgctctgtcacctaggctagagtacagtggctccatcttggctcactgcaacctccacctcctgggttcaagcgactctcctgcctcagcctccagggtagctgggattacaggcacgcaccgccacacccgtctaatttttgtatttttagtagagacggggtttcgccatgttggccaggctggtctcagattcctgacctcaagtgatctgcccgccttggcctcccaaagttctgggattataggcatgagccactgcgcgccggcaattgttttcatacatatatacctatacatgtttcagagacatgcagcagatcccaagtgcctccagggcagcgatctgggagggcttttccagttgctgacctcacacctgtgccgtagacagacccaaggccagctggggatggtgggcggatcttccctactcctggagttttcaaaggatggcaacagagcaggttgataggtgaacagttaattcagtacagttagtatttattattattttttgagatggagtcttgctctgttgcccaggctggagtgcaatggtacagtcttggctcactgcaacctccgcctccggggttcaagcaattctcccgccccagcctcctgagtagctgggattacaggcgtgcaccaccatgcccggctaatttt

SEQ ID NO: 1520 - protein, 176 aa, Homo sapiens [sequence omitted]

SEQ ID NO: 1521 - DNA, 11995 bp, Homo sapiens
  source
  (1)..(11995)
  CDS (201)..(311)
  CDS (6139)..(6336)
  CDS (7558)..(7768)
  CDS (11216)..(11426)
  CDS (11645)..(11795)
  modified_base (86)..(185): a, t, c, g, unknown or other
ccccatgggcacagcccgacaacacgcagaaacccagctaacccaaggggagaggggagcgcacacagaaggaaaaacagactgannnnnnnnnnnnnnnnnnnnnnnnnnnnnnnnnnnnnnnnnnnnnnnnnnnnnnnnnnnnnnnnnnnnnnnnnnnnnnnnnnnnnnnnnnnnnnnnnnnnctaaatgaaacataaatgaagataaatgggccagtcgcggtggctcacgcctgtaatcccagcactttgggaggcttaggcgggcagatcacgggtcaggagttcgagtacagcctggccaacatagtgaaaccccgtctctactaaaaatacaaaaaattagccggacgtggtggtgggcacctgtaatcccagctactcaggaggctgaggcaggagaatggcttgaatccgggaggcggaggttgcagtgagctgagatcgcaccattgcactccagcctgggcaacagagcaagactctgtctcaaaaaaaaaaaaaaaaaaaaaaagagagttcaagaccagcctggccaacatggtgaaacctcgtctctactaaaatacaaaaaaaaattagccaggcgtggtggcgggcacctgtagtcccagctcctcgtggaggctgaggcaggagaattgtttgaacccaagaggtggaggttgcagtgagccaaggcagcctggatgacgagggagactccatctcaaaaaaaaaaaaaaaaagataaatggatttaggttttaatgtttttaaaaaataaataaaatttccacatgaaatttgtaattttaaaaacgttacatagctgggcacagcagcagtgaactcctgtggtcccagctccttgggaggctgaggtgggagtatcagttgagcccaggaattggagtctgcagtgagctatgtgatcacaccactgcactccagcttgggcgacagagcaagactttgtctttaaaaaaggttaccgagacatgtagacacagaaaagcatgggctgaagactactgggagtagcaaagtcagcaggataggatatggaaatttgttacctgcttgagtgccctgtaaatgggtggccagacagaactgctcctggtgtcatgcgtggtttcagcaacttccacaagggggtggggttagaaggttctctcccatccttgtcaaagttgctaaaaccacgcacgacgccatgtgcagttccgtctggcagcccatttacagggctctcgtggtgggtgctgtctgcccaagctttcttgaccaggcttctctgaaggaagtttctctttgaaagaaaggaaacttgtggttgtcacaaccgatcgtggttatggaggcatttctccctaagcttactgaatggtgtcttgcaggtcttttccatggtggtcaccaatgttgccgccagcatggtaacatttggcagtgtggtattgagggtctttcctctgttttgcatccacagcagaggtctttactttttaccaaggagtgagtgggtttggaatgggttcccccctctcttagtttttggagacggggtctcgttctactgcccaggctggagtgcagtggtgcaccatagctcactgcagccttaaacttctaggctcaagtgattgtcctgccttggcctcccaaagtgctgggatgacacgtgtgagccactgcgcctggtcaccgtataccaaggaatgagtgggtttggaatgagttccctctcttttctttttttttttttttaagttacagtttgctttttgagatggagtctcactttgttgcccaggctggagtgcaatggtgggatcttggctcactgcagcctctgcctcccgggttcaagcgattcttctgcctcagcctcccgagtaactgggactataggcacacaccagcacacctggctaggtttcctctcttttttttttttttgagatggagtctcactctgtcgtcctggctggagtgcagtggtgtgatctcggctcactgcaaactccatgccccaggttcaagccattctcctgcctcagcctcccgagtagctgggactacaggcgcccaccggcacgcccggctaatttttttttgtatttttagtagagatggggtttcactgtgttagccgggatggtcttgatctcctgacctcgtgatccgtccacctcggcctcccaaagtgctgggattacaggcgtgagccaccacgcccggctcctctcttttctagaaggaatgttctccttctcaaaaggaaggtttctcctttgtgcttctccaaatgcaacaacaggatgtgtgtgtggtaaagggtgggaacactcagggcaatgatgtgctccaggtgagcagaagggagagaggttccagaaccttctctgccaaatgttcctgggagcaaatcagagccagccaagaaggggaagctgttagagtctctcttaccccattatttccaccaaaggcaccgaaaaagaaagggaagaaaggcaaagccaaaggcaccccgattgtcgatgggctcgctccagaggacatgagcaaggagcaggtgagcagagcgggctgtggcccagtccccgggtgggcgtgggcgggcaccacgcagggtgcctacgccgagtgtccatcttgccatgtggatccacccttctgtccaagccagaacacgccccccgcgtggcccataattcccatcagcggcaaagctttcggctgcaccatgtcttttcagaaaggtagtgcagcctgtgaaagagctttgtaacagggtggtaggagtgtggaaggacatgcttttctgatctaaaagctgtttttaatttcgtgtattctctttcaatcttaccctttttttgcacctgatgtgtatagacttatcgtagaacacacatgtagcattctcctttattttatttaccattaaacattatgtcaaaaaggaagtttttgaaagaaggatgatttacttcaaatcacatctgaatctgattaatcgttcatttttttttttttttttttttttttttgagacggagtctcactctgtcgcccaggctggagtgcagtggcgcgatctcggctcactgtgagctccacctcccgggttcacaccattctcctgcctcagcctcccgagtagctgggactacaggcacctgccaccacgcctggctaattttttttttgtatttttagtagagacggggtttcaccgtgttagccaggatggtctcgatctcctgacctcgtgatccactcgcctcggcctcccaaagtgctgggattacaggcatgagccaccacgcctggccagtcattcattgtttttgataaaagtcccaacaaggagtaacagcatcagggctgcctttttcttgttgcttattttggggaggaggtgatgtttttatagtttctttgtaggagttagtttaagtctcttcttcatttggatgtagttaagggctacagaacataattacataattacaattttacctaaaaggctcctggagacggcagtgtgtggcaagcacggtgcaccctctggcctctgccctcatggacgactgcctgtgagcacctgacatgggacatgagggctgtgtcaactctgtgttattgttaataaatcttaccttcttttgatagttgtaagataaaaaatcaatacgaaggagactgaaagagtctcatgacctgaagttggagctaggcagaggtccttgaacaatggtaaagaatggctttattttacatgcaggcaaaccattggcagtttaagccagtggctaagcagagaggtgatggggtcaggtttgtgttctggaaagatgtctggagctgctggatggagaatggattgaacactgcgttgtcccagcatgtgagctgctgcccgtctccctgtccgcttcccattcctgtggagacaggccttgtggggcagtggccatggagcctacggggcagcctacggggcaggctacggggcagcttacggggcaggctatggggcagcctacggggcaggctacggggcaggcccttgcactgcacatcgcacgttgagccacagactcagaaggcttcttcagggtccaggcaggtggggagggatgggggtgacctggagactcctgccccgcagcagaggacagtttcatctgttcactggggagtgccttgtgggcctaggagttcagtgctgtttttttctgattttccaagagaagctggaaatctggatatttataagaaatctgaatattgagtgatggcaaaatctcaacaccatgtgagccaaacagaccagtcaggagccctggttcaggctctgcccaggagcctctaaaggtctgtgacgtgaagacatttgtcgttgtgccgaggcactggttggattcgggggtgcgtgtctccctcatgtctgcccggcatcctcggctcagaacccctcctgctgctccttcttgtttgctcgttgtcttgtcttcttttgaggtgagaaatgtgttttccctgtggggaatgtggtgttgagaaagaaaaaggctcacagtaagtggcctggggctgtgcccgaaaagtaactgattctgacggaatctcgctgtgtggcccaggctggagtgcggtggcgcgacctcggctcactgcaagctccacctcctgggttcacaccatcctgctgcttcaggctgcccagtagctgggactgcaggtgcctgccatcacgcccggctaatttttttgtatttttagtagagacgaggtttcaccgtgttagccaggatggccttgatctcctgacctcatgatctgcctgtctctgcctcccaaagtgctgggattacaggtgtgagccaccgcgcctggcagtaactgattcttaagggaaatgagctcccgagaaagctggaagcctgtcctacatttttttttaacctatttgcagattcgcaattgaaccctcttgagattttagagtctactggttttgtatattttttgcttaacattatatcttcaaaggtgaattttttttcatttagcattatgatatgaatttgtttaaatgctgctacatcatttgcatattttttttgggttaatgtgatatttctcctagttgatatactctaatttttcaaccatttccatatttatttatttattgtttagagacagggtcctgctctgtcacccaggtggagtgcagtggtgtgatcacggctcacggcagccttgacctcccaggtccaaacgatcctcctacctcagtcttctgagtagctgggactataggcatgtgccaccactcctggctaattttttttttttttttttttgtagagacagggttttgccatgttgcctaggctgttcaactctggggctcaaaagatcctcccaaagtggtgggagccaccatgcctggctgtttgtgtattttttgagacagattctcactctgtcacccaggctggagtgtagtggcatgatcataactaaccgcagcctcaaccccctgagcttgagtgaccctcccacctcagctctcccagtagctgagactataggtgcgtgccatcatgcctagttaatgaaaaaaagtttttgcagagatggggtcttgctatgttgcccaagctggtcttcagctcctgggcgcgagggatccttcaacctcagcctcccagagtgctggggttgcaggcgagagccaccgcgcctcgcttatttccctgtttaaactggtcttaggttatttcctttttgatatttttgctgttgtaataatggtgtgggtaatatctttgagcaagatgctcttatatttcttttgagaaattttttaggcatcaattctcaggaatggatgaaaggatctagttattttatgattattggccaaattgaagagaattctgccacctgctgaatgcattctgtctccggagcttcctagccttatattttaactttttacatttagctgtttatttttaggtgaagttgagtcctccctctttcttccttgcctttcgccggccacacgccccgttgccgtgcatgggcccctgctcagtgcctcacctgacccactgcacctggccaggtggaggagcatgtcagccgcatccgggaggagctggaccgcgagcgggaggaacgaaactacttccagctggagcgggacaagatccacaccttctgggagatcacacggaggcagctggaggagaagaaggctgagctgcggaacaaagaccgggagatggaagaagccgaggagaggcaccaggtggagatcaaggtgagtggggccggcctgcacgtgctaacctggtcaccacagagccccagaggagctggatccagtgagggtgcaggtgggacattttctgttcttggctttgggagtcacagccttaaaggtgttttttataaaagcctgagggagagaccctgcaggtcctgagggtttaaaatgctgcctccacaacatggaaggaatatgggctctgggggcagactggcctgtttgcaactcagctctgccacttaataccccatgagctggggatgcacctcacctcccagccttggtgtcctgctctgtgcctcaagtgtacaggtttgcataggtgaacaggcatgtgtagctgtgtaaaggtgaggcatgcaagtgagcaggtggatgcaagtgagcatgtgtgtgcaggtgaggaggcgtggccaggtgaggaggtatgtgcaggtgaggtgtggggaggtgagcacgtggggcaggtatgtgcaggtgagcaggtaggtgcaagtgaccaggtgtctacaggtatgtacaggtgaggaggtgtagtacaggtgtagtgcaggcgaccaggtgtgtacgggaatttacaggtgaggaggtgtacaggtgaccaggtgtgtacaggtatggacaggtgagaaggtgtggtacaggtgtggtgcaggtgagcaggggggtacaggtatgtacaggtgaggtgtgttacaggtacggtgcaggtgatcaggtgtatacaggaatgtacaagtgaggaggtgtggtacaggtgaccaggtgtgtacaggtatggacaggtgaggaggtgtggtacaggtgtggtgtgggtgagcaggagtgtacaggtatgtacaggtgaggaggtgtggtacaggtgaccaggtgtgtacgggtacggacaggtgaggaggtgtggtacaggtgtggtatgggtgaccaggtgtgtacaggtatggacaggtgaggaggtgtggtacaggtgaccaggtgtgtacgggtacggacaggtgaggaggtgtggtgcaggtgtggtatgggtgaccaggtgtgtacaggtatggatggacaggtaaggaggtgtggtacaggtgaccaggtgtgtacaggtatggacaggtgaggaggtgtggtacaggtgtgctatgggtgaccaggtgtgcacaggtacggaaaggtgaggaggtgtggtgcaggtgagcagatggtactcccattgccctgcaggtgtacaagcagaaagtgaagcacctgctatatgagcaccagaacaacctgacagagatgaaggctgagggcactgtagtcatgaagctggcacagaaagagcaccgcatacaggagagtgtgctgcgcaaggacatgcgggcactgaaggtggagctcaaggagcaggagctggccagtgaggtggtggtgaagaacctgcggctggtaggtgtggcgggggcacctggaggctgacaggttgttgggacggcaagcctagtgctgcatgaactcctgtttattcaacagcaactgggaattcatatttctgcataagactttctgcatttttgcaatttgttgaaaaaaatttttttaaagcatgcatccaaacaaaccccattttgggaccaagtacacaattctgtctcagacctgagcaaaaaattgacgtcaccgaagagaaaaaatccagcttaggatctttcatgtgctgctgacacctgacacccagagacttttcctagggaatagcatcatatgcatttagtagaatgcaaaccaaccattaaaatatccagtgtgttgactcctgggcactgtgacagtttgtcacacaagctggtctgatttttacttttgaggctgggggtttccagggcaccattaaaattcatctgtgcacctggttcagtggctcacacccaaaatcccagcacttgggagggtcaggtgggagaagtggttgaggccaatagtttgagactagcttgggtgaaatagttgaaccccatgtctaaaaaatttaaaagaaaacattagctggtgtagtggcacatgccgatagtttcagctacttgggaggctgaggcgggaggatcccttgagctcaggaagtcaaggctgtggtgagctaggattgtgccactgcattccagcctaggtgacagagtgagacaaaacaaaaaggaaagagatcatttgctgagtgtccattagctgctaggtcctgatctgatctctgacaaaacgcctgcccgactggggctgttggtctagaaaggagagacaacaggtgagttggaagacaaaataaacgtgccagatacaacagagtatctggtggggaagagtgccatagaaggatcgaagtggggagaggtggggtgcggttttgtacaagcagttgaccggctgggagacgggatgggccagtgggaaagctcagagtgaccaggaggagactgtgggagagggtcagagcttgtccgcctcgaaagccgtggtggggactggagacgggtcagagctcgtccgcctcgaaagccgtggtggggactgggactttgaccctggtggagtctgttgccctctgagaacttgggcagaggagagatgtgtctcactaaggttcttcctggctgctgggttgaggagactttctgaacacatttgcctcacgcctggaagcagtccagcctccactgaatctggaagaaacttggtgacgttgctgacttcgcagcaaagcctgagagtgccgaagtcttgagccctccagaattagctggtcttaacccaggtcctggatatgatattgttacataatcagagtttcctgttgggtaaaaatatggctttaggccgggtgcggtggctcacgcctgtaatcccagcactttgggaggccgaggagggtgtatcacgaggtcaggagtttgagaccagcctgaccaacgtggtgaaaccccgtctctactaaaaatacaaaaattagccgggcgtggtggcgcacacctataatcccagctactcgggacgctgaggcagaagaatcacttgaacctgggagacggaggttgcggtgagccgagattgtgccactgcactccagcctgggcgacagtgtgagagtctgtctcaaaaaaaagaaaaattactgctttaaaaataatttatttttttatgcaaattttaaatatataatgtttatttaaatatataataatagttcattaaaaatatatatttatttatttttagagatgaggtctcactctgtctcccaggctgcagtgcaatggtacaatcatagctcactgcagcctcgaacttctagtctcaagtgatccttctgccttagcctcccaagtagctggaactatagatatgagccaccacacccacctaatctttttttttttttttttttttttgagatggagttttgctcttgttgcccaggctggagtgcagtggcacaatctcagttcaccacaacctctgcctcccgggttcaagctattctcctgcctcagcctctcgactagctgggattacaggcatgtgccaccatgcccggctaattttgtatttttagtagagacggggtttctccatgttgttcaggctggtcttaaactcccgacctcaggtggtctgtccagctcggcctcccaaagtgctgggattacaggcgtgagccactgtgcccggcaatctttaaattttctgtagaagatcttgctatgttgcttaggctgcccttgaactcttgacctcaagtgatcctcctgccttggcctccagcgtgctgggatgacaggaatgaatccttttaatatgctgcttcaggcagcagtgcagcaggttggaagctacacacggcacctggaaagatcccacagctctgtgtggatgtggctgctgctcttcaggctgtgggatggtttggcgatggaaccaagcgggttcagtgctcacgacgtctgttcatgttctctctcaagcttagaggtgactttagttgagggaggtgagttagggaatatggaggtgaccaaaaccatgaggaacagggtcagcctgaagggagcgggcttccctctgtgtccggctgtgtagtaatggccgcttctccctgtgcagaaacacaccgaggagatcaccaggatgcggaatgattttgagaggcaagttcgaggtcagtttcccgtgtgctcattgtgtaggtgccagagacacccccgccccatcagagaggaatttacctccagagcttgttaactcagggagcaaaaactggattaaaacagccaaggcatgcaagagaaagaacatggaagtttccaaggccagtggacccactcagaatcccagaacaacctatttccatgtgagtttgggaggctgtgattaccacacacattcccactcctagctaaaatcagtagttatcagcaggtggtagctattcagtgccgtgggcagcattcttaaaatagtcttctccatggctcctggtctgagaaggctccaatttcagaagtctctgtgttttactaataaaggctgattgtggctgggtggccacacaggcctcggttactgctcactggggtcagctgacattcagctgttggcacccccagtgcagggagcgattagcaatgcctgtcactggcaaaggcaggccgacagtggtgtgtgtgctgagtgtgagcatcagcagaaaaactcagtctaaacccctttgttcttctcttgcagagcttttgcctgcaaggctgttctgaccacagtgggcgttttgggcccgtttacaggctccatgttctgtagccgtaggggcaccacgtcttcctctgctaagctgctgtttgctgctgcctttcagaaattgaggccaagtatgataagaagatgaagatgctgagggacgagctcgacttgcggagaaagactgagctccacgaagtggaggagaggaagaatggccagatccacacgctgatgcagcgccacgaggaggccttcaccgacattaagaactactacaacgacatcaccctcaacaacctggccctcatcaactccctcaaggtgctgtgcgtgggctgggctggggaggcacactctgcctgtcctagaatgtgggctgcagagtcctggggatccagaccccagctctccactccaacacacccagtactttttataagattatttgacaatgcccctctcatatccttaactgaaattcctaaataacgtaacctatctctacctattgttaaaagcagtcaggatattgccctcaccgtagtgcagagggggaagtaatgaagtgtgttgtggtttgtaaaagctcagatggaaccgcagtgagggccgtgatgtggctggagtggataggtgtcatagtcactgcctgcgacaggtggataggtgtcatcgtcactgcatgctggcagtgacaggattttctacagtagacaacggcccttggtggaatcttgaacaaagtatagtccttcagtctgcatggaagctgcattcccagaaaactcagaataagttgaagctgcagaaatactgtttatacatagaagacgtctaggtgccagcatgcctgaggctggcagcagctggtgatgggcaggagagcacccagctc

SEQ ID NO: 1522 - protein, 293 aa, Homo sapiens
MKINGPVAVAHACNPSTLGGLGGQITGQEFEYSLANIVEEHVSRIREELDREREERNYFQLERDKIHTFWEITRRQLEEKKAELRNKDREMEEAEERHQVEIKVYKQKVKHLLYEHQNNLTEMKAEGTVVMKLAQKEHRIQESVLRKDMRALKVELKEQELASEVVVKNLRLVEIEAKYDKKMKMLRDELDLRRKTELHEVEERKNGQIHTLMQRHEEAFTDIKNYYNDITLNNLALINSLKVLAEGEVMKCVVVCKSSDGTAVRAVMWLEWIGVIVTACDRWIGVIVTACWQ

SEQ ID NO: 1523 - DNA, 10183 bp, Homo sapiens
  source
  (1)..(10183)
  CDS (201)..(577)
  CDS (3041)..(3248)
  CDS (4405)..(5232)
  CDS (6871)..(7039)
  CDS (8658)..(8902)
  CDS (8991)..(9983)
gcaatcccaaagccttcctctctagccccgtaccaatagttcgtctcgctagcgcccaatagtctggacgaccgcaggggaaagcaagccggccggatgagaaagcatagagaccggaaatgtgcctgtttcttcctgtcctaagttcggagtcagcgccccttgtggtccggaagggaagtgacgttgttgctgggaagatggcgaccgcggcgactatcccatcggtagccacggccacagcagcggctctcggcgaggtggaggatgaagggctcctggcgtcgctgttccgggaccgcttccccgaggcccagtggcgcgagcggcccgatgtgggccgctacctccgggagttgagcggctcggggctggagcggctgcggcgcgagcccgagcgcctggcggaggagcgggcgcagctgctgcagcagacgcgcgacttggccttcgctaactacaagaccttcatccgcggcgccgagtgcaccgagcgcatccaccgcctgtttggcgacgtggaggcgtcgctcggccgcctgctcgaccgtttgcccagcttccagcagagctgcaggtgcgacgcgcctggcgctaaaggggttttataactgtaaaagctgacatttacgatggtagaaataactaacacataaagcgtttaccacgttccaggttctctgctgagcgctttattaatccatttaaacctcacaacagccttcgagataggtactgttattccttttttatcttttttgagacggagtctcgccctgtcgccaggctggagtgcagtggcgagatctcggctcgctgcaacctacctctgcctcctgggttcaagcgattctcctgcctcagcctcctgagtagcagggaccataggcgcgcgccaccacgcccagctaatttttttggatttttagtagagacggggtttcagcatgttggctgggatggtctcgatcttttgatgtcgtgatctgtccgcctcggcctcccaaagcgctgggattacaggcataatccactgcgcccagccctgttatttccattttacatatgagcaagtcaagacagagattagtgacgtccaaggacacagctaggaggtttcgaattcagaactggttacccagaagcacgtccctccctcgaagggcagttgtgggcacaaagaaaaaggattcatgcaaagctcttattatcgggtctgacacagttaacattataggtgtgagctgaatatatgtgcacatttatatacttattttatacgaaagcgtggaccggaggtcatctgcttcaaaacttccattgacgggaaggtgacaaggaaatcctcgcatttgagggcatcagatatcaaaaagtctctccatttggatggctggatgtggtggctcagcctgtaatcccagcactttgggagcctgaggcttgaacccaggagttcgagagcagcctggccaacatggcaaaaccctgtctctataaaataaaaaattagctggtcgtggtggcgtgcgcctgtagtcccaggtacacaggaggttgaggtgggggggtcagttgggcccgggagattgaggctgcagtgagccatgattgtgccaccgcactccagtttgggaggtcgaggctgcggtgggctgtgattgtgccactgcattccagactgggtgacaaagtgaaactctcttaaaaaaagaaaaaaaggctgggtgcggtggctcacacctgtaatcccagcactttgagaggccaaggcaggcggatcacgaggtcaagagatcgaggccatcctggctaacatgctgaaacccccatgtctactaaaaatacaattagctgggcgtggtggcacgcgcttgtagtcccagctactcgggaggctgaggcaggagaattacttgaacctgagaagcggaggttgcagtgagccaagatgatgcgtgccactgcactccagcctggtgacagagcaagactccgtctcaaaaaaaaaaaaaaaagtcctttgtgagtcatattctgtctccattatccctagttctgccttccagcctttcatgattaaagtttaatttttcttttgagcctttggatatttgacagcagcttttgtacccttccatgctccagaatagataggggacttgataaagcaggtctctgcaaatatggagaagtgttgaaagtagactgtggcaggaactatggttgaacattagcataggagaagatgaagacctgaggggaaagattgtggattctaggcagttagtgcttcattttgaaaataatgatagctactgttaaatatttaactgtgtctcttttactatttttactttgacgcattcgctctgtttcaagttctatgttaaatgcttcacacacatcatctcatttagttcttacacccttatgaggagggtcctatatactttttttttttttttttttgagacggagtcttgctttgttggccaggctgcagtgcagtggcgccatctctgctcaccgcaacctccacctcctgggttcaagtgattctcctgcctcagcctcctgagtagctgggactacaggcgcgcaccaccatgcctggctaattttttgtatttttagtagagatggggtttcacttgaactcctggcctcaagtgatccgcccacctcagcctcccaaagtgctgggattacaggcgtgagccactgcgcctggccctatataccgttttactaatgaggaaataggttcagagaggccaagtaccttgccacagccagcaagtggcatatctggatctccatctgttagatttattaattgtatgtttttggacaagttgcttaacctctctgggattaaaaatttcctcaattgtaataatacttaccttataggtggggtgtgaggaataaatcagatagatcatccagcccaatgttcatagcaggtacttggtaactgtagctaaggtttgggtacagagcagtgaaggatcaacattcttctgattattactaggaactttgtgaaggaagccgaggagatcagctccaaccgccggatgaatagcctgaccctaaaccggcacacagaaattttggaaatactggagattcctcagctcatggacacctgtgtccggaacagttattatgaagaggccctggagcttgcagcctacgtacgccgactggagaggaaatactcttccatccctgtcatccaggtagccaccttgcccagagaggactcaaagtaatgttcttgtaatcatttattctgtggtcaggactgaagctttaggtagaaactcttgcatgtttcacatcagtttctgccagccaggtatgcctgaacagaaaacattcatttattcaaaatacatattaatcatgtgccaagcactgctctatatgctggggatacagtgtgaataaagtggtcctggctctcatgcagcttacgtgctaatgggaagtctgataattgacaaagaaatgatatcatttcagatagtggtgtctgaagaaaaaaacagggaatggggtaagggagtctagggtaggtttctttaggtagggtgatcaagaaggactcttctagggaggtaacatttaagctgagacctaaatgagaaggaggtgccagcccacaaagatctggggagagagcaaaccagaaagtgtgaagaacaagtagagagggctgaagtgggcagaaattgaggtgtttaagggatacagaggcagccagggttaatggattgtagcagcgggagagcactaggaagcaggtgaagatggagagccaggtagggccaccagtgtaagtcccaacaagtggttggaattttcttgattgcagtgggaagtcactggaggattttaagcttttttttttttcttttttttttttgagacagagtctcgctctgtcccccaggctggagtgcagtggtgcgaccttggctcactgcaacctttatctcccgggttcaagtgattctcctgcctctgcctcccgagtaaccgggattacaggcctgcaccaccacacccacctgatttttatatttttagtagagacgaggtttcacatgttggccagattggtctcaaactcctgacctcaagtgacctgcctgcccacggtgctgggattacaggtttgagccactgcacctggccaggttttaagctttttaagcaagagagttaactaacctgatctttgttggtgaacctacaggcatcagctttaggaaattacttcacatttcaggaaagccatgggaatgttggtctgcagtcttcagagttaggggaatgggttctagagagcatccttcccagcgcagtgtgactctctctgtgtattgtcagggcatcgtgaacgaagtgcgccagtccatgcagctgatgctgagccagctgatccagcaactgaggaccaacatccagcttcctgcctgcctccgtgtcattggctacctgcggcgcatggacgtcttcactgaggctgagttgagggtgaagtttcttcaggcccgagatgcttggctccggtccatcctgactgccattcctaatgatgatccctatttccatattacaaaaaccatcgaggcctcccgtgtccatctctttgatatcatcacccagtaccgtgccatcttctcagacgaggacccactgctgccccctgccatgggtgagcacactgtgaatgagagtgccatcttccatggctgggtgctacagaaggtctcacaattcctgcaggtgctggagaccgacctttaccggggcataggcggccacctggactctctgctgggccagtgcatgtactttgggctgtccttcagccgggtgggagctgatttccggggtcagttggctcctgttttccagcgggtggccatcagcactttccagaaagcaattcaggaaacagtggagaaattccaggaagaaatgaactcctacatgctcatctcggctccagccatcctgggcaccagtaacatgcctgctgctgtgccagccacccagccggggacgctgcagccacccatggtgctcctagatttcccacccctcgcctgctttctcaacaatattctggttgccttcaatgatctgcgcctctgctgccctgtggccctggcgcaggatgtgactggggccttggaagatgcccttgccaaggtgagcacattctgttggttttctgctaccctgggccttctctggtaatgggtggccagatttttgtaataaacccgtctatttgacggtgtctgctgacatggagaggtctagtgtggttttggaggttctcctgattgagaagctctggccagttgcccttcatgggacctaggacagtccatgaagtgatttgcctatagtaacaattcggtaatacacgtattagctttctagtgctgcataacaaatttccacaaacttagtagcttccagcaacacatttattaccttccagttttggtgggtcaggagtccaggcacagcacaaccgggtcctctctgctcagggtcttacagggttgccatcaaggtgttggctggactatggcctcatctggaggttggggctccatttcagactcatgcaagttggcaggggtcagttctttgcaattgcagaactgaagcctcagctcctagaggctgtccactccataggcagctgacaacatggctgtttgcttcctcaaggccagcaggagagctactctcttgagtctcttcttttaggtacctccttttaaaaacttcatttgattaagtcagatgattagggactttaattacatctacaaaaccctttacctttagcatattcttttatttttattgttaaaagtgttttattttacagagagatagtgtctccctatgttgcctaggctggtctcaaactcctggactcaagtgatcctcctgctacagaccctcaaagtgtgggattacaggtgtgagtcacttgaacttgggaagtccagcatcagagtctgtgttcttaccctgtcgctatgccacatatctgtagtgtcagctaggctgctctgttggttttgaaacttctctttcctagctgttttcttacagttttccagtggttctagctttctgaaacctcggggcttagtagaaagcttgtatagttttgcttcattttcctggatccagcacagttctggttggtcctccgtggaagttaagaaccatgtattgggccgggcgcagtggctcacgcctgtaatgccaacactttgggaggctgaggtaggaggatctcttgaagccaggggctccagaccagcctgggcaacaaagcaagaccctgtctctacaaaaaattttaaaacttagccagacgtgatggtgcacgcctgtagtcccagctacttgggaggctaaggtgggagtatcccttgagcccaggagtttgaagctacagtgagctgattgtgccgctacactccagcttaggtgacagagcaaaatcctgtctctaaaaaaaaaaaaaaaaaaaccaaaaccatgtattctctctatagttttatgacactcctccactggaaccggaaactatacccgtaatgtaacaagttgggtctgaacttcacattaataaagtgacacaattgtggacaatgaccataattctgagtttaaatgagacagtaaaataatgtactgttaaattactttgttcaggaaaactggaggggcatacatttttttgcctagtttcatgcactgctgtcccagtggtgataggctgtcccagtaattgacggtgcccttgtctcttaggtaactaaaataatcctggccttccatcgcgctgaagaggctgccttcagcagcggggagcaagagctctttgtccagttctgcactgtcttcctggaagaccttgttccgtatttaaatcgctgtctccaagtcctttttccaccagctcagatagcacagactttaggtaagagaatgaaaattctgtaaactgccttactgatgtgtaattcacatactaaataattcatccatttgtgtaagtcagtgttttttagtaaatatgaatccaattttagaatatttccatcactccaaaaagatccttcatgcacgtttgtagtcattcctcgacagcatccttagtccctggcaacctactttctgttgccatagatttgcctcttctggacatttcataaaaatggaatcatacattatgtggctgtatctggctaagcggaagaagccagtcacaaaagaactacatacgtatgattccatttatgtgaaatatctagagaaatggtttttacagtcttttttttttttgaggcggagtctcgctgtgttgccaggctggagtgcagtggcacagtcttggctcactgcaacctccacctcccgggttcaagcaattctcctgcctcagcctcccgagtagctgggactacagactcgcaccaccacgcccagctaatttttgtgttttagtagagacggggtttcaccatgttggccaggatggtctctatctcttgacctgtgatccgcccacctcggcctcccaaagtgctcggattacaggcgtgagccaccacgcccgtcctaaagtcttttttccaattcactttcacgtccttgtccctttgtggtaggagaggggcttggttgaggcacagcttcccaaagggcaatgggtcagtgcatcacacgtgcaaagcctggctgccctctgctttttccctggtgctgcctgaggtctgggttcctgctgcaggcaccctacactgctgttccgttacgttctgcttcacagtatagcttcccattccctgtaacaaaggtggtttttgctgtattaaaacatagtaattgatggctgggcgcagtggctcatgcctgtaatcccagcactttgggaggccgaggcggatggatcacctgaggttgggagtttgagaccagcctggccaacatagtaactccgtctctactaaaaatacaaaaattagcctggcatggtggcgggcgcctgtaatcccagctaccacggaggctgaggcatgagaactgtttgaacctgggaggcagaggttgcagtgagcagcaatcacgccactgcactccagcctgggcgacagagcgagactgtctcaaaaaaaaaaatagtaatggctcgttttttttcccttaaatttccttttttttttttttttttttttttgagacggagttttgctcttgtggcccaggctggagtgcaatggcgcgatctcggctaactgcaatctccacctcctaggttcaagcgattctcctgccttagccttcccaagtagctgggattacaggcctgcgccaccaagcccggctaatgttgtatttttaagagagatgggatttctccgtgtgggtcaggctggtctcgaattcctgacctcaggtgatccgcccccccctccccggcctcccaaagtgctgggattacaggcgtgagccaccgcgcccggcctcccttaaatttctatattgagttttattagtaactgttttccattttgctttccccacgtctgggttaggcattcctcccactcagctctccaagtacggtaacctagggcatgtgaacatcggcgccattcaggagcccctcgcctttatcctgccaaagagagagacgcttttcaccctggatgaccaggcgctggggcccgagctcacagctccagcaccagagcctcccgccgaggagccacgcctggagcccgcgggcccagcctgcccggagggagggcgagcggagacgcaggccgaaccgcccagcgtggggccctagccggcgtcccctgcctccagaacgcggtgcgtgaggttcccggcgcggggtggccaggactgcctcgccctggaaggtccggggcgggttcgggaggcgggaaggcgctcccgggaggagagcggaagggggcggtgctcactgccagtctaagcaggaaggcggggatccagtcgcggcttcgctgtgtgctggccgacggcgcttcccggcgtgccccgcgctgcggccggaaggggcgggccgggtcactgttaagggggccgccatggcccggctgtggggcgcgctgagtctttggccactgtgggcggccgtgccgtggggcggggcggcagccgtcggtgtccgggcttgcagctccacggccgccccggacggcgtcgagggcccggcgctgcggcgctcctattggcgccacctgaggcgtctggtgctgggtcctcccgaaccgccgttctcgcacgtgtgccaagtcggggacccggtgctgcgcggcgtggcggccccggtggagcgggcgcagctaggcgggcccgagctgcagcggctgacgcaacggctggtccaggtgatgcggcggcggcgctgcgtgggcctaagcgcgccgcagctgggggtgccgcggcaggtgctggcgctggagctccccgaggcgctgtgtcgggagtgcccgccccgccagcgcgcgctccgccaaatggagcccttccccctgcgcgtgttcgtgaaccccagcctgcgagtgcttgacagccgcctggtcacctttcccgagggctgcgagagcgtcgccggcttcctggcctgcgtgccccgcttccaggcggtgcagatctcaggtgcgggcggcggggaccggggctgctggagcagcgcgcgcgtctcttctgcccgactccgcgagagcgcagaagtggtcgcggttcatacgccggacctcccgcaggagcgaagtgggatgcgggagcggagaggcctcaggacggatagaagctcctgtggggtagagcccgctcagataggacgcaggggcgaggagaggtcccctagttccgctgttacctgacagcctggcgtctgctttctgctcccttgctctctgaggcaaacacgctcttcggccccagttagatccgccacggtggagttggagaagtgggggttagcccccgccagcctgacccagcccagggggctaggccattcccccgtggtaccacaggatgcctcgcggaatgcgggctctgctggggtcggggtgattgt

SEQ ID NO: 1524 - protein, 939 aa, Homo sapiens
MATAATIPSVATATAAALGEVEDEGLLASLFRDRFPEAQWRERPDVGRYLRELSGSGLERLRREPERLAEERAQLLQQTRDLAFANYKTFIRGAECTERIHRLFGDVEASLGRLLDRLPSFQQSCRNFVKEAEEISSNRRMNSLTLNRHTEILEILEIPQLMDTCVRNSYYEEALELAAYVRRLERKYSSIPVIQGIVNEVRQSMQLMLSQLIQQLRTNIQLPACLRVIGYLRRMDVFTEAELRVKFLQARDAWLRSILTAIPNDDPYFHITKTIEASRVHLFDIITQYRAIFSDEDPLLPPAMGEHTVNESAIFHGWVLQKVSQFLQVLETDLYRGIGGHLDSLLGQCMYFGLSFSRVGADFRGQLAPVFQRVAISTFQKAIQETVEKFQEEMNSYMLISAPAILGTSNMPAAVPATQPGTLQPPMVLLDFPPLACFLNNILVAFNDLRLCCPVALAQDVTGALEDALAKVTKIILAFHRAEEAAFSSGEQELFVQFCTVFLEDLVPYLNRCLQVLFPPAQIAQTLGIPPTQLSKYGNLGHVNIGAIQEPLAFILPKRETLFTLDDQALGPELTAPAPEPPAEEPRLEPAGPACPEGGRAETQAEPPSVRGGFGRREGAPGRRAEGGGAHCQSKQEGGDPVAASLCAGRRRFPACPALRPEGAGRVTVKGAAMARLWGALSLWPLWAAVPWGGAAAVGVRACSSTAAPDGVEGPALRRSYWRHLRRLVLGPPEPPFSHVCQVGDPVLRGVAAPVERAQLGGPELQRLTQRLVQVMRRRRCVGLSAPQLGVPRQVLALELPEALCRECPPRQRALRQMEPFPLRVFVNPSLRVLDSRLVTFPEGCESVAGFLACVPRFQAVQISGAGGGDRGCWSSARVSSARLRESAEVVAVHTPDLPQERSGMRERRGLRTDRSSCGVEPAQIGRRGEERSPSSAVT

SEQ ID NO: 1525 - DNA, 859 bp, Homo sapiens
  source
  (1)..(859)
  CDS (201)..(659)
ccacccagcaaagggaccaactcggggagggtggcggaatataaaaataggagcagtggcagaagacacttgcgtgcactcccaaatcccaacacaggagggcagccgttccttactgttcctcacaggggacccccgtggaggacaggcaaaaagtttagacggcggtcgcaggttgaacgaagctcccgaggggtttcatgatatatatacataaccttgggtggggaccaactcccttggccagggccaggcgtgggagagtgaaaagtgggctgcgagtgcagggggccgtgagtgcggaagccgcgggtgcaggaacctcgggtgccggctttgcaggacagggaagggtgtggcgtgaaaaccacaattgcgatctcccgtggggaaagcttataactgtggcaagttccgattacagactggctggaattcagctcgccgctgccagtggaagctgtggtagtagatctgcctcactgagtgcatgggaattgggggctcaccgctgcctgctactccccactctgcacaaactcttctgcgcagcgggggcagaagaacatcaacccagtggcctgagacccactccatcccccaacattcacaggagctgctgcttgccctgcacacggagaatcagagcacaaacctgaccgacgcagcccccatctcgctttgccccgccacttgccctggtagcttaacacaaaggacagaatctcttgagagctctgtggccctgactattgcctgtgaaaccagagtattcctccctccacgcccccaccaccacgcccctcccccccccccccccccacacacccacctaccgcagccggtgttcatttgcaag

SEQ ID NO: 1526 - protein, 152 aa, Homo sapiens [sequence omitted]

SEQ ID NO: 1527 - DNA, 913 bp, Homo sapiens
  source
  (1)..(913)
  CDS (201)..(713)
tggtcgcgaactcctgacctcgtgatctgcctgcatcggcctcccaaagtgctgggattaccagtgtgagccaccccgcccagccccttttattaactatacttgatcagtataatgcataatttcccagaactgaaaaactctcaaactcaagctctcataattgagggaaaggttcataaagagaaatcagctaaagaatgattattatatcattagaatgtgaaggcattttttttttaaaaaaaagctctataaaaaaaatctgtatctcaaatcaggattttatttataaacattctagaccttatgccttctattattcttttaagatcaaactttccaaaaaaataacctttccactttctgattctgctcccatactctccattcacagcttaatccatgacaaccttacattgcattcacttttcaatcattgcaacctggattctgcttccactcaatcactagctcagctcttcaagatcaccaattatctcattgttactaaatccaatgtccacttttgggtccttgataacttggccgcatttaatatagttgatcagacttccttggaacgcttttacaccttggcttccttctacctatctggctactctttctcaggtttctttactaatttcttttctaccattaaattcctcagaattcttttactctctttccctttaggtgatcttacataacattctctaagataaactacaggcctacaactccagcctagatctttcttccagatctcaaacttactcccagacagacaataacctgggtttacttgcatagatgagagaatactctcagaaaggctgacctagatttctatttattaggctaaaacctaatcaactgtattatactttctctggaaatagactaaaca

SEQ ID NO: 1528 - protein, 170 aa, Homo sapiens [sequence omitted]

SEQ ID NO: 1529 - DNA, 1541 bp, Homo sapiens; identical to SEQ ID NO: 911
  source
  (1)..(1541)
  CDS (201)..(1071)
  CDS (1172)..(1341)

SEQ ID NO: 1530 - protein, 346 aa, Homo sapiens
MVIMSSHPKTYQQRFVFPYFDLWGNVVIDKSYLENLPSDSPIVTMAFPTLQAILAQGIQENNFAESLVMTTTVSHNVTMPFKISMTFKNNSPSGGETTCVFWNFRLSNNTGGWDSSGCYVEEGDGDNVTCICDHLTSFSILMSPDSPNPGSLLGILLDIISYVGVGFSIFSLAACLVVETVVWKSVTKNQTSYMHHTCIVNIAASLLVANTWFIVVAAIQDNHYVLCKTACVAATFFIHFFYLSIFFWMLTLGLMLFYRLLFILHETSRSTQKAIAFCLGYGCPTGHLCHPMIIVVVNITITIVVITKILRPSIGDKPCKQEKSSLFQISKSTGVLTPLWGPHLGF

SEQ ID NO: 1531 - DNA, 976 bp, Homo sapiens
  source
  (1)..(976)
  CDS (201)..(776)
aaaaaaaaaaaaccctgctgggatattgatttgattggggtacagacaactttctatattgattggaattgtacagtcagacaacttatgattgacatattaacaatattgagtctttcaatccatgagtacgggatatctttttttttttttttttgagacagagtttttttgtgtcacccaggctggggggcaggggtatgatctcagctcactgcaacctccacctaccaggttcaagtgattttcctgccttggcttcccaggtagctaggactacaggcgtgcaccgccacacctggctaatgtcttgcatttttagtagagatggggttttcaccatattggcatgctggtctcgaactcctgaccttgtgatctgcccacctcagcctcccaaagtgctggaattacaggtaagtatagtgtatctttccatttatttccaaatttctctcagcactattttttatgtttcaggatatagaacttgcacagttttcttgagttcatttttatttcatattcttttttattattttattttaagttccagggtacatgtgcaggatgtgcaggtttgttacataggtaaacatgtgccatggtggtttgctgcactgataaacccatcacctacgtattttacccagtatgcattagctgtttttcctgatgctctccacatctccgccctcccccaacaagccccagtgtgtttggtttccctcactgtgtccatgtgttctcactgttcagctcccacttataagtgagaacatgcagtgtttggttttctgttcctgcatagtttgctgaggataatggcttccagcttcatccacgtccctgcaaaggacattatctcgttcctttttatggctgcatagtattccatgatgtatatgtaccacattttctttatccagtctatcatcgatgggcatttgggttgattccatgtctttgctattgt

SEQ ID NO: 1532 - protein, 191 aa, Homo sapiens [sequence omitted]

SEQ ID NO: 1533 - DNA, 874 bp, Homo sapiens
  source
  (1)..(874)
  CDS (201)..(674)
aatatgtacagtcctgggccacacgcacaagattctgtcttagcaggtcagagttagagatggggagctacctggttacgagggatcccagtgcattttgaggcagctggttgttaagactgcattgtaaaaattacaacccaaagatgtgaaccgaaacagaaagacattggcaggctagaaaacaacacaagtaaaacatgaacaagttcattccagaaggagattctcaaccacagctgcacatcagaatcacctggggagattttaaaacccccaatgcccgggctctgcagcccagatcaattattaaagaatctcttggggatgaaacatgggcatcagtatttttggtttgtgtgtgtgtgtgtggtttttttttttttttttttttgagatggaatcttgttctgtcacccaggctgaagtgcagtggtgcgatctcagctcactgctacctctgcctcccgggttcaacccattttcctacctcagcctcccaagtagctgggatcacaggtgtgcaccgccacgcctggctaatttttgtatttttaatagagatagggtttcaccatgctgcccaggcaggtctcgaactcccagcctcaggtgatctgcccaccttggcctcacacagtgctgggattacaggcatgagccattgctcctagcagtatttttttaatgaggcaaaattcacataacatacaagtccctgtatgaaaccatacacttcagtatcattaaatacattcacaatattaagcaatcatcatctctgtctagttccaaaacattttcattaacacccccgcccccccaaaaaataaccctgtatccatcaagcattctccatcccctcccctttccc

SEQ ID NO: 1534 - protein, 157 aa, Homo sapiens [sequence omitted]

SEQ ID NO: 1535 - DNA, 949 bp, Homo sapiens
  source
  (1)..(949)
  CDS (201)..(749)
  modified_base (1)..(40): a, t, c, g, unknown or other
nnnnnnnnnnnnnnnnnnnnnnnnnnnnnnnnnnnnnnnntccagctttgtcctttctgcttagaaatgccttggctatttgggttcctttttggttccatatgaattttaaaatactttttctaattataggaaaaatgtattgatagtttaataggaataaaattgaatctataaatttggagagtatacccatttttatgatattgagtcttactatctatgaacatggaatgttttttgcatcatctctgatttctttgagcagtgttttgtggttttccttgtacagatctttcaccttcctggtcagctgtcttcttaggtattttattctttttgtggcaatcatgaatgggactgcattcctgatttggctctcagcttggctgttgtttgtgtacaggaatgctagtaatttttgcacattgattttatttcctgggactttgttgaagttgtttattagcttaagaagcttttgggctaaaactgttgggttttctagatataggaccatgttgtctgcaaacagggatagtttgacttactcttttcccgtttggatgccctttatttctttctctttcctaattcctctggctaggacttccaatgctattttgaataggagtggggagacagggcatccttgtcttgtgctggttttcaaggggaatgcttccaggtttttcccattcagtgttatgttggctgtgggttttcatagatggctcttattattttgaagtatgttcattcaatacttagtttattgagagtttttaacatgaagggatattaaattttatcaaaagccttttctgcgtcttttgagataatcatgtggtttttgtctttagttctgattatttggcaaatcacatttattgatttgtgtatgttgaaccaaccttgcatcccagtgataaagcctacctgattgagg

SEQ ID NO: 1536 - protein, 182 aa, Homo sapiens [sequence omitted]

SEQ ID NO: 1537 - DNA, 1168 bp, Homo sapiens
  source
  (1)..(1168)
  CDS (201)..(968)
gtgctctttaaaggttacgcattcaactctcaaaagcctcttaagagaagagtgactttaagtatttctaagggcagagcaatgggaggtggagaatgctgggttgcaggtgacactataaacgtagctcatgcctcctatttccatgcaggacctcccagccctgaagacaaacatcagtgacagacatcagtggcagaatggcctcccggtatgtggcagtgggaatgatcttcttatcacagaccgtggtgggagtcctggggagcttctctcttcttctccattatctctccctttactgcactgggtacaggttaaggtccacagatttgattgttaagcacctgattgtagccaacttcttagctctccgctgtaaaggagtcccccagacaatggcagcttttggggttagatattttcttaatgctcttgggtgcaaacttgttttctatctccatagagtgggcaggggagtgtccattggcaccacctgcctcttgagtgtcttccaggtgatcacggtcagctccaggaaatccaggtgggcaaaacttaaagagaaagcccccaagcatgttggcttttctgttctcctgtgctggatcgtgtgcatgttggtaaacatcatctttcccatgtatgtgactggcaaatggaactacacaaacatcacagtgaacgaggatttgggatactgttctgggggaggcaacaacaaaatcgcacagacactgcgtgcaatgttgttatcattccctgatgtgttgtgtctggggctcatgctctgggtcagcagctccatggtttgcatcctgcacaggcacaagcagcgggtccagcacattgataggagcgatctctcccccagagcctccccagagaacagagctacgcagagcatcctcatcctggtgagcacctttgtgtcttcttacactctctcctgccttttccaagtttgatggctcttttggataatcccaatagtttactggtgaacacttcagccttaatgagtgtatgtttcccaactctcagtccctttgttctcatgagctgtgaccccagtgtatacaggctttgctttgcttggaaaagatgacaagatcccctaaactgatcataaacatgtgaaaacatgtaagttgtatatatttgctca

SEQ ID NO: 1538 - protein, 255 aa, Homo sapiens [sequence omitted]

SEQ ID NO: 1539 - DNA, 1588 bp, Homo sapiens
  source
  (1)..(1588)
  CDS (201)..(1388)
ttccatcttgtacacctggctctgccttctagatagcagtagtaaaattagtgaaagtactaaaagtctctgatatgcaaaaataatggcataagctgtctctctctctccctctctctctctctgccttggctgccaggcagggaagggccccctgtccagtggacacgtgacccacgtgaccttacctatcattggagatgactcacactctttaccctaccccttttgctttgtatccaataaatatcagcgcagcctggcatttggggccactaccagtctcctgctttgtatccaataaatatcagtgcagcctggcattcggggccactaccggtctccgcgtcttggtggtagtggtcccccagacacagctgtcttttctttcatctctttgtcttgtgtctttatttctacactctcttgtctctgcacacggagagaaacccaccaaacctgtggggctggaccctacactattccaggtagttgttggaatcctggggaatttttcactcttatattattatatgttcctttactttaggggatacaagccaagatccacagatttgattctcaggcacctgactgtagctgactccttggttatcctatctaaaagaatcccagagaccatggcaacttttgggttgaaacattttgacaattattttggatgcaaatttcttttgtatgcacacagggtaggcaggggtgtgtccattggaagcacctgcctcttgagtgtcttccaggtgatcaccatcaaccctaggaactccaggtgggcagagatgaaagtaaaagccccgacatacattggtctctccaatatcctgtgctgggccttccacatgctggtaaatgccatttttcctatttatacaactggcaaatggagcaacaacaacatcacaaagaaaggagatttgggatattgttctgccccacttagtgatgaagtcacaaagtcagtatatgcagcattgacatccttccatgatgttttgtgtctggggctcatgctctgggccagcagctccatcgttttggtcttgtacaggcacaaacagcaggtacaacacatctgtaggaacaatctctaccccaactcttctcctgggaacagagccatccaaagcatccttgcattggtgagcacctttgcattatgttacgccctttccttcatcacctacgtttatttagctctcttcgataattccagttggtggctagtgaacactgctgcactaatcattgcctgttttccaactattagcccttttgttctcatgtgccgtgaccccagcagatccaggctctgcagtatctgctgcagaagaaatagacgattctttcatgatttcaggaaaatgtgaattggctgtcttggtttatgttcggccactgatgcactcagacctcaagggatcttaagaatgattatcagccaatttcactgcagagagaggggtgaataagacagagacttatccaatgtgaaatactaaataataatagccatagtaaatgaaatcttatgtaattaacatgtgagtacttatatagttgtattttt

SEQ ID NO: 1540 - protein, 395 aa, Homo sapiens
MTHTLYPTPFALYPINISAAWHLGPLPVSCFVSNKYQCSLAFGATTGLRVLVVVVPQTQLSFLSSLCLVSLFLHSLVSAHGEKPTKPVGLDPTLFQVVVGILGNFSLLYYYMFLYFRGYKPRSTDLILRHLTVADSLVILSKRIPETMATFGLKHFDNYFGCKFLLYAHRVGRGVSIGSTCLLSVFQVITINPRNSRWAEMKVKAPTYIGLSNILCWAFHMLVNAIFPIYTTGKWSNNNITKKGDLGYCSAPLSDEVTKSVYAALTSFHDVLCLGLMLWASSSIVLVLYRHKQQVQHICRNNLYPNSSPGNRAIQSILALVSTFALCYALSFITYVYLALFDNSSWWLVNTAALIIACFPTISPFVLMCRDPSRSRLCSICCRRNRRFFHDFRKM

SEQ ID NO: 1541 - DNA, 1989 bp, Homo sapiens
  source
  (1)..(1989)
  CDS (201)..(1071)
  CDS (1722)..(1789)
gtgctctttaaaggttacgcattcaactctcaaaagcctcttaagagaagagtgactttaagtatttctaagggcagagcaatgggaggtggagaatgctgggttgcaggtgacactataaacgtagctcatgcctcctatttccatgcaggacctcccagccctgaagacaaacatcagtgacagacatcagtggcagaatggcctcccggtatgtggcagtgggaatgatcttatcacagaccgtggtgggagtcctggggagcttctctgttcttctccattatctctccttttactgcactgggtgcaggttaaggtccacagatttgattgttaagcacctgattgtagccaacttcttagctctccgctgtaaaggagtcccccagacaatggcagcttttggggttagatattttctcaatgctcttgggtgcaaacttgttttctatctccatagagtgggcaggggagtgtccattggcaccacctgcctcttgagtgtcttccaggtgatcacggtcagctccaggaaatccaggtgggcaaaacttaaagagaaagcccccaagcatgttggcttttctgttctcctgtgctggatcgtgtgcatgttggtaaacatcatctttcccatgtatgtgactggcaaatggaactacacaaacatcacagtgaacgaggatttgggatactgttctgggggaggcaacaacaaaatcgcacagacactgcgtgcaatgttgttatcattccctgatgtgttgtgtctggggctcatgctctgggtcagcagctccatggtttgcatactgcacaggcacaagcagcgggtccagcacattgataggagcgatctctcccccagagcctccccagagaacagagctacgcagagcatcctcatcctggtgagcacctttgtgtcttcttacactctctcctgccttttccaagtttgtatggctcttttggataatcccaatagtttactggtgaacacttcagccttaatgagtgtatgtttcccaactctcagcccctttgttctcatgagctgtgaccccagtgtatacaggttttgttttgcctggaaaagatgacaagatctcctaacctcatcataaacatgtacattgtatatatttgctcatggttcaattgatgacttactcttctgtgccgcaatgtaatcttaattatgaacctctcccaattatgagaaggtgatgaacaagacagggtgaacttccaccccaatgataaacaataactagtaagaacaattgtaaatgaaatatgatgcaattattatgtaaatattcatattatcaaagttttattaaggcctgcagtagagtcattaaaggtctacgcaattaaaaaaattaggtcctgaatcaatctggcaatgatggggatctctttgagtgtgcaaccttcgatctgatataataaatctatgcagaaattaagtaagcgtgagattgttgaaaaagttacatgacaagtagcagtgtgtgatatgaccattcaggaaagtgaagaaaaaaatgttctcctgaagtaatgaggttgcttggaggcgaggttttggttaattccagatttgggtcccaagttataaaatctgtacgttacatcctcagacagataatagtaatttaaaatataactatatggagggaaatcagtatatttaaatcattttcatgtagaaatggttacactgatcaagaatgagacaaaaaaatatatttatgccaaaattaaaaacatcatgtgaatgctgactattaaaaagcagatgctgactgggcgtgctggctcatgcctgtagtcccagcattctgggaggccaaggcgggaggatggcttgagcccagcagttcgagaccatcctgggcaacgtgtcggaacctcatctctactaaaaatatgaaaaaaattacctaggcatggtagcacatgcctgtagacccaggt

SEQ ID NO: 1542 - protein, 312 aa, Homo sapiens
MASRYVAVGMILSQTVVGVLGSFSVLLHYLSFYCTGCRLRSTDLIVKHLIVANFLALRCKGVPQTMAAFGVRYFLNALGCKLVFYLHRVGRGVSIGTTCLLSVFQVITVSSRKSRWAKLKEKAPKHVGFSVLLCWIVCMLVNIIFPMYVTGKWNYTNITVNEDLGYCSGGGNNKIAQTLRAMLLSFPDVLCLGLMLWVSSSMVCILHRHKQRVQHIDRSDLSPRASPENRATQSILILVSTFVSSYTLSCLFQVCMALLDNPNSLLVNTSALMSVCFPTLSPFVLMSCDPKMVTLIKNETKKYIYAKIKNIM

SEQ ID NO: 1543 - DNA, 1027 bp, Homo sapiens
  source
  (1)..(1027)
  CDS (201)..(827)
gagaaaatactatttttttccataaaaccataagggtgtgggcagtgtaaacctaaaattatgcacgagagcttccccatcgctctgtgtgggtagagaaacactccagcgtgtctgctctcttggtgctgggaatctgtgagaattcctgagcccgacacacagcgtctcggcttttctcatcagatgcagaccagtgcatgcatagtccagctgggcagcacagaaacagcgagaggccactggctcccaaaccaaagctgggcccttctggctttggaggaccctctggggatggctgtggtcagcacagctctttccttctctgctctcacagctgtggtgccggtggtctttgtgaagcacggagactcccccagtcaaggccaacggctggactcagctgcgtcatctccctcaccccgagcttcctctgctccttactcttcactggccgtcccaacacggccacctgccccccagcaaaccacatgagtcgtgtgcactgtagctgcgtccacagacttgccctcatccctcactgtggtcctggctttcaaggccattgcacctgggaggagactgaggtgttggctggtgtcagggcctctgcatctttcccatttgctcctgatccaagtgactctgtctgcggggtctggctgggaacctctcccccatccactgccagaggctcacattctgagcccagatacatcctggtagtctgcgtcctgggatacctgagctccttggccctgggaagcttcagtgtgactttcttggccaggaacctgtctgacacctgcgtggagccaagtccctgacgttgagcgagagttctgcagtgtctgggtcaccttccttcccatccgccaagggcaggtctcctccatcttggcccctagggtggggatcccaggctgcatctttgccccccgccctccccgcccagtgctacattaccctcaccgtaggctcaggcctgataggaacatcctgcaagggccggggaataagatactta

SEQ ID NO: 1544 - protein, 208 aa, Homo sapiens [sequence omitted]

SEQ ID NO: 1545 - DNA, 1141 bp, Homo sapiens
  source
  (1)..(1141)
  CDS (201)..(941)
ggaggaacaggctctgactttggattccgcttccctggaaagggcgttgatttgttcagcgttctgcacggttcaggtcaccccgggggcagtggagagggcagcctgggcctccctgtgacttgacagcacagagaggtccatcctggggtcaggagctctgcccatgcccctggcgtcttcccctgcagtgcagaccaatggggcaagttgcgagtgtggactgtactcctccctccttgcagactgagctcctccctccctggggaccgcgctcctccctccctgcggactgtgctccctgtctggggactgcgctcctccctccttggggaccgtgctcctccctccctccctgcggaccgcgctcctccctccctggggaccgcgctcctccctccctgcggaccgcgctcggccctccctggggaccgcgcccctccctcccagcggaccgcgctcctccctccctggggacctcgctcctccctccctccctgcggactgtgctgctccctccctgcggactgtgcttctccctcccttggagcagcctggacttgccagagctctgccaggtggggcctggccgccctttcccaggccctgcagtggccttgtcctttctcacctgtttccactcctgctgtccccgttgggccctgggcttcgtcctcttgctcaagccctttgttctgaacctgcgtggcagccgggactgggggatccccagcaaagagctctggcttggggctcagaaagagggtcatcgggtcctcgtgggatgcccgggctctgggccacctcccctccctccgcccagcctccctgcctccatctccgtccagggcagccccgggccctgctccccactgctaagtgtgtctgctgagcgctggcccccattgagtcctgagggctggggccgggggccgggttagtgaggtcagcgtcttgtccgagaggtccctgtgacagcccgggatgagccacgggtggagggcagtggggccttgcccaggggaggaccccactcttcctgcagggacctcccctgcgccggctcccagtccctggcactgcgcccacccagggctgtcagcctccaccttcagaggccggcccgggaaacccttccaaa

SEQ ID NO: 1546 - protein, 246 aa, Homo sapiens
MGQVASVDCTPPSLQTELLPPWGPRSSLPADCAPCLGTALLPPWGPCSSLPPCGPRSSLPGDRAPPSLRTALGPPWGPRPSLPADRAPPSLGTSLLPPSLRTVLLPPCGLCFSLPWSSLDLPELCQVGPGRPFPGPAVALSFLTCFHSCCPRWALGFVLLLKPFVLNLRGSRDWGIPSKELWLGAQKEGHRVLVGCPGSGPPPLPPPSLPASISVQGSPGPCSPLLSVSAERWPPLSPEGWGRGPG

SEQ ID NO: 1547 - DNA, 1198 bp, Homo sapiens
  source
  (1)..(1198)
  CDS (201)..(998)
ggccgccaccgccgtgtccccaggcagctgcgtgcccagcctgtacgtgcgcaagcagcgggcgctggaggccgagctggacgcacggcacctcgcgcaggcgctggagcacctggagaagcagggcccgccggcagccgaggccgccactaagaagccgctgccgcccctgcgacacctggacggcctggcccaagactatgcttccgattcgggctgctttgacgacgacgatgcaccgtcatccctggctgcggccgcggccaccggggagccagccagccctgccgcgctgtccctcttcctgggcagccccttcctgcaggggcaggcgctggctcgcaccccgcccacccgccgaggcggcaaggaggcagagaaggacaccagtggggaggcagccgtggcggccaaggccaaggccaagctggcgcttgcagtggcgcgcatcgaccagctggtggaggacatctccgccctgcacacctcgtccgacgatagcttcagcctcagctctggagacccgggacaggaggcgccacgggagggccgcgcccagtcctgctcgccatgccgcggcccggagggcgggcggcgagaggcaggaagccgggcgcacccgctgctgcggctcaaggcggcccacgccagcctctccaacgacagcctcaacagcggcagtgccagcgacgggtactgcccacgcgaacatatgctgccctgcccgctggccgcactggcttcgcgccgcgaggaccccaggtgtgggcagcctcggcccagccggcttgaccttgacctgcccggctgccaggccgagcccccggcccgcgaggccacctccgccgacgcccgcgtgcgcaccatcaagctgtcgcctacctatcagcacgtgccactgcttgagggtgcctcaagggcgggtgcagagcccctcgcggggcctggaatctctccaggggcccggaagcaggcctggctgccggcagaccacctgagcaaggttcccgagaagctggcggctgccccgctgtctgtggccagcaaggcactgcagaaactggcggcgcaagaggggccactctcgctgtcccgatgcagctccctttcctcgctgtcctcggccggccgcccaggccccagcgagggtggtgacctggatgacagtgactcctccctggaggggctggaggaggcc

SEQ ID NO: 1548 - protein, 265 aa, Homo sapiens
MLPIRAALTTTMHRHPWLRPRPPGSQPALPRCPSSWAAPSCRGRRWLAPRPPAEAARRQRRTPVGRQPWRPRPRPSWRLQWRASTSWWRTSPPCTPRPTIASASALETRDRRRHGRAAPSPARHAAARRAGGERQEAGRTRCCGSRRPTPASPTTASTAAVPATGTAHANICCPARWPHWLRAARTPGVGSLGPAGLTLTCPAARPSPRPARPPPPTPACAPSSCRLPISTCHCLRVPQGRVQSPSRGLESLQGPGSRPGCRQTT

SEQ ID NO: 1549 - DNA, 892 bp, Homo sapiens
  source
  (1)..(892)
  CDS (201)..(692)
cgaactcctggggtcaagtgatcctcccacctcagcctcccaaagtgctgggattacagatgtgagccactgcactcagcctgaaaagtcttcacaaagaataaagttgggaagaatttggtgagcagttctcaaaacataccacaaagcagcaatcatcaaacaatgtgttatgggaacaaggactcacaaagcagtcaatgaaatgtgagaccccagaacacactgttcttttttttttttttccaagacagagtctcgctttgtcacccaggctgaagtgcagtggcacaatcctggctcactgcaacctccgcctcccaggttcaaacgattatcctgcctcagcctccccagtagctggggttacaggcgctcgccaccacgcccggctaatttttgtggtttttcttttttcttcttttttgaggcggagtctcagtctgtcacccaggttggagtgtggtggcgtgatcttggctcactgcaacctccgcctcccgggttcaagcaattctcctgcctcagcctcccaagtagctgggattacaggtgcccaccgccacaccaggctaattttttgtatttttagtagagacggggtttcaccatgttgtccaggctggtctcaaattcctgacctcgtgatccgcctgactcggcctcccaaagtgctgggattacaggcgtgagccaccacacccacccagattgttctacttctagacctcgctacaatgctgacagttccatgatagagtgaataaagatacgttaggctgggcgcggtggctcacacctggaatcccagcactttgggaggccgaggtgggtggatcacctgagctcaggagttcaccatcaccctgggcaacatgacggaaatactgtc

SEQ ID NO: 1550 - protein, 163 aa, Homo sapiens [sequence omitted]

SEQ ID NO: 1551 - DNA, 1084 bp, Homo sapiens
  source
  (1)..(1084)
  CDS (201)..(884)
ccagtctcatgtaggcaccatcatctcccacctggactggtggcgtaccctcctcactggcctgcctctcaacttcctgcaatctattcaccccacagctagagagatgtttaaaacacaaataagatcatatcactcctgctcaaaatcctcctattaggatatgtaataacagcaaacatttacatagcacttactatatgtttggcattctggcaaatgtgttatatatatgcagtttatttatttttattttattttattttttgagtcggagtctcgctctgtcgcccaggctggagtgtaatggaatgatctcagatcactgcaacctccgcctcctaggatcaagcgattctcctgcctcagcctcccaagtagctgggattacaggcgcccaccgccacacccagctggtttttgtatttttagtagagatggggtttcaccatgttggccaggctggtctcaaactcctgacctctggtgatctgcccacctcagcttcccgaagtgctgggattacaggcgtgagccaccacatccagcctatatatgcagtttatttaaataaaaatacaaaactctctactgttttccacaaggtcctgcaccattcagcccccataacctctctctcctctgttcactggactttgatgaagtctctttgctgttactcaaacaggccacctcagggcctttgcacttgctgttccctcttcttggaatgcccttctctttgttcttttgcaagtcacccctgcttatccttcaggtccccattaaaatgtcacctttggccaggtgcagtgcttcatgcgtgtaattccagtatttttcagaggctaaggcaggatgatgacttgagcccaggaatttaagaccagcctgggcaacatagggagaaccctctctaccaaaaaaaaaaaaaaaaaaaaaagaaaattgaaaattagttgggcatggtggtatgtgactgtggtcccagctacttgagaggctgaggcaggaggatcgtttgagcccaagagtttgaggctgcagtgagctgtgatggcaccactgcaatctagcctgggtg

SEQ ID NO: 1552 - protein, 227 aa, Homo sapiens [sequence omitted]

SEQ ID NO: 1553 - DNA, 886 bp, Homo sapiens
  source
  (1)..(886)
  CDS (201)..(686)
tgatcaagctcttgcaggctttcccctctcaccttaggctagctcactcatacccatcaccccagcgtctccgcagagcctaggtggtaccgcctttaagcccatatgagggcctttgaacatctaccccagctcttcctgggccatcttgttctggtctctgctcccctgctgtcatcacagagaggccctcactgatcatgcacatgagcagctctcactctcagctccaggcactgtctgtgtcacctccttgcttacttcctgcagtcctgccttctgtcttgctcaccttgcacactgtctgcaggtggttgaatagagtgctggaggcctgccttcttggctttgcagggcttggatttgcaaactggtcccctggagcaccttccagggaggtctcctcctacctctctccctgcagtagccaagaggggagcaaagtctccctccacagatgcatctgcctagcacttaggtgccaggcgtactcactctacctggattgggggcaccaaccccggagcctgccttcttccatgcccccatgtggtgtcttgtactcctctccctccctgtccctccctaccccaggtgcagccctgcccttgtgtaaatgtctcctccagttacaagggccaggcaggtaccatacagttttcaatgcacccaatattgagggataaatcacaaccagtcctcagcttcgtgttctagaagacaatgggagctgggagcaaccacggagaagctgcagaactcaggccctgtctaaaccggggtctccacatcactcctcatggttgctgcctaggagtgcagctgttatggtctgacaatctgattgtctgtgtggtgtgtgcatgtgtgtgtgtgtaacctccaa

SEQ ID NO: 1554 - protein, 161 aa, Homo sapiens [sequence omitted]

SEQ ID NO: 1555 - DNA, 938 bp, Homo sapiens
  source
  (1)..(938)
  CDS (202)..(738)
  modified_base (96)..(195): a, t, c, g, unknown or other
  modified_base (845)..(938): a, t, c, g, unknown or other
tggtctttaaacgacaagcccacgggaattaaccacgggacgtgcaattagaaccgaaaggtctggccccggaggtggagatacgccagttgctcnnnnnnnnnnnnnnnnnnnnnnnnnnnnnnnnnnnnnnnnnnnnnnnnnnnnnnnnnnnnnnnnnnnnnnnnnnnnnnnnnnnnnnnnnnnnnnnnnnnnataagcggaaaccttttcggcaaacatctgacgagtggcatcgatacgcgtctggaaatcagcacgcacatctttcggaagcttttcgtaagggttgccgtcgaccttgcgatcgccgctgtaaatcagcgtgacctcaacgccgttagttttgagcgcagcgccatagttactgtgcgccatcatgaccccaatggagccggttctggccgtttgtgtgaccagccgtcgcgatgccgaactggcaataagctgacctgcactgcagttcatgtcattggccagcgcccagatgggtttgatatcgcgcatacgggcaataatgtcggcgcagtcaaacgccccggacaccattccacccggcgtatccatatccagaagaatgccgtcaacgccggggtcactgattgcctgctgcaggcgagcaatgatcccgttgtaacccgtcatcccggaataaggctgaagcgcacgggttttactgaccagcgtgccggaaaccggcaagaccgcgataccatttgccacctgatagctgcgtgatggacggggatccatgtcatcatcctcaccaaacagcgccagcggttcggctatttgtccggcatcaagcgtgatgccagagacggtatctgtcagccgggtgatgnnnnnnnnnnnnnnnnnnnnnnnnnnnnnnnnnnnnnnnnnnnnnnnnnnnnnnnnnnnnnnnnnnnnnnnnnnnnnnnnnnnnnnnnnnnnnn

SEQ ID NO: 1556 - protein, 178 aa, Homo sapiens
GNLFGKHLTSGIDTRLEISTHIFRKLFVRVAVDLAIAAVNQRDLNAVSFERSAIVTVRHHDPNGAGSGRLCDQPSRCRTGNKLTCTAVHVIGQRPDGFDIAHTGNNVGAVKRPGHHSTRRIHIQKNAVNAGVTDCLLQASNDPVVTRHPGIRLKRTGFTDQRAGNRQDRDTICHLIAA

SEQ ID NO: 1557 - DNA, 865 bp, Homo sapiens
  source
  (1)..(865)
  CDS (201)..(665)
aattaaccgggtctggtgacacatgcctgtaatcccagctactcaggaggctgaggtaggagaactgcttgaactcaggaggcgggggctgcaatgagctgagatcaagccactgcactccagcctatgggatagagtgagattccatctcaaaaaaaaaaaaaaaaaaaaaaaagtttaaaaaaccctacccctgccaaatgcttttccgaagtagccgtgccattggtgtttccaactttgcctggcaccttccatcgtttgctaagttccagcaggtgtatttcatttgcatttccctcatgaataatggtgttgagcagcttgccatggtgcctttgctgcctgtgacctctttggtgaaacatccggaggtgtcttctgcccacgtggaggcgcagcctgggctctgccgcccacctttcacccgaggagcctgcagcacgtggagagcatcagggtgtgctttctttacagtttggggcttttttgagacagggtctcgctctgtcacccaggctgcagtgcagtggtgccatcacggctcaccgccagccttgaccttcacctcagcctcccaagtagctgagactacaggcatgcaccgccatggctggctcttttttaatttgtctttttctaaagacagggtctcactgtcttgattaagctggtcttggaactcctgggcttcaagggaccctctcagctcggcctcccaaagtgctgggattgcaggtgtgagccatcatgcaagtctggggttgttttttttttgctaaacaggatgaatagaaatctcttttgggggatctcttagtccaaatcctttagctgaatgcgcgtgtcccggtgaggctgctcc

SEQ ID NO: 1558 - protein, 154 aa, Homo sapiens
MLFRSSRAIGVSNFAWHLPSFAKFQQVYFICISLMNNGVEQLAMVPLLPVTSLVKHPEVSSAHVEAQPGLCRPPFTRGACSTWRASGCAFFTVWGFFETGSRSVTQAAVQWCHHGSPPALTFTSASQVAETTGMHRHGWLFFNLSFSKDRVSLS

SEQ ID NO: 1559 - DNA, 898 bp, Homo sapiens
  source
  (1)..(898)
  CDS (201)..(698)
aaatacttcccccaaagtctgttttctttcttcttctacagagtttaatttgcgagtctttgatatacaccatgccctggataaactatttccagctctggaacaattcctgtctggaggccgagcatgtgggcagaaacctcagatgagggctcatatgattgagttgtgcactggctgttattaaactgtaaaggatcatgtctccctcattggggtcttattacacatgcacacacacacatgcacacacagagtgtacacgtacacacacttgcacatacttaccttcacaacccacacacacaatgctcatactcacgacaccctcacactctcaccactcacatacatgcacattcactttaacagcctcacacactcatccacccgcccacccactcactcctacatgtcaagcacatgcacactcactcgcacacacattcagtggtcttcaggggttggtgcaatcttttctttcttttcctttctttctttcttttttttttttttttttgagacacagtcttgctctgttgcccaggctggagagaagtggcgcaatcactgaagcctccgctaaagtggagctcactgaagccttgacttccccgggctcaagtgattctttcaccttagcctcccaagtagctgagattacaggtgcacaccgctttgtccagctaattttttaaaacactttttttgtggagacaatatctccctttcttgcctaggctggtcatggactcctgggctcaagtaatcctcctgcctcagtctcccaaagtgttgggattataggcgtgagctaccgcacccacccagctgatgcaattagaacagaatgttcataatcattggggaaacctcatcattctttctacgccacccc

SEQ ID NO: 1560 - protein, 165 aa, Homo sapiens [sequence omitted]

SEQ ID NO: 1561 - DNA, 871 bp, Homo sapiens
  source
  (1)..(871)
  CDS (201)..(671)
ggtccttgaaagaaattataaaatattgaatgttaaattgcaagatccatgtgctgctcacaactttgacttaagattccaccccctttttaaaaaatgagacccattttttcactagtaaaattattagctacttaaagtgaaagataccatcaaaaaagtacctgctacttgattccatttatacaaaattctagaaaatgcaaattatagtgacagacagtaaatcagtgatggcctttgaaaaaagggcagggaggaatgggttacaaaagggcacaaagaaacttcaggtgatgatacaaatgtttatcatcttaattatggaggtggtttcgcagatgtgctcatatgtcccaactgatctaattttacattttttttttgttttttattttttgacactgagtatcactctgtcgcccaggcaggagtgcagtggcacaatctcggctcactgcaacctcctcctcccggtttcaagtgattctcctgcacctgtagctgggattacaggtgcccaccgccacacctggctaatttttatatttttagtagagatgggtttttaccatgttggccaggctgttctcaaactcctaacctcaggtgatctacctgcctcagcctcccaaagtactggcattacagggatgagccaccgtgcctagcctaattgtacattttaaatgcatataatttattgtatgtcaaatatacctcaaaaaagctgtttcagattgttagctagaaaataatgtaaacaaaaaaccctaataagtggctatagtcatttaaacactaaatgaaaaatcatctctccatagctttatcgtagatagactaacattataaaactgtcctagctgac

SEQ ID NO: 1562 - protein, 156 aa, Homo sapiens [sequence omitted]

SEQ ID NO: 1563 - DNA, 1066 bp, Homo sapiens
  source
  (1)..(1066)
  CDS (201)..(866)
caccatggcctgtctcccaatcaactctccactcttgccctttgctatgcagtctcactgcctcccagtatgcacatgcagtctcactgcctcccagtatgcacatgcatgcacacatgcagacacacacagacaaaggcacataaacacatgcacacaggcagacacatgcaggcaaacacacacacacacatccacacatgcaaacatgcaggcaaacgtacacacacacgcatccacacatgcaaacatgcaggcaaacgcacacacacatgcagacacacgcaggcaaatgtgcacacacacatgcacacatgcaaacatatgcatgcaaacacgcacacacatgcacacatacaaacgcacacacatgcatgcacacgtgcaaacataccacacacatgcatgcacacatgcaagcaaacgcacacatatccacacatgcaaacacacaggcaaatgcacacacacatgcaaacacatgcaggcaaacgcgtgcacacacacacatgcacaaatgcaaacacatgcaggcaaatgcacacacgtgcatgcaaacatgcaggcaaacacacacatgcatgcaaacatgcaaacatgcaggcaaacgcacacacgtgcatgctcacatgcaaacacatgcacacaaacacacacacccatgctcagaatcaccagcagatgcttttttcttttttttttttcgacaagagtttcactctgtcgccaggctggagtgcagtggcttgatctcagctcactgcaacctccgcttccaaggttcaagcaattctcctgcttcagcctcccaagtagctggaactacaggtacgcatcgccatgcccagctaatttttgtgttttgagtagagacaggttttcaccatgttggccaggatggtcttgatctcttgacctcgtgatctgcccgctttggcctcccaaagtgctagggttacaggtgtgagctaccgcgcctggccgcagatgctcattttgtttgtttgtttggggtagggttttgctctgccacccaggctggagtgcagtggtgggatcacagctc

SEQ ID NO: 1564 - protein, 221 aa, Homo sapiens
MQTCRQTYTHTHPHMQTCRQTHTHMQTHAGKCAHTHAHMQTYACKHAHTCTHTNAHTCMHTCKHTTHMHAHMQANAHISTHANTQANAHTHANTCRQTRAHTHMHKCKHMQANAHTCMQTCRQTHTCMQTCKHAGKRTHVHAHMQTHAHKHTHPCSESPADAFFFFFFRQEFHSVARLECSGLISAHCNLRFQGSSNSPASASQVAGTTGTHRHAQLIFVF

SEQ ID NO: 1565 - DNA, 23579 bp, Homo sapiens
  source
  (1)..(23579)
  CDS (201)..(292)
  CDS (7942)..(8265)
  CDS (23298)..(23379)
ccaccacgcttggctaaatttatttttattttattttctatgtttttatagacggggtctcacttattgtccaggttggtctcaaactcttgagctaaagtgatctgcctgcctcggcctcccaaagtgctgggtttacattacaggcgtgagccaccgcgcccggcctaagtggtttctctttgaacttaaaatgaaacatgaactttcttttggcctttgagatttggcccttgcttgcctctccgacccctgttaacttcgctgccccgctgtgcaccgaacgcagcaggtgagttcctgctgcaggaacccagcaggagctgtcttggacactgctgccacagcttgctgcttcttttcctgggaaggaaatagccactggtttttgtaccttcgatacaggtagccactggtcatctgtggctactgagtacgtgaaatgtgtctagtgcaacctagaaactgaattttcaaatttaattttaattaatttaaatttaaaatgtaaaactgaagcaatataaaaatattcttcctcttaaacacaactttttagttagaactacattttatgcttgtcaaaactgagcattggaatgagatgtgctgtaaactatgcaccagatttcaaagatttagcacaacaaaaataaattatttcaataactttttaaattaatcacatattgaaatgttaacattttgaatacactaggttaaataaaatattacaattaattgcaccttttttttttttaaatatggttatcaactgggtgtggtggctcatgcctgtaatcccagcactttgggaggcctaggcaggcggatcacctgaggtcgggagtttgggaccagcccgaccgacatggagaaacccgtctctactaaaaatacaaaaattagcccagcatggtggcacatctgtaatcccagctactcccgggaggctgaggcaggagaattgtttgaaccggggaggtggaggttgctgtgagtggagattgcgccattgcactccagcctgggcaacaagagcaaaactctgtctcaaaaaaaataaataaataaagtggccataagcaaatttaaaattatgtagctcacatcacagttcttttttttttttttttttttttttgagagccagtttcactcttgtcgccctcccaaagtgctgagattacagatgtgagccaccgcgcctggcctcacattgtatttctattggacgctgctgctctaggttactgagtttttcactctatttaaatgctacttccttacagaggccttcccagaccactcttcccttcagtctcattaccgtgctgtaatttctttgcactctttaacatctgaatttatttacctatttattgatttacttgctgttcacctgttttctccacaagaatgtaaactccatgagaccaaggataagatatatctttcttattcactgctatgttcccagtgcttagcatataaatatatttgtcagttatatatttttatctgtcaataatctcatcttgcttgttcactttacagccaacaaaataggcctagaaaagagcagggactttcaagatcacacagtgccagatcctacctcctaatacctaatccagtgctccttgctttggttacagttgatatgataaactgaggcacactaagacaggaataaggtgtgcatttcagcaatgcctcagtccagtatttcccaaagtgggaacctgtgttaatggtggtatgattttaggtggtacgtgaatgttaaatgatcctgaattatacaataaaaaaggattcttttttcaatctttttcaacttgaaagggtcagtttggtgctaacgtgtccttagtgcctttctaacactttataatctgccttttttgtttgtttgtttgtttgtttttgagatggagtcttgctgtgtcacccaggctggagtgtagtggtgccatctcggctcactgcaaccttcatctcccgggttccagtgattctcctgcctcagtctcccaggtagctgggattacaggcgtgcaccaccacgcccagctaatttttgtatttttagtagagacggggtttcaccatgttggctaggctggtctctaactcttaacctcaggtgatctgcctgcctcagcctcctgaagtgctgggattacagttatgagccaccgtgcctggcctaatctgccttttattttttgttttattttatattatttttgagacggagtctcgctctgtcacccaggctggagtgtagtggcacggtctcggctcactgtactctgcctcccgggttcacgccattctcctgcctcagcctcccaagtagctgggactacaggcgcccgccaccacctccggctaatttttgtatttttagtagagacggggtttctccgtgttagccaggatggtcttgatctcctgaccttgtggtccacccacctcagcctcccaaagtgctgggattataggcgtgagccaccgtgcctggccattatgccttttaacacagagatttaggcctcaaatttagagcctttggtaggcaataccatccattcacccagaatttactaacaatgttttaacttccccccctccgcttttgtttttttttgagacagtcttgctctgtcgcccaggctagggtgcagtggtgtgatcttggctcactgcaacctctgccttccaggttcaagtgattctcctgcctcagtctcctgagtagctgggattacaggcgtgcagcaccatacccagctaatttttgtatttttagtagagatggggtttcaccatgttggtcagactggtcttaaattcctgacctaaggtgatccaccctccttggcctcccaaagtgctgggattacaggtgtgagccactgtgcccggccaactttacttatttttatagttaccttctatttatggtaagtgatactagttttctatcataattatatacagttgacccttgaacaatgcaggggttaggggcacaaactctttacacacagtcaaaaatcctttttttctttgagacagggtcttattctgttgcccaggctggagtgcagtggtatgatcacaagtcactgtagcctcgatatcccaggctcaagcgattctcctacttcagcctcctgagtatctgggactacaggagcacaccaccacacccagttaattttttaaattttttgtagagatgaggtttcatcatgttgctcaggctggtcttgaattcctggactcaagtgatctgccaacctcaacctcccaaagtgctgggattataggtgtgagccaccgtgcctggccctcatattatttttgactcctcaaaaacttaactactaatagcctactgttggccagaaggaagccttactgataacataaactgtggattaacatctttttatgttatatgtattatatactgtactcttataatcaagtaaactggctgggcatggtggctaatgcaggtaatcccagcagtttaggagacagaagcagcggattgcctgaactcaggagtttgagaccagcccgggcaacaccgcaaaacctcatctctactgaaaatacaaaaatctgccaggcatggtggtgcacacccgtagtcctagctgcttgtggggctgaggcaggaggatcacttgagcctgggaggttgaggctgcaatgagccgagatggtgccactgcactccagcctgagtgacagagtgacaccccatttctaaaaaaaaaaaaaaaaaaaaaaatgaagtaaactagggaaaataaaatattaagaaaattattggataagtagagatcgattataagaaaatataaggaagtgaaaatacatttacagtactgtactgtatttattgataccgtaagtttacttcatctgtttacaagatgtattgtctgtctgaaatagtaagcaaccaaagcttcagacctcaacctatagtatcaatcaagtaattcaagcaactttttcttgtaatgtcatgactcttctttgcttcttgggaacacttccagaatcactagtagcacctagtatgggtcccttggtactactcaaggtttacaatattgcattaaacacattgaaaaatacacgagaaccttgagggatcacattttactgcaatatgtgatttcctggtgagactccttgtgcagagatgattagctcacagagcgttgtaagcacgtactcgcaacacctgagcatgccgcaatggcaacaggaggtatcttcacaattatgatggtagtacagtatgtactgcagttgtttacacagttatgatttagtactacatctttacatttggttattttctttctattttgaatggtatgtactgtctgtgtgtacatatgttttgggaaattttaattttttataatagatttatgtatattgtatgatagcaagtgataaaatagactagtatctacatatattttatgcattaatgacatacttttttttcattttttaaatatttctaggtaacaagattcacctgttttttctaattgtcaatcttcaaaaatattttccaatttaaaaagtcagctgggcaaggtggctcacccctgtaatcccagcactttggtaggctgaggcaggtggatcacctgaggtcaggagttcgagaccagcctgacaaacttggcgaaaccccatctctactaaaaatacaaaaacattagctgggcatggtggcatgtgcctgtaattccagctactcgggaggctgaggcatgagaatcgcttgaactcgccaggtgaaggttgcagtgagccaagatcacgccaccgaactctggcctgggcaacgagagcgaaaactccatctcaaaaaaaaagaaaaaaaaaaaaagacataaaataaccaatgtataagtggacccatgagttcaaacacatgtgttcaagagtcaactgcattttttaagttttaattttttgttgttgttgttttgagacagagtttcactcttgtcaccaggctggagtgcaatggctcaagctcactgcaacctccacctcccgggtacaagcaattctcctgcctcagcctcccaagtagctgggattacaggcgcccaccaccacgcctggctaatttttgtatttttagtagagacggggtttcaccatgttggccaggctagtctcgaactcctgacctcaggtgattcacccaccttggcctcccaaagtgctgggattataggcgtgagccaccgcatccggcctaagatttaattttaaacaaatatgttaaataaataggtggaactcagatatggcaaagttataaatgtggttctgaaatgactgaggtttgggaaacaccacattcatccaaaagtatgagtgatggtgaaatttcaggcaggggctaactagtagaggaagctgcttttcgtaacctattttgctcagtggacttcagctccctgggcttctgtgggtgtctggctcagagctcaagccaggaagtctttagtagctttcagtttcttttgttaatataggcctgaaaaatctttcatttagttcctagccagaggttgggggtcctccttctttaagtccagtctcaccccaacaatgagaactcccagaacttccctgcccttaccttagaagatcttttcttttctgctgcttttctgccgatctgtttggatttcttgttcagcgcttcaaagagagacaaaaggagcaaagtcagatgtttctggggacgttgagctgcagtgaagtgagaggggcagagggggcttgggaagtcacaaggtcagggagaggagaagaagcgtgctggatgagtcacactgtaggactcaagccagtaggttcttgttagcccggctactgacctggagccaggcactgatagcaacgtgtcctctgagggaaggcaaatgggaaatccaagcaggcactgggatctgcctgtgacactcttgtggggcctggtccctcgacctaagtgagcttgggccactcagagccaccccaggtgccccttccttcatctccattgtggcaggcacaggaacattgtgatacccagaaaatggactcctgtcttgtacacagatgcacctgtgtttcctattttccattcctgagagctctggagccaggaggacctgatttgaatcctgactctgccaatataatgactatgtggctgtgggtaacttacttatcctccatgagactcagttttttcatctgcaaaaaaggttccataatatctgccttgcagtattgtcttgaggataaatgaagtctgtttataaagtgaaaagtctgttacactgaagatcaataaatgttgatgttcctcccttccctgtctgatatgtgtagaatatcctctttctttcttcttcttcttttttttttcttttgagacagagtctcactctgttgcccaggctggagtacagtggtgcgatctcggctcactgtgacttctgcctcctgggttcaagtgattttcctgtctcagcctcccaagtagctgggattacaggcatgtaccaccacacctggctaatttttgtatttttagtagagatggggttttgccatgttggccaggctggtctcaaactcttgacctcaggtgatctgcccaccttggcctcccaaagcgctgggattagaggtgtgagccaccgcgcctggccgattatttatttattaaaaaatttcttttttgagtcagggtctgtctgtcacccaggctggagtgcaatggtgtgatcatagctcactgcagcgtcgacctcctgggctcaagcaatcctcctgcctcagcctcccaaatagctggaaccataggcatgcaccaccattcccggctagtttttgtttgtttgtttttgagacaggatctcactctgtcactcaggctggagtgcagtggcacaatcatggctcattgtaggctcaaactcctgggctcaagtgatcctcctgcctcagcctcccaagtagctaggactacaggcgcatgctaccatgcctggttaatttttgtatttttaatagggacggggtttcaccctgttgaccaggctggtcttgaacacctgagctcaagagatctgcccgcctcagcctacgaaagtgctgggattacaggtgcatgccacgtgccttgctagtttttaaatttttctgtagagacggggtctccctatgtcgctcagtctggtcttgaactcctaggctcaaacaatcctcatgcctccagcttcccaaagtgctgggattacaggtgtgagccacctcacccagcctcaaatatcctcgtttcctagcaaaagccgaggtagtaagagatattagttttgagcttaggttctggagttaagtacctgattttgaattctggctttgccagttaaaaactgtgtgatccgtgctagttacttaattctcctaagcctcaagttcctcaactgtgaaatatgaataaagaccatactcacctcacagtgcctaccacacagtatgtctatgattattatcaggtgaagtcaaaccagatctccaatgccaggctccagtgcccctcatattttcccctgagccttcattcccaaccctgacatgacaggactggtccatcccagacttgcatatgttctggagcatttcctgaagtttgttactgttgacaggagttctgtgattcattaagtttcagaaatgctaaattaaacaaagttcaccaagtgtcttaacttcaggcctttcagagcctctaccatatgctaagctgcttattagactggtggcatgcagagctttcccaaaccaaatgagtcaagggccaccttattctcccaggattatttcctggaacgagcaagaaggagccgtgaccatggcggtggatcctggtagcaccctgggaagcatgcttgatctcctgcagcccctctcctgggccagagcccagaggctaggtgacttacccacaatagagacagaagggacatccagtaggttcacagaggagttgcttctcaggctcctgtcatctcggagcttctcctcaggtggcaggtggctgttggcagtgaagaagcagaggaagaccagcagggtggccaggagtaagcgggtgacatccatcccaggaggcctgagtgggacagagaaggtggtcaggtgggtgggtcaggggtaatggtaagaggccttcctgctttctttgtgcttctttgggctggtgttgtgaccctgttaggcaagtgtcctggtggagctggaggattagcaaggcttaggatggggaaggggaattgatgagggaagaagagagaagagagatgggaagaggaagagagaaagacaaggaacagaaggagattggagcaaagagaaaaagcaatgcattgcactggtctctgctgtccagagggtggtgtgttggctgcttctgtgtgtttttttaatgtctgtggccccaggagaccccaggcctgggcagagttgttgaaaggcccccagtagggcctcacagtagcagagattttattaagatgtacagaataaggctaataaattaagtctcagtgagaaagatgaagaggtaagtggccccttcagacaagcatatatgttggctcatatcctagattcccaaacccagagagaacgaatgcaggtatagtttgtgtcaggaggatggagctgttgacataggccccctggatttatgtatttatttatttgctagctggatttttttttttttagatggagtctctctcttgttgcccaggctagagtgcagtggcataatctcggctcactgcaacctccacctcccaggtacaagtgattctcctgcctcagtctcctgccccagtagctagggctacaggtgcccatcactatgccaggctaatttttgtattttttgtagagacaggattttaccacattggccagactaagcattttatattttctaactctttttattttttttgagacagagtcttgctctgtcagctaggctggagtgcagtggcacgatcttggctcactgcaacctcctcctcccaggttcaagagattctcgtgcctcagcctccagagtagctgggattacaggtgcccaccaccacacctggctaatttttgtatttttagtaaagacgggatttcaccatgttggccaggctggtctcgaactcttgtcctcaagtgatccgccagccactgccactgcacctggcctatattttctaactcaagctcatatagtttttttctgttgtcattgtttgttttgagacagagtctcactgtcacccaggctggagtgcagtggcacaatcttgggccactgcagtctcaacctcccaggctcaagccatcctcccacctcatcctcctgagtagctggcactacaggcatgtgcaaacacacctggctaatttaaaaaaaaatttttttttgtagggatgaaggctcactctattacccaggttggtcttgaactcctgggctcaagtgatcctcccacctaagcctcccaaagtgagccaccactcagccatatttgttcatttgtgtgtatgtgtgtatatatatatacactatatatataatactatatatatagtattatatatatcatatattatatatacactatatatataatactatatatagtattatatatatcatatattatatatacactatatatatactatatatattatatatatcatatattatatatagtatatatatactatatatattttataatatatataatatatatatatagtatgtatatatatatatatatggcatcccccttctaagatattaactcctcaatgacaggggctctccaccatgatttccagctttatattttctcacaggaagtaataaattccatccaagcttggctacttcctggtccccatatgatgcttgtcctttcccactgatcgcagtgcttagcttgctatacaaacatttatttacttatcatttgttaatggtcatcaaagcccaaatgagtgactacagtacttatttgcccttctcacatttcatatggcatttatccagtctggagataagaatggtttttacatttttaaatgattctattaaaaaaaaaaaaagaatatccaacggagaccctatgtgttccacaaagcataaaatatttattatctggccttttacagaaaaagtttgccaactccgtctagattgtaagaatcatgatggattggaataagaacatcatgtttgctccatcaatatctactaaccgatggagcacttaactatttcttttctttctttctctctttttttttttaagatggaatctcactctgttgcccaggatggagtgcagtggtgcgatcttggcttactgcaacctctgcctcccggattcaagcaattctcctgcctcagcctcctgagtagctgggactacaggtgcttgccaccacgcccagctaatttttgtattttttgtagagacaaggtttcaccatgttggccaagctgatctcaaactcctgacctcaagtgatctgcctgccttggcttcccaaagtgctggggttacaggtgtgagccaccgcacccagcccaactatttcttcaggaaaagatattgatgacctttattaaaaggctaatgtgccaataatatttctcattaatttatcagacttcagatttgttttagtacaggactgggtcctaatgagacaagagctaggactggtaaacttggattgtggaggcagaggaaaaattacatcatgaatagttatcataatgttttgaaacttattattatatcatgctgtctagaattcataaagattcaatacagtaacatttggaatagaaatatgaaatatttgtaaactagataatattttagttacataaaattaaatatatatttaaaatttttattctgtatcattgatctcttccaaaagcaatattgtttttaatttttagcttctgattgttgctaaaaagaccatttttcaaataacagcatctagctttaatgggtattaattaggaaggcaaattagaaataaattcaacccggctgggctggtggctcacgcctataatcccagcactttgggaggctgaagcgaatggatcacttggggtcaggagttcgacctggccaacatggtgaaaccccgtttctactaaaaatacaaaaattaaccaggtggtggcctcctgagtagatgcctataaatccacctactcaggaggctgaggcaggagaatcgcctgaacccagggggaggaagttgcagtgagctgagatcgtaccacttcactccagcctgggtgaaagagggaaactgtctcaaaaaacaaaaaacaaaaaacaaaaaaaaaaaagagaaagaaagagagagagaaagaaagaaaaagaaagaaagaaattcaactttaaaaaacaaggaaagtaaaggatggagatgtggtggaatgtggtgggaagctctgattaacaaaaggctcttagcagggagtggcggcacaagactgtgttcccagctactcgggtggctgaggtgggagaatcacctgaccccaggaagttgaggctacagtgagctgtgattgtaccactgcactgttacccagcctgggcaacacagtgagactctatctcaaaaacaaaaacaaatgagctcgattaaggcaagttacaagaggcatgttataaattaggaggcggtacgtgtagttattttgtgtctttgggttttccttaccataaataatatactcatgggccaaaaactgtaatgggaatttctacaaagaagtgagagtggccggaaaatctgagctagaaaaagaggccaggcatggtggctcacgcctataatcccagcactggaggaagccacaggaggaggattccttgatcttaggaatttgagaccagcctggcaacatagagagacctcatctctacaaaaaatttttaaaaaattagccgggtgttatcgggtccagccctactgggtctgtgggttttttctcctcatgtgtggagacgagagatcgtagaaataaagacacaagacaaagagacagaataaaatacagctgggtccgggggaccactaccaccaaggcacagagaccagtaatggccccgaatgcctggctgtgctgttatttattggatacaagacaagggggcagggtaaggagtgtgagccatctccagtgatagataaggttacacaagtcacgtgtccaccagacaggaggcccttccctgtttggcagccgaggcggagagagaggacagtttatgccattatttcttctatgcatttcaaagactttagtacttttactaattctgctaccactctctagaaggcggagccaggtgtacggggtggaacatgaaagcggaccaggagcgtgaccgctgaagcacagcatcacagggagatggtcaggcctctggaggctgcgggtgggcctgactgatgtcaggccttccacaagaggtggtggagcagagtcttctctaactcccccggggaaagggagactccctttctcggtctgctaagtaaccggtgccttcccgagcactgatgctaccactagaccaaggtccactaggtaatgggtgccttcccaggtgctggcattactgctagaccaggaagccctctagtggccctgtccgggcgtaacagagggctcacactcttgtcttctggtcacttgctcaccgtgtcccttcagctcctatctctgtatggcctggtttttcctaggttataattgtagaacaaagattattataatattggaataaagagtaatgctacaaactaatgattaatgatattcatatataatcacatctataatctatttctagtataactattcttattctatatattttctttattatactggagcagcttgtgccctcggtctcttgccttggcacctgcgtggcttgccacccacaggtgtgatagtacacacctgtggtcccagcctcttgggagggtgaggtgggagggaggattgcttgaacctgggaggttgaggctccagtgagctgtgatcataccaaaaaagaaaagaaaggaagaaagaaaaaggtggcaggagtttggggaagattaagttagacccaggaacaggattgagaacgagggggctgaatcaacagtccagttcaatattcacaaatccaaggggtagtgggacagctcatgaccagaggccaatatccatgggactggatgtccatggactggccaaagtccacagtgatcacttgctctgaacacttcataatgtaggtacaagctcagttcaccatcagagcagccataagcctaatgtaaacactattcactgcacaatgggtaggcaggagatctcaccaggtcaaatccccagcctaactcaggaaaagtgaatcctaggggttagtttaagacaaacagaccaacccccggcaaaacagttctcctggtagaaccatacagttggactgagtcttggattggtaaagtctcagtggagtaaatcttatttgggtataatagggagaaagttaaagaccagtattccttacctcaattctggagggatatgtatattctaaatgtaatacaggtccataatgtttagttgtattaggattcttggggtcagatgttttttagaattcagaactttgtgaacgttagaaaaatagtatcatccatatattatgttaaaccacatataaggggtctgggagaaccctataatgaaaatattaatgcttctatagcaaaaaggcatggatcttcataataggcaggatgaatacagactatgaattgattcacatcaattcgggacgggttttgttgccaaatgtcttcaggtaagttcagattttgctgccaaatgagttgccaaagggggaacaaaaccttatacttttcagggtgttgggattttgcaattacaggtaaacgtttttggatctgtacagaccttgttgctgttattactcattagagaaacacactccctgctattaatacaggacaataatgctaggccgggccctgtggctcacgcctataatcccagcactttgggaggccaaggcaggtggatcacctgaggtcaggagttcgagaccagcctgaccaacatggtgatagctcgtctctactaaaaatacaaaaattagctgggtgtggtggcgcatgcctgtaatcccaactacttgggaggctgaggtagaagcatcacttgaatccaggaggcagaggttgcagtgagcaaagattgtgccactgcactgcaggctgggtgacagagtaagactctgtctcaaaaaaaaaacgaaacaaaacaaaacaaaaaaacaggacaataatgctgacagcaatgagtagctgtgtaactgggtttctcaactgtctttccactctgcaatgatgaagactgttatttgatgtgtgatatctctgatgacagttctccttttaaattcatcatctgtatttaggacttaagatgagtttctcttcagcatggtggataaaaagaaggatccagacacacgagtcagatcacttggatgaacctgtcatttaaatggctgcctgaccctaggtccacctaggtctcagctttctcagttttaagggcccggcactcacgcctataagcccagcactttgggaagctgaggtgggtgcatcacttgaggccaggagtttgagaccagcatggccaacatggtgaaacccgtctctactaaaaatacaaaaattagccaggcttggtggtgcatgcctataatcccagctacttgggaggctgaagcagaagaatcgcttgaaccgggaggcggaggttgcagtgagctgagattgtgccattgcactccggcctgggcaacggagcaagactctgtctctaaaaaataaataaataaataaataaataaataaataaataaaataaaataaaaataagagcgtagggaaaagaaagagagatcaggctgggcgcggtggctcacgcccgtaatcccagcactttgggaggctgaggcaggcggatcatgaggtcaggagatcaagaccatcctggctaacatggtgaaaccccgtctctactaaaaatacaaaaaaattaggcgggcgtggtggcagacacctgtagtcccagctactcgggaggctgaggcaggagaatggtgtgaacccaagaggcagagcttgcagtgagctgagtgagccactgcactccagcctgggcaacagagcgagacttcgtctaaaaaaaaaataaaaaaaaaagaaagagagatcaggttgttactgtgtctatgtagaaaaggaagacataaaaaactccattttgatctgtactaagaaaaattgtttctgctttgagatgctgttaacctgtaactttagtcccaaccctgtgctcacagaaacatgtgctgtattgaatcaaagtttaatggatttagggctgtgcaggatgtgccttgttaacatgtttgcaggcagtatgcctggtaaaagtcatcgccattctccattctcgattaaccagggacacaatgcactggacacaatgtccgcagggacctctgcccaagaaagcctgggtattgtccaaggtttccccccactgagacagcctgagatatggcctcgtgggaaaggaaagaccttaccatcccccaacccgacacccataaagggtctgtgctgagggggagtagtgaaagagggaggcctctttgcagttgagataagaggaaggcatctgtctcctgctcctccctgggaatggaatgtctcagtgtacagccgaccattcccattcattttattctaagataggagaaaataggagaaaaccgccctgtggctagaggggagatatactgacaacaatactgctctgttactctttgctacactgagatgtttgggtaaagaaaaacataaatctagcctacgtgcacatccaggcacagtacctttccttgaacttactcatgatactaattcctttgctcacatgtttccctgctgaccttctccccacctgttgccctgctacactcccctcactaaaatagtaaaaataataatcaataaatactgagggaactcagagactggcaccagtgcgggtcctctgtatactgagcaccggtctcctgggcccactgttctttctctatactttgtctctgtgtcttatttcttttctcagtctctcgtcccacctgatgagaaatacccacaggtgtggaggggcaggcccccttcataagaggataggactatatgactcactatagagtctgaggcacagagtggaaacttgacaaaaatttgttatatgaatgaaagaatctaccttctatccttaattctatgaatcctgtcttagtctgtttaggtgactataacaaaatatcatagactgggtggtttctaaacaacggaaatttatttctcatggttctggaggctgggaagtccaagatcaaggtgcaggcagattcgatatctagtgagggcctatttcttcatagacagccatcatctctctaatctcacaaggtggaagggctttcccttgggcctcttttgtaaaggcactagtctcattcatgagggctctgccaccatgacctagtcacctccaaaaggccccacctccttacactataaccttggcagtgaggatttcaacatctgaatctgagagggcataaacattcagaacatagcaaattcctcatttccaattcttgcctccctgtcattgtgccactgggcagcttaaatagttacacagagaaggtcaggcgcggtggctcatgcctgtaatcccagcactttgggaggccgaggcggacggatcacgaggtcaggagatcaagaccatcctggctaacacggtaaaaccccgtctctattaaaaaatacaaaaaaaaatcagccgggcgtggtggcgggcacctgtagtcccagctacctgggaggctgaggcaggagaatggtgtgaaccggggaggtggaggttgcagtgagccgacatcacgccactgcactccagcctgggcgacggagcgagactctgtctcaaaaaaaaaaaaagttacacagagaaagatttataagggtcacttattatgtttccttaagagctgaagaatttacaaatgcataagtgtgactgaatctgactaagttgtggaaaagagggcatggaaagtcatggaaagtttgtacaagcccactgcaattgtattaatagcagtgagtgtgttcctcatgagtagtaacagcaatgagggtttgtacaggtccagtgcaattggttgatgtaacccaggagtcttgttgacgtgcgtgcacacatgtatgctaatgtgcaagatctctgcttgagggaatataagagacaacagtgttgagatcatccctgagtagggtacactcagcgtcctgagtgtgcactgaaggcatccccttagcgacagcactggggagagtattgtatcttaatccttcagggataaggccttgttccccacagcaaaggaaaggactacagtctcccagtcatgtggcatggctaagtacctactgagacagaggtgtagtgagagatgagaatggaagaagaggcaaaggcacctccacctcccgggttcaagcgattctcccatctcagcctcctgagtagctgggattacaggcatgcaccactacgcccggctaattttgtacttttagtagagatcgggtttcaccatgttgaccaggctggtctcaaactcctgatctcaggtgatccgcccgcctcagcctcccaaagtgctgggattacaggtgtgagccaccgtgctcggcctttttaatttttttgagatgtgatctcactgtgttgcccaggctggcctgaaactcctggacttaggtgatcctcctgcctcagccactcaagtagctgggactataggggcaccactgcacctggctccccttttaatttttattttagcattgttttagtattttttgtttgtttgtttaagtagtcttcttgaagacagtgaacagtgtcagctgctgaccatactaggtgttcatgaggcacaactctgacagcctgccctgggctttgctagtggcactagtcaaggcagccagagtgtctgggtagccagcaagctggcattggaggggaggtgactgggctcagttagtcataatagtggcttccaccagccctgccaagcaccaatggccagagacctgggggttcttggtaaagctcatccctgtgaaggacagtgaacacagatcaagaagtatcagctggaccccagcatggaggagcaactgcagacttcagcagactcattcaggttagttaagatgaaggcaggctttcctttgatcaggcttttggaaaaaagcatatacttgggaagaaagggaaatgatagagcaagagggaattcttgaccttgaaattgtctgtgaaacactgtgcatatgtgatttttcaggggagagggtccatagctttctctgggtccataatgggttctctggccctgaaaaactgaatcaagttgctttatgttctgcatatgtgaataacggatgccctacctttaaatggctttcagtgcagggaagagagacaagtaactaacaaaaggaggagggggaagtgttagagttgaggcacaatttgccaggccctgtgaaaaatgaaatgtaggaccccttgttaaaaaattaagagatggtgacaggagagcattaaaccaagccattggccctttaagcacgaggcctggtgcagctacacaagctgcatgctcatgaagccagctgtggttacaagattgagaaagttgacactgatcatatgacacagtggttatgaagaagtttgcggattaggggaaacattacattacactcagtaaagtttcagcagtaagtcatataataatgagactgcttatagacatcaccttcagctgtctaaccagggctctgggcatcggatatctcagtggaggcgaggagataggggattgggggcgggggatgggaatgcgtttggggagtcaaagaatgaaccagcatgtaaaaacctgggttctggtcccagccctgccactagctccctgtgtgacttctggcaagttactttctctctatggataactttttcttcacctgtatgagaaaaaatttgcattattagatttttttttttcgagacagggtctcactctgtcacccaggctggagtgcagtggtgccatctcagctcattgtaacctctgccttcagggttcaagcaattctcccacctcagcctccctagtagctgggactacaggcatgtgccaccacacctggctaattttttttttttttttgtatttttggtagagatggggttttaccatgttgcccaggctgatgaattattagatttttaagttctcttcgaacgttgaattgctgttattccaaatgagtggcatccccttcagagaggctacaacatattctgctgaatatttctttctttctgtttttatagatagggccttgctctgtcacccaggctggaaggcaatggcaagaccatagctcactgcagccttgacctcctgggctcaagcaatcctcccacatcagcctcccaaggagctgagactacaggtgtgagccaccacaccaggccaattatttttttagtagaggtgaggtctcacaatgttgcccaggctggtctcaaactcctgggctcaagagacactgcctcctcggcctcccaaagtgctggaattacaagcgtgagccatcgtgcctgacctgaatatttcttttatggtgaggatttgccctctgagaataaatctgacctctgaaaatagacaatgatttccagctaactctggtaagaataataatgtttttgactgaaaatgagctgtggcctaagtaatgggatttttataacttaaaagtggttttagtttttagctaatataaccagaattgagacagtcagtagaatgtttttccccaaagttgtaatattgagatgtcataagttcattctaatgctgcaagtagcttaaaatatctttgaattctagacataccttcagaggcaatttttttttttttagatggagtcttgctctgtcaccaggctggagtgcagtggtgcgatcttggctcactgcaaccttcacctcccgggttcaagcgattcttctgcctcagcctcctgagtagctgggattacaggcgcccatcaccatgccaggctaatttttctatttttagtagcgacagtgtttcaccatgttggccaggctggtctcgaactcttgatctcaggcgatctgccctccttggccttccaaagtgctgggattacacgcatgtgccactgcgcccggccttcaggggcaatttaaaagtcatacaagacagggcaccatggctcatgcctgtaatcccagcactttggcaggtggagtcaggaagattgcttgagaccaggagtttgagaccagcctgggcaacacggcaagacctcatctccacaaaaatttaaaaaattagctgggcatggtagtttcagctatcttgggaggctgaggcaggaggatcacttgagtctaggagatcaaggctgcagtgagctgtgtttgtgccactgcattccagtttggggaacagaatgagaccatgtctcaaaaaaaaaagtcatataagaaaaagcatcagcagggtacagtgactcatgcctgtagtcctagcactttgggaggctgaggtgggtggatcacgaggtcaggagttcaagacagcctgactaacatgatgaaacctcgtctctacaaaaatacaaaaattagctgggcgtggtggcatgtgcctgtaatcccagctactcgggaggctgaggcaggagaatcgcttgaacccgggaggcggaggttgcagtgagccgagatcacaccattgcactccagcctgggcaacagaaggagactctgtctcaaaaaaaaaaaaaaaaaagcatcatataatgtaataatcatagctttcgtaataagatggaaacctgtttcaattgaggaccatgtgaggcaaatatcaatttaaatcagtcttttctaaaaatagctatttaggagagaggcatatacaatgttaaacacaacgggctacattggctcatgcctgtagtcccagctacttgaaagcatgaggcaggtggatcacctaagcctgggaggttgaggctgtggtgagccatgatcatgccactgcactccagcctgggtgatagagtgagaccctgtctaaaacaaaaaacaaaaaacaaaaaaacaaaaaccaacaacaatgacaactaaaacaaaaaaaactaaaaacataaaatgttaaactcactaggtttttaaattaaagagaggagtataaaacaggcagaaaaggaaaggagagaggagaaaagtacagaggaaaagaaataaatagaagagttgtgggaattggagttaatcagtaaagggagcttcaagtttatctgcaattttaaaaaatataaaagatgaaggcccggcacaggggctcacgcctgtaatcccagcactttgggaggctgaggtgggcagatcacttgaggtcaggagttcaagaccagcctgggcaacatggcgaaaccccatctctaccaaaaatacaaaaaattagtcaggcatggtggcatgtgcctgtggtcctaggaggctgaggtgggaggattgcttgagcccggaggcagaggttgcagtgagctgagatttctgaatccagtggggctgattgcaaaggagacccaaggaacagtgccaagttagatgccaattacccacttcgagtcctttattgtggagtctgttcattaccaacagagtactgtgaatatatgcctgatgttgctcattgtaaacaatggttagagaagaattttctaaatgaacttgcaaaatttactgtagaaaattcacccaaacaagaagctggaattagtgagggtcaaggaacagcaggggaagaagaggagaagaaaaaacagaagagaggtggaagaggccaaataaaacaaaaaaagaagaccataccacaaaagcttactaaggccaaaattcctagagcaaagaagaaacatgtgacaagagtgtgtggccttgcaacttttgaaattgatcttaaagaagcacaaagatttttgctcaaaaattctcctgtgctgcctcagtaatggggaggatgaaattattcggggagactttacagatgacataattcatgtcattcagaaaaatggccagaagtagatgatgacagcatcaaagatcttggagaagtaaagaagtgaatttgaaaatttgtctgtatttaatggcctgaactgagagttgatatggccaaagggagagaggcctttatatatacatatatatatatttactgtagaatatatatatattctacagtaaaactgtagactgccctcgtccttggcattttcactgttttgtacaaggttgcttgtttttttaattgccaaagtcaaataaacagggagactgtcatgctcatgcatgaatagaatttagtcaaataaaaaattttggtcatttgctgggcgtggtggctcacgcctgtaatcccagcactttgggaggccaaggcgggtggatcatgaggtcaggagttcgagaccagcctggccaatatggtgaaaccccgtctctaccaaaaaaaatacaaaatttagccaggcatggtggcgcacacctgtagtcccagctactcaggaggctgaggcctgagaatcgctggaacctgggaggcggaggttgcagtgagccgagatctgccattgcactccaacctgggtgacagagtgagactctgtctaaaaaaataaaataaaatttggtcatttggtactgactttctctttgtctctctctctttttttttttttttttgagacagagtctcacactgtcgcccaggctcgagtgcaatggcatgatctcagctcactgccacctccgcctcccaggttcaagcgattctcctgcctcagtctcctgagtagctgggattacaggcgcctgccaccacgcccagctaatttttgtatttttagtagcgacggggtttcatcatgtttgccaggctggtctcgaactcctgacctcgtgatttgcccaccttggcctcccaaagtgctgggattacaggcatgagccactgtgcccggcctgactctctctttgtctttttattttttg

SEQ ID NO: 1566 - protein, 165 aa, Homo sapiens [sequence omitted]

SEQ ID NO: 1567 - DNA, 931 bp, Homo sapiens
  source
  (1)..(931)
  CDS (201)..(731)
tcctcccgtatcagtctcccaagtagctgggactacaggcatgcgccaccatacccagctaatttttaaattttttgtagagacagagttttgccatgttacccaggctggtgtcaaactcctgggctcaagcaatctgcccacttcagcctcccaaagtgctaggattacaggtgtgagccactgcgcctggcccatttatgctgactttttttttttttttttttgaggagtctcactttgtcacccaggctggagtgcagtggtgcaatttcagctcactgcaacctccgctcccaggttcaagcgattctcctgcctcagcctcccaagtagctgggattacaggcacgcatcgccacccccagctaatttttgtatttttagtagagacagggttttgccatgttggccaggccggtctcggactcctgacctcaggtgatccaccctcctcggcttcccaaagtgctgggattacaggcgtgagccactgtgcctggcctatgttgactttcaagacagttgtttctgccttatatttggtttgcttgctcaaaatttattttcagttggtgattcatgtattcatcaacaaaagttttatacatggccgggcgcgatggcttatgcctataatcccagcactttgggaggccaaggcgggtggatcacgaggtcgggagatggagaccatcctggctaatacggtgaaaccccacctctactaaaaatatcaaaaattagctgggcattgtggcacgctcctgttgtcccaactactctggaggctgaggaaggagaatcgcttgaacccaggaggcggaggttgcagtgagccgagattgcaccactgcactccagtctgggtgacagagcgagactccgtctcaaaaaaaaaagaagttttatacatgaggcccatgaggtc

SEQ ID NO: 1568 - protein, 176 aa, Homo sapiens
MLTFFFFFFEESHFVTQAGVQWCNFSSLQPPLPGSSDSPASASQVAGITGTHRHPQLIFVFLVETGFCHVGQAGLGLLTSGDPPSSASQSAGITGVSHCAWPMLTFKTVVSALYLVCLLKIYFQLVIHVFINKSFIHGRARWLMPIIPALWEAKAGGSRGREMETILANTVKPHLY

SEQ ID NO: 1569 - DNA, 3532 bp, Homo sapiens
  source
  (1)..(3532)
  CDS (201)..(437)
  CDS (2622)..(3332)
tctgattgattatctaatatgatagaaaaatatacagtctgggagcaaatttagatttcagtgaaaaattaaactgttataccaacttgcccactgaagcattaaatgcattctctatgtaattatatcagcagatcgcagcggcgatatggctgtcactccagctgcctctccagaggtgctcaggacaacagccgcagatggccagcaccacctcccaaggcttccggaagacaggggccctaactgatttcattggcgtcttttccatggaaagcctgctgtctttctctgggcttgggagaagaggccagcaaatacccttcctcagaacgagaacctctggaatcaactggctccaacatctacaggtggaaatgaagaaaaccaacgcggtaggaatcgtgcgtgggctttcaggtgcccagaggcatttggtgtgtgctgagtgatccgcaaagccaggagagaagccctccttaagtgacagagcccagggcaccctcccccacagagactcagagccttaaattcttaccatcagcagcctggaggctcctcgatttgtcatctcagtcattagcggtgcagtaattaggttttggggttttttcccaggcctggaatgtaggatcaatagcagagatgagttaacataattggattctggatgggtcttttccttctcccttcgtcatctctaagtgaaaggctcctggtgcctccccctctgcctcccacgcttaccatccccagccactctaacctggagcacctggccccaccttccctcaccacctcctgcggggcatcacgcctatttcccagactgggttgggttccgtgtgctcctttgtaaaactgtgaatacatggagagatgaatgtaaaaaataacaaggtatggctggggatgggtgaagacatgagggaaggtggctgtcacagctgttctcagagacccatctctggtttgacttggaaggcggccccttcgtgatgctgctgcggccacagctgggacataacacctgcccactccctgcagtgactggagccactccttgttccaaccacacagtggcttctgctgcctctagcactacctgaatgggctttgacatgaaaagaattagggaggatttgaagaaataagacacgccacagctatctgtgtgcctcacacatgcacacagacatgctctcaccatctgagagggcaccttttcatgccaaccaacaccaaggagtggctagaacattttaacattgctggaaacacacttggagccctgggtttcacacctgcctctctgggaaggagccccgtttctcaggggacacaacagagaatgtgctggattgtcttggaaaggtgagaggcaattaaccacgagaagacaggtccttctcttacatcttttattaatcacctgctattgtttgctcaacaaatcgctctgattgagggtcacagggagttcagaattgctaggcagctctcagaagtgtggttgcctccttctgacaactttccccaggagaaactcctgagtctgtaggaacctagggctcacgtggactcggtgcctttggacttgctcacctttgtgagcaaaataccaggatgggtaaggctcactggatgctagcctagcgccagaaaggagcatagagtcagggagaagcagccagtatgatgcttgactcccggcctccccactggcccgtggctggactggggctgaagcctgagacccttgaccacagcctggtgttttcccaggaccctgattctgctcagtgggtttagccaaagtgtgcctcagtcactgtattagggttcttcagggaaactgaaccaataggatgtacatatagaaggagattttttttttttgagatggagtctcactctgtcacccaggctagagtgcagtggtgcaatctcggctcactgcaagctccgcctcccgggttcacaccattctcccacctcagcctcccaagtagctgggattacaggcacctgccaccacgcctggctaattttttgtagtttttttagtagcgacagggttgcaccgtgttagccaggatggtctcaatctcctaacctcgtgatcccctcgcctcagcctcccaaagtgctgggattacaggtgtgagccactgcacctgaccagaaggaaattttttacaaggaattggcttatacaattatgaaggcttagcaggctcaccacgtgctgtccacaagctgaagacccaggaaagccctggcgtaattcagggtgagactgaaagcttgagaacaaggggagctggtggtgtgagttctagtctgagggcaggaagagactgatgtcccaggtcaagcagtcaggcagaggagcaaaatctctcctcctatgctttgtattctattcaggcccccaaagtattaggcgatgcctccccacactggggactgccattgctttactaagtccatctaatcaaacattaatctcatcagaaacccgctcacagacacacccagaaatgatgtttcaccagtcatctgagcactccagggcccagtcaagttgacacataaaattaatggtcactgctacctagttgaaagacaataatgatgttgttggtgttgatggtgatggtgatgatggtggtggtgacagtgataaaggtgatggtgatggtaatgatgacggtgattatagtgataatgatggtgatcatggtgatgatggtgctgctgctgatggtggtaatgatgatggtgatagtgatagtgatcatggtgatggtgatggtgatgatgatggtgatcacggtgatgatggtgatgatcatggtaaggatgatgatggtgatgataatggtgatggtaatggtaatcatggtgatgatggtggtggtgatagtaatcatggtgacggtaatgatgatagtggtggtgatgatgatgatggtgatgatgatggagatcatgttgatgttgatgttgatagtgataacggtgatgatggtggtgatgataatggtgatcacggtgttgatggtggtgttgatggtgataatggtgatggtaatgatggcaatggtgatgatggtgatggtaatgatatggtgataatggtgatggtaatgatggcgatgataatggtaatcatggtgatgatggtggtgattatggtagggatggtgatgataatggtgatggtgatggtgagcatggtgatggtggtgttagtaatcacggtgatggtaatgacggtggtggtaatgacgatgatgatggtgatgatgatggtaatgatagtatagcagtaatagtactgagccagcctttaatagccatagacagctcaatcttcatcaagtccttcttacaccacatcgaatcccttcccgtagcatgccccaggtggacacattctcccacataagaacacaaggcacagactgggccctcttcccctcggcagctcttctgaggttcacagtggtgatcttcacccacctga

SEQ ID NO: 1570 - protein, 315 aa, Homo sapiens
MASTTSQGFRKTGALTDFIGVFSMESLLSFSGLGRRGQQIPFLRTRTSGINWLQHLQVEMKKTNAVGIVRGLSGAQRHLLKDNNDVVGVDGDGDDGGGDSDKGDGDGNDDGDYSDNDGDHGDDGAAADGGNDDGDSDSDHGDGDGDDDGDHGDDGDDHGKDDDGDDNGDGNGNHGDDGGGDSNHGDGNDDSGGDDDDGDDDGDHVDVDVDSDNGDDGGDDNGDHGVDGGVDGDNGDGNDGNGDDGDGNDMVIMVMVMMAMIMVIMVMMVVIMVGMVMIMVMVMVSMVMVVLVITVMVMTVVVMTMMMVMMMVMIV

SEQ ID NO: 1571 - DNA, 14750 bp, Homo sapiens
  source
  (1)..(14750)
  CDS (201)..(343)
  CDS (5163)..(5441)
  CDS (13911)..(14088)
  CDS (14443)..(14550)
cagcatcagctcctgcttgagaggttccaggctgcccttcctgacagcctgtcctatgattttggacttgccttgccaggtttttcctctttcttgaccccccaaaaccatatatatctcctgctggtttgtttctctggtgtaatcctgagggatgaacactcctccctcccagttcactctgggagaggttggggatcatgtttgtctatttccccatgcctggcccatgcgtgtttattgaatcactgaacaaccacgcattaggaagccagtcatatgtgcttcttcagaacctcatgtccattgccagatctccctggcttttgtggctagaggacaagtgagagatagtagcttacccacagaccttggccctgaggcccccaggggcctgagcctgctgtaagggaggagggagcccctgaggtctcacacacctccctggggatctggcattttcccctggggctggcctcagagctgggcgggggcagattatggagtgggttgtagagggagcacctccccactagcaatcatggttttttctgcgcctctcatagggaggcctacaggcctccaccttcagctcttcaggagccacaggcagctgagtgacttctgcatcacagtcttctcagagacaaacttgcagtaagaaagaggggcccgtgagggaccccagagaaggctgttgtcaaagcaggatgagagtgaactcttccatgggggacacccagcgtctccaagctcttttatgctgtcttcaaggggtctagagagcttcagcccaacatgagacccagtccagcagcatttccctgcgaagtgaaagttaggaccctgactagatacaccacgctgacctcagccagaatatcaagatgctgaggcgctgagatgctgggatgctaaggtgctaaggtgctggggtgctggggtgctaggatgctgaggttttgtgatactgggtcgctgagatgctgggatactggggtgctgaagtgctggggtactggggtgttgccatgctgaaatgctggggtgttgggatgctgaggtgctgggttgctgggatgctgggatagtccttggatgctgcggtgctgagatgctggtctgctggtctgctggggtgttgggatgctgggattttgggatgctggagtgctgcagtgctgcagtgctgagatgctggagtgctggggtgctggaatactgtagtactggtgtgctggagcattgagatgctagggcactgggatgctaaggtgctgagatgctgcagtgctggggtgttgggatgccgaggtgttgggatgcttaagtgctggggtgttgggatgctggggtgctggaacactatggtgctggggtgctggagtgttgagatactgtagtggtgggatgcttaagtgctggggtgctgggtgttgggatgcctaggtgctggggtgccgagatgctggagtactagtgtgctgggatgctgaagtgctggggtcctgagatgctgcagtgctagggtgctgagattctgggctgctggagtgttggggtgctgggatgctggagtgctgagatgcttggacaatggggtgctggaatactatggtgctggggtgctggggtattgagatgctagggtactgggatgctgaagtgctgagatcctggagtgctgggctgctgggccacaggctcttgaatccattcgtctgcccaggggaagaaaccagaagataaagagctaatgaaggagctttggttgagagggaggaagtaatggaaggagcaacatcttgtggaggagcaggagagaatggacctcaggttgggagagagggccaggctacaggccagagaggcagaaggattccagcagagtgtgggctccaggagccaaggggaaacaggtttctgggaggagagagtccagtactgctgaagtggcaagtccgctgaggaccaggaagcttcatttggctttatgaccaggaggaatttggaactgtgactagagtacttagggggaaggaggcaagactggagccagattgctctgggttgaggggtgagtgggaggtgaagcagggcactgtcactcctttgaagggtggcagagagctggaattggtgctggatgggctgtggggtgacagggtcatgtggaaagcccctggggggcacctggaaaaggagaagctgacagtacagtgagaggacagctaagggaaagcggaatggcagaacacgcactgccaggaggaatgaggatagggtcaggagtgccaggggcagtgaggccagcctggggtcaggtggcaggacgtgtccaggaagctggtctgcactgcagcccacactggctcagccttgaggttccctgtgtggttggggtaggaagttgaaccctctgggaatggaagatggaaccagctctgcgagccaagctcagcttttatctatgggtctctgagggctggcagagctgagtggggacaactgtgatccgtgaggctctcaggttgaggtggcccctccgggagggcttcattttcccagcgggtaggttctaagcagcagtggctgggcaggtgggtccaacacagagccagagaagggtgaatgggcctcctggcaccccacccctgctgcccctgagctcagtgatggagggggacagcacagctgagcccaagtgctttggtgtggccctgagggaaagctgcagcctgcctggggcctggcatggatgggacacttgaggcagagggacaatagtgggcgctgcagtgaggctggctcttggagaggtttcctgaggagtgctgcctgagacgggcagggagaacagagacaaagttggtgacagggaatgaaagctgactgaaggactttacccagacctatgaggatatctctctcagcaggaagcaggaggggactgtgtgaggactggccaagagctggagtgttgggaaaatgactctttctccgacccctctgtcctagctctggcccctggactgcggaggtctgcttccacccccattggtcgatcgttgtcccttgtcacagccattgagaattttggcagggagcatgttcttagagcatttttaggctctgcgggacataacagctctgcctcagagcacatgcctttctcagctcctgaaagccactgatcaaattggaacattttgtaccttagggatgaggatatcaactctcccagccacttagagggataaatgtgatgatgcattcaattgtgactacatctgatcccaactgttgcttcagctgctctcctatagcacatggcgggaggcgtgcatcccagtagctacctccccacttttggggagatgtggttccatccatgaaacctgggtacccgcctaccaggtcctggcctatcaggtggcagggtctggtcaaagaagggcatgtgtggtcttcagcaagggagacaggacggtggtgcagagcgtctagaccctcagggcaagtctcccccacacctgctcccggggcagttgtctttgtgacctcccatccccctctgtttcatcctctataaaatgaggggctgagccccaaaataacaggcttctttgccatgatgcaaaactgctgaatctttctttctgacacacaaggcatcgagcagcctctgaaagaaccaaagccactagcaggcttcctgacttgggtttgtaggtactgaatactcccttgaaaaataaaaacatagaggcacttttctcctggctgtttattacagaacgaagaaaaaacacactggcttgaaacagacgccagatttcaaatgtagaggtgaaatacgaggtggcaattaaaatgtgattacagaaagtctggacactgagaaaagtttacaggacagtgggtgtgggttttctataacagacacttaaatatacatgacgataattgcagatagaaaccatcaaagacaaaccccaaatcaactaataatgtttacagatgttcccccccaaaccacagagccttacatcaaaacaaatactgaaaggctttaaaccaggaacagctcgccttaaccccacgagggtgcacacaagctgggctttttctctcggtctgaatggtaaagggaggaggatactctagctcctccaggtggattgctgagacagggctcggctcacacactgtctctgcgcctctcccaaatctggagaactctcccagcctcctggtaaagtgtctctgtggggcacttaacgataaaacagcttctgctgtaaagctcattaggaaagagctagcggagactgaaaggttcgcaaaagagattaagaatcacacaaggcaataggatttttagtgaacatagaaataaatggccaagtggttttctatttggcatttgtcaacttgcacaacaactcttggtcatatccacattgctcattgcattaaaaccataagcgactcagccacctagcttaacaaggtatcactggagcaaacaacacggtctgcatatttgtaacattgtataataaacacaaaacaatgcatagtaaacacaactctactgaaacaaaagccgtcgctttatttacaaagtcacaaaatgaagtataaatacttctgtcattaatgtttaggaaaaccatttacaaaattttcaaatatgtacacgtagcttgaaaaatcaccagctttccattttgtcacaggtagagagagggataagcatgggctgacaacaccactcaaattgtaacgggagacaactgcgggtatggatcgacaccacttcctagagtgatgtcaccatgggggtttctatgggcatcctgctcagatttaaagtgccccagcatcctgggtgacttgcccagaattctgggctgtggcattttgagcagcagcatgctgttccaaaatgtcgtcgatcagcctcaagttgcacacccagtcttcatctgggctcacacaggagcctttcaagagagcttcaatgaaatctacctcattgcagtcaggtgacgaaatcagatcatttagtgggggttggggctggcgcaaaaagtcggcaggtggcagctcagggggaatatccgttctgtcgaacggacctgggaactggctggcagcaacggcagaagcagcagcagcggtggcagcagcagccacatagcttggtggctcgatgccctgtatggggctcaggggactaaagctggccataccctgctggaggaacttggtggtgtttgctacaggcaccgggccctgtaccgggctctgcctgaggctctggctgcccagcaggctgaagctggggttgttggccaggggcacttgtgttcccatcgcagcgggcacttgtgcctcccaatcagatggcctctgaaggcaggcctggccagaaggtgagtgctgctgaacgctattatccacttggctgaggggtgttttccccgaaactgctgtggtcacagctgctgccgctgtgacccatgcagcattgttgaacgcagtgggcattcttggcacactaggccgtctgagctggtggggactcaaggactgggtgcccagggagctgggacagaacccaggcaggggcacttctggtggggtggccttggggctctgcatatgctggcagacagagtcaagtctgcccaggggagtctggcctgagtgtgagaggatgggacactgggggctggaggtgaaaattccttgccgcttccccagagttggtgagatcactcccatgccctcgcagctctggtgcctggtgagtgggatcattcctggactcagattgttctgaagaagcccagttctgggtggcatcaagtgcttgctagatggggggcttgccttgatccggctacacttggaggtgacttgttcttggacggctacatacagaaagagagaagtggggatgagttccaaaggcatcctcgacttcggctgtggccaccggagggtagctcctggcccaacacggacttctcacctcccgcccttggctctctactgagctcccccctgctccccaattcctcgccattcccctcatttctctgccctcagcctggactgcagttcttctgggaagctgccccaactccctaggtctgtgctcaccaagagcagatcacactggactgaaatgccagctgatttgtctcttcaagaaaattggaagctcctggaggtcagggtccatgtctgcttttacactcagtgctctgtatgcaggcctggcactgcccaccctttgacaggtggtgcatattttgtagaaggaaggaaggggccaggtggggtgggctgggctggtggcgggagctagctcagcctcttagattctctacccgatggatgtgacctgggacagcaagtgagtgtggtgagtgagtgcagacggtgctttgttcccctcttgtctcatagcctagatggcctctgagcccagatctggggctcagacaacatttgttcaactgaacggtaatgggtttcctttctgaaggctgaaatctgggagctgacattctggactccctgagttctgaagagcctggggatggagagacacggagcagaagatggaaggtagagtcccaggtgcctaagatggggaatacatctcccctcattgtcatgagagtccactctagctgatatctactgtggccaatatctaccggtacttttttggggtggacactgagtcatgcagcagtcttatggtttacccaaggtcaggtaggggagacagtgcagtcagagcacaagcccagtgtgtctgacccacccaagaatccatgctcgtatctacaaaaatgattttttctcttgtaatggtgcctaggttcttttattatcatggcatgtgtatgtttttcaactaggttacaatctggccttataaggttaacctcctggaggccaccagccttcctgaaacttgtctgtgctgtccctgcaactggagtgtgcctgatgtggcactccagcctggacaagtgggacacagactccgctgttatcaggcccaaagatgtcttccataagaccagaagagcaatggtgtagaggtgtcatgggctacaataaagatgctgacctcctgtctgagggcaagcagcctcttctggccctcagacaaatgctgagtgttcccaagactaccctcggcctggtccaatctcatcccactggtgcgtaagggttgctgaactcatgacttcttggctagcctgcaacctccacggagtgggaactacatcaggcattttgctaactgctgtatcctaggccaataaatgttgatcacatttatagctgccatggtagggtggggacccctgctatctatctgtggaggctctgggagcccctgacacaaactttctgaagcagagcctccccaaccccttttccattccctatacctgacagatggcccaggaacccattagaaatggaaggtcactgcagcagtatgtgaatgtgcgtgtgggagaagggcaggatcagagccctgggggtgtggcagcccccaagtgattctaatccagatcctagggttgtttccctgtcccattgaaatagctgctttaaggggcctgactcagggaaatcagtctcttgaattaagtggtgattttggagtcatttagaccaggccttcaattgggatcctgctcttagagttggatgaattatttaactgattttcagatctcctctttctcaatgctttcagaagcacagtaactgcttactctgaaatgaattctcaccccacttccacatatgcaccccttgcccacccctttgggaacactggccttaactgcttaccttcaaatggactcatctgttgggagatatatgcattctgccgttcaggggtcattgccataagacctgatctctgttcctcttgctaaacagaagatgaaaaagacaaattagattacagctaccaattaataattagccttaggatcgctgcgtggggacctaggacttggctttggtgcagcagaaagcatgaataaacacaccagcatacactcgcatgcatgccccaccctctcgagcaaaattccacaggtataaataaagtaagattctgcacctgggttaaaaacacaactgcaacagcatagaatggggcaggagagacagaacttaatagcaagagcacacagaaaaaagttttaggcattttggatgtccatctgctcaggatgggtcagcagtgagatgcggtcaccaaaagaacaaatgtaacattaggctgcattaatagaagcagagtatgtagaaggagggaggtgacagtcctatgctaactctgccttggccagactatacccacaggagtctgggcatgccagtctcagggagacccagacagactggctgcattcagaggatggtaagtaatgagagtggggattggacttcaaactacccagacaaagaatggctgagcaagccaaggatgctgtggctggggcagagcagactgtgggctatgtagtggtggatacctagcctctgcagggctgtcatagggaaaggacattgagaagaggactgaggcttgttcctggtggtcctggcatgaacggccagatgatcacatggtcaggtggacacagtctccaacactgggagtagccaaacacttactgccaacctcccgcccttctcctgactagttgcagcataggcaattgggaggagcttcctgtctccatctgaaagctggctgggtgggcagggggaggagcgagccaagtttcaaggccgcagtttcagcactcagtctgggatcggctcaaggagcaaaggggaagaacatagccaggagggaataacatgaaggcccccagacccagaaaaggcatgacttgctctgagaccctcagccggttggtgtcaggttgtgactcggatccaggtctgactcccagtccagtgcttgaagcctcaccccacacagtgaggggagcccggccatctctgctcaactgctgccatctctctccccttctcaaccaccaaggcagctctgtctgggagcacaagctccaagtccactttctggtctgtgtcccccccaagatgccagaggacttgcctctacaacacgggctgcccgtgcagtgcctgcttttccagcaaagggcttctgggaacccttctctgcactcagtggggctggtgggagtggggcggggtagcgacccagtgcttgggactgtgcccagctctcaggcctggcagcagttcctggccttggttcctgccaaggcagagaggacaaacacatggcaccgggaagactacaccagaagcgattccaccagactggggtttgcttttctatcccgcccttagcctgcttcctgtcctggtccctgcctccccctccactggagctgccgtgtgggcagtgaggggctgtttctcagctgccctatggagctgccctctccctgccaaagcattggcaaggcggcaaggggtgggggtggggatggggggtgggatctgccttctcaagctctcattatactgagcacgtctcacccattattttatgtcatctagcaacaccccatgtggacactgaggagcatgggggtcacatgaccactgcccaaggccacaccatccggatctgcctgagatggtcagggttggcagccatttctgaaggcagtcctttcgctttggctcttcttgtaccagtctcaggacatcagggcagaagatctacagtccccagcttactgatgtgacagcagaggctcagagaggttaaatgacttgcccaaggtgacacggctaagaagtacagtatctcctaactgcagaccaggtgcttctgctgcttctggggacagattcctgcgtggctggctaggtctaaacggtccttaactccatccccaccggttgctgcattagtttcatcaaataacacagttgtacagaggtaggggttcaggggcaggggcagatggaggctggagagtgtgactaaggaaacagcaggggaagtgcggtaaagtccgaagggagggacggaaagagaaagccaagcccaggggcgtgccagacaaaaggaaaggccacgccggggcagggcaggcttcagcgggtgctggggcgtcttcatcccgggaagcacacattccagaggaccccggagtctaatggaaaagctggccagcctatcactatggaaactgccaaggccacacagcgctgctgacacccagcctgggtgccggtggccagctctgcaggatcttcaagtctggggtgccaccagcaagcgacggtcctccatgggctcttcaccttacggcagtgtccagaggcaccgccagtcctctgctcctatgctggtcctgctgtccctggcaaaaggagccagagcattctctccaggcctcccgaggaggctgcttcctttgttttgcagatggaggctcccatcctttgttctgaatcaatgtgctccaaagataagccccaagaaaacagttgttgccttttgacactgacaattagaatcgttggaaaatggagaaaacaggaaatggcaaatggtttcagtgaccaggaggaaaccgtgcctgaaagttgctgcttagtgactgggacactcgctttctgctctcttatgaaggacagcctaggccgtgtggccttttataaacaaagctatgaaggggtcgtcaaattttctagggctgcaactgtggcactacgtcctgttgtgccaggtgacactgacaagcagcactgagttctatgcaagcccaggtgtgcttctctcatggtgacccccagagaactaaggcccagctcttcctctgtcacacccctcccagcccccactgtcagacaagggaccacattcacagacagtctcagccaagatggcaaccttggaagtcctggggatgcctttctagaagctttaggctgacgccagggagctgtaaagcccccacctgtccctgggggttgtgtgctgggcaggagagaggggaaagagcccaaactccaccactgcctgctggcacaactgagcccacgccaggcactgcaccagcttcactcaccagctaccacatgctaatgtctcctgtttacccaggtgcaatcacctgagtgctgctttctcaccactgcatgggaagaacgatctcattaccaattcaaccacttaagcaggcaaaaggactccaacgggggaaaggcagaggacaaacgattcggggactgagacagatgcccacaaaatgttcctggattttagccggattcgggctgaagttccttgccctatgagcccttggaggagagcatcctgactcagacaagaattcaaatgacaagacttctgggggatggcagtgaatggatccaaagccttgttttataaagaatgtggaggaagggaggaaggaagggagggaaggggagactgagagggagagagaataaagaagaggaagagaaggaagaggaggaggaggaaggggaggggagaggaaaaaggggagggtagaggaggagggagaaggggaagggaggacagaagaggggagggagcggggagattatctacccctccatgctagggaactcctgtctccttttccagcagacactgctccatgagtgcccccacagagagccagcctgccacacagcagaaggtgctcagctatctgtcccaaaggttgagcactagtgtataccacaaggaaaaaaaccttcttttgtactgtttggaagccagaattagaaacaactcgttcacccttctgactttccctttgcaatgacaggaagatagtatactgcatgggaccaccacacattcaagatctgagttgtggggacccccacccccacatgggtggagccccctgagacccgtgggctctgactggccatggcccatagatagtgacaacatacacactgctatctgaagcctagttggaggacggatggatgcttttaggaaaaaattccctttagtcgtccctcagaaactacaacggcttcctaaaatgaatggcaggcaagttttgattgtttcctaagttccccctaactctcagagcctgtgactcagcttctccagaatgcctgcagggaggcaggaccactgggagtaatgagcacgaattgggccacttctcccagtggactgttaacgccgagatctggggtggaacccactgaacacctgcccttttgcgttgcccagaatgcagccagagggatacgggccacagtaactctggggcccctgaacctaccttcccaagaccctgacgggaaggtattgcttacatgacagtccagtcagtccctctgtcactcagttaacaaacatggtcatgggtctactatgggccaggctctgttccgggcatggggataacaccgtgtgtctctactcttatggacacaagtaaatcaatcaaagcagataatgttctaatgaccacccagtagggtgaagggatggagggtgggcaggtgctggcagaaacctaaggtcaagtcatgggaccccaatggggaactggaaactgccacaccattttctatgttaggggtctttccttgcccttctagagacctcacccatggtaatgatgctgccctcaggtttgaactggtctgaagctgtcactgggggcttcacaaaatgaatgccactgaaagcaaacggcagagatctgtatatgaaattctttttaccctttgttttctgtcttcccacatgatctatgactgctgcaaactctattctgactcctcctcagtcttggccggtctgggaagaacttggtttagatgctgggaatgatcccgggcaaaggaaacaaatatatttccagcttgcttttcttcttcccctgtggtgcctgcatcctctgtctcgcactgactcacaggctggactgacaaagtggctgtgttgacagggaggatttagtggatgccaggcctgaccctcaaaggccctcaggtggggccaatttccaaggttcttagagaagatttggggccacaaatctgctctgccacttcactgctgggtgaaagctgttggcttgagaagagagagaataggtgagggacaataattctcaaggcaagctagctgatatcctttcatttgtggcttccaaagacagggaaaggcaaggcagaccagggtggaaacagcgacatcctgaggggacgacgtccgttttgctaattctgtttccctggcagctttgtgctggacaagatttctctggtttcagctgaagagtgaacagctgaggagctctgtgactctgagagagagagaaatcaatagcccttgaaaggaaagcactgcttgttcttccaggccagggcaggcaggataaagagaacaaggctgtacataccaaagccgaatttccattaaaggccagaatcctgggaggccctttcagcttaatgaccatcttctgatcactatcacttagaaaatgttcatgtctccagttttctctgcagatagtgcagacatcctgtgcacattgatattttatgcaccagatgcaattctctgcaaaggtcccctctggctggtgtccatccgcttgctctcatgaccactgatgcgactctgggggcaagtcaagccattccttctagactctagaatctagaggatgatcccaactcacaggcctcttggacaagcttgctttggattccttctgcctgtactacccagactgccagtcctccagcagggcaatccaacttcctgcctctagggtgtgggagtcctgggcggggtttggaatccacagcagatggctggcaggagaggcagttcccgagcacccactaggtgccaagcaggcaggtatcaggtgcagggcttcggaggtgcagaagcacagcccctgtccccctcaggttcccagtctggcctcagggacagacaggcaggtaggtatggaaacggggtactggaaggcatacagctgagggagagagcagctgcaccctggtcaatcccccactcatttccctggaggtggggctgaggcacctggagcactctgcttgcttgggttgtccctttgccaaagaatgccgggcagaaagtagagaacaagcaggcccaggaagcactagaagtccctcatgggtggacagagctttaccttcggagctgtcacctcctgtgttcctcccaacaaccctgtgaggcaggcgggcaggctgagcaggggactgtgccccgttgacagatgaggaaagcgaggctcagggggaagtgacttacctgtggcgtcgcagctaggcagtagtggagcgggcacctgcctccaggccttcggatcccagctgccccagggcgctgcctctgaggtgctgtacgaggaggtgactcgggccagctcatgagcaaaggagctgccgggcaggaaggactcactccccagggcctggcaggacgggggctgtcgcccgaggctgacctgggggtgcctggcttccccaagcttgcaggctttgtctacatgagtctacaacaaccgattgaacaatccatcagctgcttggccacaaaatggttctgactgatcttgtcactgccctgagtg

SEQ ID NO: 1572 - protein, 235 aa, Homo sapiens [sequence omitted]

SEQ ID NO: 1573 - DNA, 1165 bp, Homo sapiens
  source
  (1)..(1165)
  CDS (201)..(965)
gcttctccccttcccccaggtgaatatcggctccacaaaggggtcctgtctggataagcgggtgagtgggggagggagtatggaggggtctgagccacttggtaaagggagaggagaccctgagggtctaaggaaggaagcatggccctgccccacgagtcccagactgatggggagacgtggtcctctgtgcttaggggatggcgtcagctgcacacactctgggctgtcccgggaggctgtcacctatgctaagcccttctgacaccttcttccctgatcctgggggtcctagtgctaggcttgccagggccttccagcaaccaatttctctcctcccttctctcttccccgggcaggactgcgagaactacatcactctcctggagaggcggagtgaggggctgctggcctgtggcaccaacgcccggcaccccagctgctggaacctggtgagaaggctgctccccatgtgcctgatcagctcaccttctactgcgtgggcttctgcccctcatggtgggaaggagatggcgagactccaatgctggccttgccctgggaggatggggctcctggccgagaaactggccgtcatgggaggcagtggctgtgggattatgtggccatccaaccctctggatctcccacaggtgaatggcactgtggtgccacttggcgagatgagaggctacgcccccttcagcccggacgagaactccctggttctgtttgaaggtagggcagtgctggagcaggcgccccagggggatgcttctgaactgggctgggagaggagtggtcagctctttgtccagtgtccggaggagggacttccaggagctgcctgcccttactcatttctccctcccactgaccccaggggacgaggtgtattccaccatccggaagcaggaatacaatgggaagatccctcggttccgccgcatccggggcgagagtgagctgtacaccagtgatactgtcatgcagagtgagtcaggctccggctgggctgagggtgggcaagggggtgtgagcacttaaggtggcagatgggatcctgatgtttctgggagggctccctgagggccgctggggccatgcaggaaagcaggaccttggtataggcctgagaagttagggttggctgggagcagaggaa

SEQ ID NO: 1574 - protein, 254 aa, Homo sapiens
MASAAHTLGCPGRLSPMLSPSDTFFPDPGGPSARLARAFQQPISLLPSLFPGQDCENYITLLERRSEGLLACGTNARHPSCWNLVRRLLPMCLISSPSTAWASAPHGGKEMARLQCWPCPGRMGLLAEKLAVMGGSGCGIMWPSNPLDLPQVNGTVVPLGEMRGYAPFSPDENSLVLFEGRAVLEQAPQGDASELGWERSGQLFVQCPEEGLPGAACPYSFLPPTDPRGRGVFHHPEAGIQWEDPSVPPHPGRE

SEQ ID NO: 1575 - DNA, 1132 bp, Homo sapiens
  source
  (1)..(1132)
  CDS (201)..(932)
  modified_base (1038)..(1132): a, t, c, g, unknown or other
ggagcggtgggctacctgttcctaactccccctcagcagaggattctgcagctcagtctctctgcctgttctgtttgaaaattggcccctggaatttctaagcaggtctgtaattagataggtgagcactgtgtaaggagcgcctggtggagaagggagccacgaagaatttcacagtatgcttcaaagccaaagcaggaatgggaaggaagtgctctgtgtgtgaggccgggacacgtggttacaatgtgcctgacggagaaaacacccatgtggatgggcgtcgtgtgtgtggatgggcgtcgtgtatgtggatgggcgtcatgggtgtggatgggcatgtgtggatgggcgtcgtgggtgtggatgggcgtcgtaggtgtggatgggcgtcgtgggtgtggatgggcgtcatgggtgtggatgggcatcgtgggtgtggatgggcatgtgtggatgggcgtcgtgggtgtggatgggcgtcatgggtgtggatgggcatgtgtggatgggtgtcgtgggtgtggatgggcgtcgtgggtgtggatgggtatctgtgtggatgggtgtcatgggtgtggatgggcgtcgtgggtgtggatgggtatctgtgtggatgggcgtcgagggtgtggatgggcgtcgtgggtgtggatgggtatctggatgggcgtcgagggtgtggatgggcgtggtgggtgtggatgggcgtcatgggtgtggatgggcatctgtgtggatgggcgtcatgggtgtggatgggcgtcgtgggtgtggatcggtgtcggagtgtatgggcatccgtgtggatgggcgtcgtgggtgtggatgggcgtcatgggtgtggatgggcgtcgtgggtgtggatgggcatgtgtggatgggcgtcgtgggtgtggatgggcgtcatgggtgtggatgggcatgtgtgaatgggcgtcgtgggtgtggatgggcgtcgtgggtgtggatgggtatctgtgtggatgggtgtcatgggtgtggatgggtgtcgtgggtgtggatggctttctgtgnnnnnnnnnnnnnnnnnnnnnnnnnnnnnnnnnnnnnnnnnnnnnnnnnnnnnnnnnnnnnnnnnnnnnnnnnnnnnnnnnnnnnnnnnnnnnnn

SEQ ID NO: 1576 - protein, 243 aa, Homo sapiens
MGRKCSVCEAGTRGYNVPDGENTHVDGRRVCGWASCMWMGVMGVDGHVWMGVVGVDGRRRCGWASWVWMGVMGVDGHRGCGWACVDGRRGCGWASWVWMGMCGWVSWVWMGVVGVDGYLCGWVSWVWMGVVGVDGYLCGWASRVWMGVVGVDGYLDGRRGCGWAWWVWMGVMGVDGHLCGWASWVWMGVVGVDRCRSVWASVWMGVVGVDGRHGCGWASWVWMGMCGWASWVWMGVMGVDGHV

SEQ ID NO: 1577 - DNA, 937 bp, Homo sapiens
  source
  (1)..(937)
  CDS (201)..(737)
  modified_base (570)..(570): a, t, c, g, unknown or other
  modified_base (594)..(594): a, t, c, g, unknown or other
  modified_base (603)..(603): a, t, c, g, unknown or other
  modified_base (631)..(731): a, t, c, g, unknown or other
  modified_base (814)..(814): a, t, c, g, unknown or other
aatagaaaaaaagagcggaccagttccccatgggcacacagctgcccacagctgctgcctggttacttcctgacagacatgggtttgctgctatgggaacgatgtctgtcccacaggcaaggagtgtccctgtgcccgtgtgcttgctgctaaacagtgacaaggacattaggaaaacagggccttcttaactcttgaggatgacagtgcatgcaccaaagaaaccaaaggagccgttgcctctgctatcatttttcttctttttttttcggagacggagtctcactttgtggcccaggctggagtgcagtgacacaatctcggctcactgcaacctccccctcccaggttcaagcaattctcctgcctcatcctcccgagtagctgggactacaggcacacaccggcatgcctggctaattttcgtatttttagtagagatggattttaccctgttggccagtctggtctcgaactcccgacctcgggtgatctgcccaccttgcctcccaaagtgcttgtattacaggcctccccccctgtgcctgaccctctgttatctttttaatnttttaacacagaaaggggattctntagagtcgncaacgcggggtttgcaagatctagccgnnnnnnnnnnnnnnnnnnnnnnnnnnnnnnnnnnnnnnnnnnnnnnnnnnnnnnnnnnnnnnnnnnnnnnnnnnnnnnnnnnnnnnnnnnnnnnnnnnnnngtttagtcatggaagagaagtaaccggtcattctggactaagtgcagtccaatggctcagctcaaaccggcctgcattagggntaggttgttaagtaaagtttcctgccctgacagcacatgtcttgctgtgaactctaggctggaagtgggcccataaaaggccctcacattttaggagtaaaactgtgggctaagcaccttttg

SEQ ID NO: 1578 - protein, 178 aa, Homo sapiens
  MOD_RES (124)..(124): Variable amino acid
  MOD_RES (132)..(132): Variable amino acid
  MOD_RES (135)..(135): Variable amino acid
  MOD_RES (144)..(177): Variable amino acid
MTVHAPKKPKEPLPLLSFFFFFFRRRSLTLWPRLECSDTISAHCNLPLPGSSNSPASSSRVAGTTGTHRHAWLIFVFLVEMDFTLLASLVSNSRPRVICPPCLPKCLYYRPPPLCLTLCYLFNXLTQKGDSXESXTRGLQDLAXXXXXXXXXXXXXXXXXXXXXXXXXXXXXXXXXXV

SEQ ID NO: 1579 - DNA, 6554 bp, Homo sapiens
  source
  (1)..(6554)
  CDS (201)..(445)
  CDS (1816)..(1974)
  CDS (2025)..(2375)
  CDS (4135)..(4250)
  CDS (6299)..(6354)
  modified_base (63)..(63): a, t, c, g, unknown or other
  modified_base (3149)..(3149): a, t, c, g, unknown or other
  modified_base (3155)..(3155): a, t, c, g, unknown or other
  modified_base (3165)..(3165): a, t, c, g, unknown or other
  modified_base (3179)..(3180): a, t, c, g, unknown or other
  modified_base (4180)..(4180): a, t, c, g, unknown or other
  modified_base (4189)..(4189): a, t, c, g, unknown or other
  modified_base (4193)..(4193): a, t, c, g, unknown or other
  modified_base (4196)..(4196): a, t, c, g, unknown or other
  modified_base (4201)..(4201): a, t, c, g, unknown or other
  modified_base (4302)..(4302): a, t, c, g, unknown or other
  modified_base (4308)..(4308): a, t, c, g, unknown or other
  modified_base (4334)..(4334): a, t, c, g, unknown or other
  modified_base (6523)..(6554): a, t, c, g, unknown or other
gttgcttcatcctgtgggggccgtggccctgtccctgtgtgggtggggccttttccatttccntgacttagaacccacactccacttagaacagggtttgagaggcttagtcagcactgggtagcgttttgactccattcttggctttcttctttttctttccagaaggatttttgtgcagaaatgggtcttttgttgccatgttagtcctccttggaaggcagctcagaaggcccgtgaaacgtcgggggacaggacccccagggagggaatcccaggctacgcactttagggttcgttctccagggagagcgacctcgtcccccgatcctgaccgcccttccggcccacgctctcctgtttggcttccacaggcctggacttctctggcttctctgcccacacactccctgcccccagtgtccctgcccctgccccagcacaggtgacttcatttctgtcctctcagctcagtggactcgctcaacttttgtataagtctccacttggtggcagcagcttgctgatgacttgttttaaaactttcatcctaaataaccttttgatacttgaatatttttaagttttatacataatttctaatttttttccgaacagatccagatacctaataagatgctggaatgtaatccctggacaatccgtgtcctggcagcatttggtctttctctaagcgcctggcttcgctgttctaaggagtgggtcttaagtctctggagaacacaaggacttcaatttgtgctgtcagtggctcttttatggactgtgggcaccaccacagctttgtccctgctgtactgtgtatccccttgcctttctggcttgtggctctgaacaaagcaggtcacccatcccaatttctagagcccccccaccgccacccccacccttatggagcctctatcgtgcaagaagtgtccctgaggcacggaggtggttgtgctgggctcagagccgccgtctgactggttggaagccctgctctgattttgtgaatcaccctagttaagtggaagctcagcgtagcctgttccctctgtgggggtgtgcagaagcactgtttatttttgcccacatcttagagtgataaatggaactcatttatgaattttgacttccaaaagctttccactttctcccttaggaacatggataaaaattgtccacatttgtttttggagacatggattgttacctgaaacctacttttcagatgttcttgatgtgaaaactgttgccaggctgggcgtggtggctcatgcttgtaattccagcatcttgggaggctgaggtgggtgggtctccatttattttttctttctttttttctttcttttttctttgagacggagtctcgctctgtcacccaggctggagtgcaatggcgcgatctccgctcactgcaagctccgccttccgggttcacgccattctcctgcctcagcctccggagtagctgggactacaggtgcctgccaccacgcctggctaatttttttttgtatttttagtagagacggagtttcaacatgttagccaggatgatctcgatctcctgacctcgtgagccgcccgcctcggccttccaaagtttttagaatacaggcatgagtcactgtggctggccttctttttatttattcattctatttgagactgggtttcaccttgtctcccaggctagagtgcgtgggtatcatcataccctactaagaattgatccttctttggtcaaaccatcctttccctctgccctcctgagtttctgggactacagacccgtctccactctagaggatccccgaccagcctggtgccgtactacagcgaagaagagctgatggggaaaacggtggtggtcttatgcaatctgcaaaaagcgaaaatgcgtggtgaaacgtcggaatgcatgctgttgtgtgcggaaaccgatgacggcagtgaaagcgtgctgttaacgccggagcggatgatgcctgcgggcgtacgcgtcgtataaaaagatcggatggcgacgtcgtatcgccatccgatttgatattacgcttcttcgacacttactcgcatggccgccagcgccttacgcgccgctttgatcaccagttcacactgttcaatggtcagtgtcagtggcggttcaatgcggatcgttttggcgttattgagcgttccggccaccagtacgcgctggcggaacatctcgctggcaaagttatagccgatttcgttatcaacaaactcaatcgccatcaacatccctttaccacgcgcttcctgtaccagatcgggatattcccgcgccagttgacggaaaccgtccagcaacatatcgcctttttgctcagcctgagccggtaagttctgctccagcaacacattgatggtcgccaggggacgggagggaacctggacacctactcgaccctgaaagcactaataaagaacaaaatgagaggtttttagggagatgtgcaaattgaaattgatagtctttgctggtggagaattctgggtttccagaaccttgggcccagcctttcctacagctcctgtagacttggccatgttggccacatcactagacgccgaatgcaagtcagtaaatgaatataggaattattatagagggatggaaagcccagtgccttgagtcagacagggcaggtcctcaggaaatggctgaggaggtaattttaccacttggacccacttttaggacttgctggattcttctccgaatgtcctcaaggtcccacagtctctttcccattaggttttattttttcccccttaaatgttttgtttgttttttgtttttaagagacagcgtctggctctgccatccaggttggaatgcagtagtatgatcatagctcactgcaacctcaaaactcttgggctcaggtgatccaccacagccttttcagcagctgggactgcaggctcaaaccactatactgggctaatttttaattttttttttttgtaaatacagggtcttgctgtgttgcccaggctggtatcaaactcctgggctcaagcattcctctagcttcagcctcctgagtagctggggttacagggatgagacacctcaccagggggtacgtagctagggtcgtttcagngttttnttcctacctnaatcagggtttctnnccctcctatgaactccatggatgcacgctgcactctagagcatccccagtccccagtcctgaccccatgggctatgaaaaggaggaagggctcttccagtatgtgctatgtgtaaagctcagaaccaggctccctgggacacccagaaatgaaccagttattcctgccttcaaaaagcacagttggcccagagcagtggctcatgcctgtaatcccagcactctgggaggccaagacgggtggatcacttgaggtcaggagttccagaccagcctggccaacatggcgaaaccccgtctctactaaaaatacaaaaattagctgggtgtggtggtgcacacctgtaatcccagctactcgggaggctgaagcaggagaatcctgaactcctgaagcaggagactcttgaagcttgaactggggaggcagaggctgcagtaagcagagatcacgccactgcactccagcctagagtgaaactccattaaaaaaaaaatccacacaatttctgccatcacatggatgaacattggtaacattacactcagtgaaataagccaatcacaaaaagacgaatgccccaggactggacttacatgaggtatctataatagctgaattcagagacacagatggagaatggcagtgccaggggctgggggcagggaatggggagttattattcactgggtacagagcttcagtcgggaagatgaaaaagttcaagatggacagtagtgatggtcgtacaacaatgtgaatgtagtcaacaccacagaactgtatggataaaaatggttaaaatgttcccctgcttcacttgactggccttaccacccaaagaaacaatttaaaagggttaagacagtaacttttgttatgtgcattttaccaaactttttaaaagttacaaacatggtaaattttaagttaagcaccttttaccatttaaagaaaagcacacagcctagaatcacaaggcagacgtgggtggcccgtngatacaatngggnccnttgcnaagggccattcaattttttccgccttgttggccgagcgccgcgccgtcggtacgttgcgggtgacgggacgcgttatagtgttctgctagtcgccgcacgnggaganatgtttgtaattatgtagatggacgncagcagtggcggttctgagtgctttcattaaaaaacagttaacatcgggtttaaggattagaaagtggggttcgtggtttgtgtctgtgacgtgagactggttgaagcacttcacgtcttcctccgggaagactctcttccccttcccccccgtcactgatgtactctgtgtgcacatcatcgatgagcaggcatggcctgtgcctgtgccgctctgagccttcctaggtgtggcctggcacataatgaggcagatgcattcccaggcaggtagcagctactgagaacagccaaggcgtgtaagctggggagccagtgtccagggggaacagcttttgtcagaagcagcactgaggcgaggggagctgacccacggcctcaggggtctcatgcagggacagaagctgtctggcccaggcaggacacaggctgggcgtgaacctgactgtagttgcctcagaaccacctcatggctgggtgcggtggctcacgcctgtaatcccaacactttgggaggctgaggcaggtggttcatgaggtcaggagcccgagacgagcctggccaacatggtgaaaccccgttgctactgaaaatacacaattagccacagaatggtggtgcatgcctgttatcccacctactttttacgctgagacatcttagcacctcattttttagtaagtacacttgcagatccggagagggcaggtggaggtataatccagtgtcagtctgcagtggtgggcctgccctggccgtctccaaagatgggtgctcttcggaactggcagccccctgcatgctgtctaattgccccaagaaaacagtgacgtgtgtttaggagcatgctcctgttggcctccatttacaggatcctctgtgtcagaggatctcagccaggcgtgattttgttcacaagggacacttggcaatgcctggagacattttggttgtcaaaacagcaggacggcagacgtgctcctgtacctataggtagaggccagggcatgctgctcagcaccctaaggtgcccaggacagctgctcatagcatctgtcgcccaattaacactctactcgtacccatcctcaatttgtaaaaaagggagcaaatagtggatatgaattactcatgcactaggaagaatgaagtattgcatctgaagcaattctagtttgttgtcaaggaagctgaaccaggaggtaatcagaaggtactgtgagcccattagagtgagaaattcaacccaaagaggccatcacctctccaaatcctgccctaccatcaaagaggcgggttctaacagacaggcttcaaagataccaagaggcaacgacgtgagagcaactcctgtgtgtgtccccggggacaatctgatgaagaaagcaaatctagccccttatccaaaaggggaaccatggcatgaaataaatctccctggaagcccacagtgcaaactggctgctctctctgatgcatcaacaattccaggaagcagtgagggtggaggttactacccccatcttacagatgggaatgcgggtccagagaggatcgttgcccagctccgaaatcaacacccacagctgattttcatcatatcccagaagcatgctgcaaggagtgtgaatgaaacaccaagtatacagtaagaggaagtgagctgagcttgcaagtgggtggagaagaaacgcactccccaggcagcctcagggcctcagaagccctgcttccacctcccctagcagaccaagcctgggtggggctgggctcagggattcccatgttttcagcacttcatacctgaacccaacctggaagcaaatgctgctccaagacagttatagccactgaaccaaatgacccaggcagagaggcagcaggaggtggcagacacagaggccattccctgacacctggctctggcttctccaagataagtcattcacccctcctcccctagaaccaaacatgcagctgtcactacagcagggtcaaaatcccatggacggtaagtgaaacttcagtgtaaccttcctcctttcagaagtacattcgacagagggaggtagatcctgttggtccccatgcaaggggtgaagtggttcaagcactatgggagtgggggcacagcaggacccccgcatgctctgctagacatggagctctagagggaaccgtgcccacnnnnnnnnnnnnnnnnnnnnnnnnnnnnnnnn

SEQ ID NO: 1580 - protein, 308 aa, Homo sapiens
  MOD_RES (270)..(270): Variable amino acid
  MOD_RES (272)..(273): Variable amino acid
MLVLLGRQLRRPVKRRGTGPPGRESQATHFRVRSPGRATSSPDPDRPSGPRSPVWLPQAWTSLASLPTHSLPPVSLPLPQHRGSPTSLVPYYSEEELMGKTVVVLCNLQKAKMRGETSECMLLCAETDDGSESVLSDGDVVSPSDLILRFFDTYSHGRQRLTRRFDHQFTLFNGQCQWRFNADRFGVIERSGHQYALAEHLAGKVIADFVINKLNRHQHPFTTRFLYQIGIFPRQLTETVQQHIAFLLSLSRKAHSLESQGRRGWPVDTXGXXAKGHSIFSALLAERRAVEPNMQLSLQQGQNPMDGK

SEQ ID NO: 1581 - DNA, 2580 bp, Homo sapiens
  source
  (1)..(2580)
  CDS (201)..(258)
  CDS (930)..(1053)
  CDS (1380)..(1707)
  CDS (2219)..(2380)
  modified_base (175)..(184): a, t, c, g, unknown or other
  modified_base (719)..(728): a, t, c, g, unknown or other
  modified_base (2349)..(2358): a, t, c, g, unknown or other
catgtttctcatctgctctatgaaaagcaacgtgaagctctgtgagttgaacacaaacatcacagagaagtttctgagaatgcttctgtttagtttttatgtgaagatattcccttttccaaagacatcttcaaagaggaccacacatccacttgcagattccacaaaaagagannnnnnnnnncctgaaatctctccaaatgtccacttgcagaccctacgaaaagcatgtttctcatctgctctatgaaaagcaacgtgaaactctgtgtgttgaacacaaacatcacagagatgtttctgagaatgcttctgtttagtttttatgtgaagatattcccgtttccaaatgacatcttcaaatagtaccacatatccacttgcagattccacaaaaagagagattcaaaactgctctacccataggagggttcaacgctgtgagttgaatgcaatcgtcacatatatgtttctgagaaggcttctgtctagattttatttgaagatgtacccgtttcgaacgaaggccaaagattggtccaaatatccacttgcagatcctacaaaaagagtgtttcaaagctgaactatcaaatgaagggtcaactctgttatttgaatgtcacaacatcacaatatgaattttgtgagaatgcttccgtttagttaggtgcagttatcccgtttccaacgaaatcttgatcctctagtagtcgtannnnnnnnnnactagtatactacattcgactagtgatctgatcacgtagtacgtcagctatcgcatcgacagtactgcagtatcgtcgtgatgtagacgagtcgtaggatcgtcgtatcatgtcgtagtgtcgtagcagtctagtcactcgatccgtctatagatcgtcagtcactagtcgcgtagttcgagtcgatacgtgccctatcagcgacgactagtctacaatcgtcgatagacgtatactatcgagcacagagctatcgagtagagtcgacgatcgatactagtcaagtagactatcatatactcgactcgtcggtaatctactcgacgtactagtacagtacagagcacagcactgacgatagtcagtcgactcgacacgcacgtacgtcatcagatcgactgatatacatcagtctcggtagatccgcgagtcagtcgatagctagcagtcagcgtacagcgagtaccgtcatcatctctatcagagtacagtagcttacatacactacactagagcagtcatcacgtacgtcatccggtgtcacgcaccattcgtacacagtagctcgctcacgtatctccgatcgtaacactagtcccctatcgagcgagtcagcagagtctgaacagatcgaccgtagtcactagatagatcgcgactacagacagtatcagtcaagagatcagctagtcatcgactcctcgagtcctcgcaagtatatatagtcgacacatctagcatcagtctctcttcatcggatcgcaaactcacacacacgtacgcacagctctctagtcgttatatcaccagtatcacgcagcagtcgagctatcgacataggtctctcgtagtcttctcgatgacagagctcgtagtcgtcatcagcacagcacatacaagttcatccgaggccgacagagcatatagtgtcagtatcgatcgtcacagaatactagtcgctgtgtcagttacgtcgatcgtatgtgcgatacgtgcgtgtgcgtgcgtagcaacacacggtgtcagtctatcgatatcatctgagctcgtctagacagtagtcgacagcgtacgcaactcactagtagtagtcgtcgatcgtcagtgtcagagtacacagcgtacgtatcacacagtgtctgcgtagtcagtcatgagtctctagtcgctcaagcagtgagcgtagagcgtccgagtagatagtagtatcagatgctctgtcagcacatactccgtagtagagatcgtgtagcgtaacgtactgcagcgtcgtatagcagcactagtactgatgtgcactgcagagctgctgtactactctgtcacgtcgtgcagctgtagtagtactagtcacgtagcagtcgtgctacagatggcatgcagagcgatcgcagcagcagctatcgtagtcaagtagtagtagcgtcgcagcgatgactgcgcagtcatagcagcagctatgattatgctgctacgacagcttctgctagtacagccctatcagcgatgtgcagcagactgagacgacgacgcgcgtattgatgtcgtcgactgcttccgatgatgacgtcagcatcgacgagcgaatcatagggtacgtcgtaagtacgacatcgtatgnnnnnnnnnnagtgttcaacgctgtgagttgaatgcaatcatcacagagaagtttctgagaaggcttctgtctagattttatttgaagatgtacccgtttcgaacgaaggccaaagagtggtccaaatatccacttgcagatcctacaaaaagagtgtttcaaagctgaactatcaaaggaagggtcaactctgggatttgaatgcaaacatcacaaagaattttgtgagaa

SEQ ID NO: 1582 - protein, 223 aa, Homo sapiens
  MOD_RES (214)..(217): Variable amino acid
MSTCRPYEKHVSHLLYEKQPTTSLQSSIDVYYRAQSYRVESTIDTSQVDYHILDSSVIYSTSRLQTVSVKRSASHRLLESSQVYIVDTSSISLSSSDRKLTHTYAQLSSRYITSITQQSSYRHRSLVVFSMTELVVVISTAHTSSSEADRAYSVSIDRHRILVAVSVTSIYSPISDVQQTETTTRVLMSSTASDDDVSIDERIIGYVVSTTSYXXXXVFNAVS

SEQ ID NO: 1583 - DNA, 1330 bp, Homo sapiens
  source
  (1)..(1330)
  CDS (201)..(1130)
taaagagagcgttgaacttacccattagcatgccatggtgatttctggcttgacactggtcacagcaattaaaagtaaaaagaatgtcacagcacatacacaaatcaggtgcatatagaatttaaggtcaggatattcaagcaatcacaaccagtgatattacaccagcattttaaaaatttctttttgtctgttcagacatgataacttttctgcccatcattttttccattctaatagtggttacatttgtgattggaaattttgctaatggcttcatagcattggtaaattccattgagtggttcaagagacaaaagatctcttttgctgaccaaattctcactgctctggcagtctccagagttggtttactctgggtattagtattaaattggtatgcaactgagttgaatccagcttttaacagtatagaagtaagaattactgcttacaatgtctgggcagtaatcaaccatttcagcaactggcttgctactagcctcagcatattttatttgctcaagattgccaatttctccaaccttatttttcttcacttaaagaggagagttaagagtgttgttctggtgatactattggggcctttgctatttttggtttgtcatctttttgtgataaacatgaatcagattatatggacaaaagaatatgaaggaaacatgacttggaagatcaaactgaggagtgcaatgtacctttcaaatacaacggtaaccatcctagcaaacttagttcccttcactctgaccctgatatcttttctgctgttaatctgttctctgtgtaaacatctcaaaaagatgcagctccatggcaaaggatctcaagatcccagcatgaaggtccacataaaagctttgcaaactgtgacctccttcctcttgttatgtgccatttactttctgtccataatcatgtcagtttggagttttgagagtctggaaaacaaacctgtcttcatgttctgcgaagctattgcattcagctatccttcaacccacccattcatcctgatttggggaaacaagaagctaaagcagacttttctttcagttttgtggcatgtgaggtactgggtgaaaggagagaagccttcatcttcatagattcacaagagcagcattgtgtatcttctagcagaaaacaaacgtgttatatgaagcattttatatttcttactgtgttttctgtaatgtatgtatatgaataactttcaagcatgtacctagaaaagtcttttacctaacgttagtctaaaaaagtgcgtatgtatatatatgtatttttgtgtgtatgtttgtatgaa

SEQ ID NO: 1584 - protein, 309 aa, Homo sapiens
MITFLPIIFSILIVVTFVIGNFANGFIALVNSIEWFKRQKISFADQILTALAVSRVGLLWVLVLNWYATELNPAFNSIEVRITAYNVWAVINHFSNWLATSLSIFYLLKIANFSNLIFLHLKRRVKSVVLVILLGPLLFLVCHLFVINMNQIIWTKEYEGNMTWKIKLRSAMYLSNTTVTILANLVPFTLTLISFLLLICSLCKHLKKMQLHGKGSQDPSMKVHIKALQTVTSFLLLCAIYFLSIIMSVWSFESLENKPVFMFCEAIAFSYPSTHPFILIWGNKKLKQTFLSVLWHVRYWVKGEKPSSS

SEQ ID NO: 1585 - DNA, 916 bp, Homo sapiens
  source
  (1)..(916)
  CDS (201)..(716)
agcaacataaacctgcttgaggtagatttttcttctttttttaaggtggaataggaaggtagttgtgggccttattggaagatataaatatgccatgagatcaaaaggacagctggaagaaccaagggcagctctgatgactttggcagcaggctcttgtggcctttcctctatggagctgccagtggtcttcagtttccatgtttttttttttttttttttttttttttttgagacagagtctcactctgccgctcaggctggcgtgcagtggcgcgatctcagctcactgcaacctccacctcctaggctcaagcgattttcttgcctcagccaccccagtagctgggactacaggtgcccaccaccatgcttggctaatttttgtgttttcagtagagacggggttttgccatgttggccaggctggtctagaacttctgacctcacgtgatccacccgcctcggcctcccaaagtgctggaattataggcgtgagccactgcacctggctaagtttgcatgtctttttgttccaagtctcaaaaatcaggaaagagaatctgatcggcccatgttgggacaagggttcacttggtcaaatgtggctggtgaaaatgtggcaactgggtcctcaaggacagaggacagcatggctaccggtcgcccatcccagtgtcttcccaatgatcctggagaacgaggagtcactctgagtgggaccacaacctccataaggatccagggtactggatgaaggtgtccctttagcggctgatccagaaccctccattgtaccataagaactgcaaatgctttgatcttagctttacacaaacatgctatttctttttactcatttggaaaaaaacaattattgtggccttacttggtgcacaggtgctggtatagatgt

SEQ ID NO: 1586 - protein, 171 aa, Homo sapiens
MFFFFFFFFFLRQSLTLPLRLACSGAISAHCNLHLLGSSDFLASATPVAGTTGAHHHAWLIFVFSVETGFCHVGQAGLELLTSRDPPASASQSAGIIGVSHCTWLSLHVFLFQVSKIRKENLIGPCWDKGSLGQMWLVKMWQLGPQGQRTAWLPVAHPSVFPMILENEESL

SEQ ID NO: 1587 - DNA, 1042 bp, Homo sapiens
  source
  (1)..(1042)
  CDS (201)..(842)
aattagccgggtttggtggtggatgcccgtaatcccacctactagggaggccaaagcaggagaatagcttgaacccgggaggtggaggttgcagtgagccaagatcatgccactgcactccagcctgggcaacagagtgagactcagtctaaaaaaataaaaaataataaaaaataaggaaactgaggctcacagaggggatgtcaatggtcaagattcacagtgagcacagggcagagccaggcctggctcccaggtccacccgctcatacaacaggctcttggccccagctcccactttttttttgagacggagtctcactctatcccccaggctggagtacaatggcacaatctcagcccactgcaacctccacctcccaagttcaagtgattgtcctgcctcagcctcccgagtagctgggatcacaggcacccaccgccatgcccagctaatttttgcatttttagtagagatggggtttcaccccattggccaggctgatctcaaactcctgacctcaggtgatccacctgcctcggcctcccaaagtgctgggattacaggtgtgagccactacgcctcccaactcccacttctaagaggttattccccgggactcccatcctccagggcctgcccctggcttgtaccagccagaaggaaaagaatgccagcctgggagctggggggccagggagtcaggggatctgggagttgggggacctgcaagctgggggccctggtttctgaccccagctcagctctgttgctcacaagcttgagaaccctggacaggtctctctacctcttcatctaccaagcaacaaggatgtattaggtgggatccttctaggtcaaatgtctagagacattttggtcatcaagattaccagtgggcgctccttgcatggagtgagcagaggccagagatgctgctcaacaccctgcaatgcccaggacagaccctatgccagagaatgacctggccccaactgtcactgctatactctcttataaggtactgatgctgagaaaccg

SEQ ID NO: 1588 - protein, 213 aa, Homo sapiens
MSMVKIHSEHRAEPGLAPRSTRSYNRLLAPAPTFFLRRSLTLSPRLEYNGTISAHCNLHLPSSSDCPASASRVAGITGTHRHAQLIFAFLVEMGFHPIGQADLKLLTSGDPPASASQSAGITGVSHYASQLPLLRGYSPGLPSSRACPWLVPARRKRMPAWELGGQGVRGSGSWGTCKLGALVSDPSSALLLTSLRTLDRSLYLFIYQATRMY

SEQ ID NO: 1589 - DNA, 1105 bp, Homo sapiens
  source
  (1)..(1105)
  CDS (201)..(905)
acacacacacacacacacacacaaaccacaaatcatcctcatctttcctggtataagaacatattttttttttgtaagtgtgtgtatcaggagtctgaggagactttatctggattcattgtctggcttaggactttcacaggctacagtaaaattatctgccatgctatggtcatctcaaggcctaactgggacagcatatgtctctaagctcactctcaggctacttccagaatctatatctcttggtggtagctggactaagggcttttgttctagcctctgcctctataaggaaactcacaacagagagatttactttattaaaatcatcaatcaagaaagagccagagcatgctcatgagatgaaagataaggaatcaagtaaaaagatggtgtccttgctgggtatgatggtgcacatcattgatcctagcatgttggaggcagaggcagaggcagaggcagaggcagaggcagaggcagaggcagaggcagaggcagaggcagaggcagaggcagaggcagaggcagaggcagaggggcagagaggcagagaggcagagaggcagagaggcagagaggcagagaggcagagaggcagagaggcagagaggcagagaggcagagaggcagagaggcagagaggcagagaggcagagaggcagagaggcagagaggcagagaggcagagaggcagagaggcagagaggcagagaggcagagaggcagagaggcagagaggcagagaggcagagaggcagagaggcagagagggaggcagaggcagaggcagaggcagaggcagaggcagaggcagaggcagaggcagaggcagaggcagaggcagaagcagaggcagaggcagaggcacctggatctctgtgagtctggggttatcttgatggatggtgagttccatatcagccagggctatatagtgagatcctgtctcaatttttttcctcttaaccaaaatgactggtacattctaaagaagaaaactgggattcctatcctacaacacatgtaaaaatgaactcaaaatggctaaatacaaacatttgaaagataaattttcgatgccttttctgtgtctatgttt

SEQ ID NO: 1590 - protein, 234 aa, Homo sapiens
MSLSSLSGYFQNLYLLVVAGLRAFVLASASIRKLTTERFTLLKSSIKKEPEHAHEMKDKESSKKMVSLLGMMVHIIDPSMLEAEAEAEAEAEAEAEAEAEAEAEAEAEAEAEAEGQRGREAERQRGREAERQRGREAERQRGREAERQRGREAERQRGREAERQRGREAERQRGREAERQRGREAERQRGREGGRGRGRGRGRGRGRGRGRGRGRGRSRGRGRGTWISVSLGLS

SEQ ID NO: 1591 - DNA, 853 bp, Homo sapiens
  source
  (1)..(853)
  CDS (201)..(653)
  modified_base (264)..(363): a, t, c, g, unknown or other
acagtgctacagtaaccaaaaaaaaaaaaaaaaaaaaaaaaaaaaaaaaaaaattcttggtcctggtcccaaaacagacttccagaccaagggaatggaacaaaaacctaaaaaacaatgccacacatttataaccatttgattttcgacaaacctgacaaaaacaagctttgggaaaaggattccctgtttaataagggatgctgggaaaactggctagccttatgcaaaaaactgaaactggaccccttccttacaccttannnnnnnnnnnnnnnnnnnnnnnnnnnnnnnnnnnnnnnnnnnnnnnnnnnnnnnnnnnnnnnnnnnnnnnnnnnnnnnnnnnnnnnnnnnnnnnnnnnnagtctttaacagatactgcccgtatacctaggatttgcctaaaacagtgggttttgttgttgttgttgttgttgttgttgttgctgttgttcttttttttgagatggagtctcactctgtcacccaggctggagtgcagtggcgtgatctccgctcactgcaagctccgcctcctgggttcacgccattcttctacctcagcctcccaagtagctgggactacaggcgtccaccgtcacgcccggctaaatttttgtatttttagtagagacggggtttcaccatgttagcaggacggtctcaatctcctgacctcgtgatctgcccacctgggcctcccatagtgctggggtttacaggcatgaaccaccatgcccggccaacagtgcttttaaatatttaagataatagtcaacttttaaaactatgtagattttacatgaaaataatttttttctgcatctcatttttttgttgttgttgttagaaa

SEQ ID NO: 1592 - protein, 150 aa, Homo sapiens
  MOD_RES (22)..(55): Variable amino acid
MLGKLASLMQKTETGPLPYTLXXXXXXXXXXXXXXXXXXXXXXXXXXXXXXXXXXSLTDTARIPRICLKQWVLLLLLLLLLLLLFFFLRWSLTLSPRLECSGVISAHCKLRLLGSRHSSTSASQVAGTTGVHRHARLNFCIFSRDGVSPC

SEQ ID NO: 1593 - DNA, 1045 bp, Homo sapiens
  source
  (1)..(1045)
  CDS (201)..(845)
ttctgttgttttaaacggttggtgttgggatagaaaggcccatgggtctccttctgcctctgcgtcctggcttccacaatgcagacaaaacttaaaaattctcaggggcttctcattttagcgtgggtggcagaggcctggagaagcccgaggtcacttcagaccggccacctccttggaccttcccttcctgacataaaatgatgactgtaatggaggctctgcactcagcccgtggagacaggccagaagcgctttgctacagtactaatatagcgcacgttttgctcatgagacggcactcagaagttctcggcatgattagaaagtgtatcggtcagaatgcgctaggccatgctatggcaacaaacaggcccccagatctcaatggctgccagcaggatcagcaaatggtttctgtaaagagtgacgtgtacttttgttgttgctattgtttttggagacacagtctcactctgttgcccaggctggagtgcagtggcgcgatctcggttcactgcaacatccacctcccaggttcaagcaattctcctgcctcagcctcccgagtagctgggattacaggtgcccaccgccatatccagctaatttttgtatttttagtagagacagggttttgccacgttggccaggctggtctccaactcctgacctcaagtgatccacccgcctcagcctcccaaagtgctgacattacagttgtgagccaccgtgcccggctacttttaatatatattttaggctttgcaggccattcagtctctgtcgcaactcctcaactctgctattgtaacacaaaagcgtggcagacagcacaccaatgagtgggctgcattcctataaaatgatattgagaaattgcccacaggctggcgtctgctgaccgccagcttcagataaccaacgtttgtcttcttcttgtgccacacatgcaaggagtgagggcccgctccagacgtgctccagggacccaggctgatggaggatcgagtcccacccagacctccatcatcatggaggccag

SEQ ID NO: 1594 - protein, 214 aa, Homo sapiens [sequence omitted]

SEQ ID NO: 1595 - DNA, 877 bp, Homo sapiens
  source
  (1)..(877)
  CDS (201)..(677)
  modified_base (271)..(370): a, t, c, g, unknown or other
tagctactcaggaggctgaggcaggagaatcacttgaacctgggaggcagaggttgtagtgaagtgaacagagatagtgccactgcactccagcctgggtgacaagagcaaaactccatcaaaaaaagagagaaagaaaaagaaaaagaaagaaagaaagaaagaaaagaaagaagaaagaaagaagaaagaaagaaagaatgaaagaaagaaagaaagaaagaaagaaagaaagaaagaaagaaagaaagaaagagagaaagaaagaagnnnnnnnnnnnnnnnnnnnnnnnnnnnnnnnnnnnnnnnnnnnnnnnnnnnnnnnnnnnnnnnnnnnnnnnnnnnnnnnnnnnnnnnnnnnnnnnnnnnnattgtgctttttggttttggggggttttttgaaacagggtgttactctgctgtccaggctggagtgcagtggcacaacctcggctcactgcaacctccacctcctaggctcaagcaatcctgcctcagcctcccaagtaaatgggactacaggcatgcaccgccacacccagctaatttttgtattttctgtagagacagggtgttgccattttgcccaggctagtctcgaactcctaagcgcaagcaatccatctgtcttggcctctcaaagtgctaggattataggcatgagccactgcacctgaccagtaatacatttgtgtatatatacatgggttaacataaaaatgtttgtgctatcagctgaaagggcataaaagaaatgacacctcagtagcaacaagcacacctaatgcctagatcttggtttctaatactgtcctccagtaaagaaagcaggaatctttgagaaatagttgattctaggactggagcaagaaatata

SEQ ID NO: 1596 - protein, 158 aa, Homo sapiens
  MOD_RES (24)..(57): Variable amino acid
MKERKKERKKERKKERKKERKKEXXXXXXXXXXXXXXXXXXXXXXXXXXXXXXXXXXLCFLVLGGFLKQGVTLLSRLECSGTTSAHCNLHLLGSSNPASASQVNGTTGMHRHTQLIFVFSVETGCCHFAQASLELLSASNPSVLASQSARIIGMSHCT

SEQ ID NO: 1597 - DNA, 874 bp, Homo sapiens
  source
  (1)..(874)
  CDS (201)..(674)
tatagttttaaactcagattgctcttttacccctagttcagggtttttactaaattctataaaacacaagagagggagccatggaatgacaaataggccctatcatgaggcaccaaactgctgaatcacataggcagtagagagctaattcattatctcagttagcataagggtttttatttttaaccaagggaaaaaaaatgaacaagctcacaaaaaaaccttcagaaaccctgaactactgcgtctcgtataaaaagaacaagtcattttgttttcatgaagcacctggaatatatgctcagagaagttcatggtgccaaagatatagagacaatgttttcaaagggtgggaagggcaggtgagagggaaaaaagagaaaggggaaggaggaaaggagggaaggaaggaaagaaggaaggaaggaaggaaggaaggaaaaggaatggaaggaaggaagggaaagaaggaaagaaacaaagaaagaaagagaaagactattcccttgagaaagaagataaacagaggaataccctggggcggcctcctcctcctagggatcaataggtcttcatctttgtctttcagaagctgctgtagaagagaaaaatatttctttcaaaaaataaatcacaaatactataaacatataaacctacatatgtactcataaaaattaagaataaatataaataaaaaccaaaaattaatacatcttttttattaacaaaaaaatctctagcaattgcttgtgaaatggtatctttaatgagtgaggtaattttgacagatagacatagtattctgcagaaactgaaaatattatatttcatgcaaatcaaaaccacaatgagataccatctcacactactc

SEQ ID NO: 1598 - protein, 157 aa, Homo sapiens
MNKLTKKPSETLNYCVSYKKNKSFCFHEAPGIYAQRSSWCQRYRDNVFKGWEGQVRGKKEKGEGGKEGRKERRKEGRKEGKGMEGRKGKKERNKERKRKTIPLRKKINRGIPWGGLLLLGINRSSSLSFRSCCRREKYFFQKINHKYYKHINLHMYS

SEQ ID NO: 1599 - DNA, 928 bp, Homo sapiens
  source
  (1)..(928)
  CDS (201)..(728)
agggccccccgcagccccaggtgagctagcccgagagcaagacctgcatgaggccggacagggaaagtggcctggggcgaacagaggcggggaggcggggctgagcgagcgagggggatcccccaggagcaggaggagctgggcaaggggggcggttgcggggaggggtggatggttcggaatgggcgtggtcttgccgaatgggagggtctaacgcgagtggttggcgtcccgcgcggggcccaaagtgtgacacgggtgggcttggaaccgggaccttagctactggtggggctgaagcccaccctgccattgttctgccacggtcagtggggcttgctcctccctatgggaagcacttacggccgggagcgggaatcccgtcaccaccgcggtggggaagccgcacggaaatccacggggtgcggacggtgccatctcctggaagttggccagagaaccccactctgtccgcaaatcgctcttatttaataacaactatcatcgattgtgatcctaacctgggcctcctgcctcccaggcaatacccttttccgcctggcgcggcctctctgactcgagtggggatggggagcaccttgtacatttcagaggatcctccgggcctacagggagaagggccatcaggcctcagctcccccagggtctctgccagttcttctctgcctgtagcccttatctggctgcagcctccacgccttccctgagcctggcaccctgttagcccagagtgttgtggtaactagacccggttgacagaggacatcatgcttctgggtcgtgagtggaccctgatatctcgagtctccttcttcaatagacccacaatgaggggcaccctccccctccacctcgcaacgaccatgcagggagtaccggctgaggtgcaagtggccaataggaacgg

SEQ ID NO: 1600 - protein, 175 aa, Homo sapiens
MGGSNASGWRPARGPKCDTGGLGTGTLATGGAEAHPAIVLPRSVGLAPPYGKHLRPGAGIPSPPRWGSRTEIHGVRTVPSPGSWPENPTLSANRSYLITTIIDCDPNLGLLPPRQYPFPPGAASLTRVGMGSTLYISEDPPGLQGEGPSGLSSPRVSASSSLPVALIWLQPPRLP

SEQ ID NO: 1601 - DNA, 1435 bp, Homo sapiens
  source
  (1)..(1435)
  CDS (201)..(1235)
  modified_base (1040)..(1139): a, t, c, g, unknown or other
  modified_base (1145)..(1145): a, t, c, g, unknown or other
ctccatgttgtcatttaatccatgaagtagaccaacccagatgttgtcctcactctaaggactcagccctgttgcaagaagccaagtggcagccagaaagagggcggtgggagtgtgagcgcctgtccccatgtccggctgtatcgtgagggtcctggccgccagctcacctcatggcccggctcagcttctcgtaggtcatgttgctgttctttttcttttggccccatagttgggccacagcctcggagcgcaggaacttgaagacgccttcatgccgattctcccacttcatgaggccctcgttgagctccgggtggatgaggatgtcccggatgaactcccacaggtgggtgcctctgggcgctgcaaggccagcctccatcagtttgccatccaagtgtcccctctcacccaagggcagccagccctgcccgccccagtgcactgctgacttggccacagcatgcagcaagcctctccagagaccccgcagtgccctctgtgcgggtactgcagtgactgcttttctcctcagcccacctaagacccaccagctgcctcctcacattgagggtgtcccagagggcaggacagtggccaagtgcagagagaactggagtcagtggacaggacactggagtcagtggacaggactctggtaccatgagcctcccactgggagccttatttcctcctcctctccaggaccaccaagccaggctctgcaattaggtggtgaccgataccatagagcccccagcttgtgcacagccttaccaaaggccatgcggaggccagagaaaacgggagaagggatacctgcaacaacccgcagtgccccaggaagccgctcagcccggcgcagggaggacccacgtgcccccggagctcaccgtgcttgctcttcttgccctcgagacagtcccagtactctttgctcagctttcggggccggcctcgtttgcgcttcccgtgcttgggatcccccttcttgcagtcacgaaaaccatctgtggggactgtggtggaaggtcaannnnnnnnnnnnnnnnnnnnnnnnnnnnnnnnnnnnnnnnnnnnnnnnnnnnnnnnnnnnnnnnnnnnnnnnnnnnnnnnnnnnnnnnnnnnnnnnnnnntcgggncgccctcttggggacctccctcgactcaccgctggggaagagcttgccatcagtgggatccaggtccacgtcacttccaccggagtctgaggagtgggagctccgagaagcaccagtccctggggggcggggtcagagtaagtcccctgccggcccaccctctgctcaaccacgctgctggctctcaggacacacttcccagcctgttcctgttcctgccagaaggcctgagttatggtgctgggagccagagggaacaagggacacttcggggaagggaggttgtggcc

SEQ ID NO: 1602 - protein, 344 aa, Homo sapiens
  MOD_RES (280)..(313): Variable amino acid
MLLFFFFWPHSWATASERRNLKTPSCRFSHFMRPSLSSGWMRMSRMNSHRWVPLGAARPASISLPSKCPLSPKGSQPCPPQCTADLATACSKPLQRPRSALCAGTAVTAFLLSPPKTHQLPPHIEGVPEGRTVAKCRENWSQWTGHWSQWTGLWYHEPPTGSLISSSSPGPPSQALQLGGDRYHRAPSLCTALPKAMRRPEKTGEGIPATTRSAPGSRSARRREDPRAPGAHRACSSCPRDSPSTLCSAFGAGLVCASRAWDPPSCSHENHLWGLWWKVXXXXXXXXXXXXXXXXXXXXXXXXXXXXXXXXXXSGRPLGDLPRLTAGEELAISGIQVHVTSTGV

SEQ ID NO: 1603 - DNA, 1054 bp, Homo sapiens
  source
  (1)..(1054)
  CDS (201)..(854)
cccactaattccacatttgatgtcatttctgggtcccttttgggtgactgatttttctccttaagttaaatatttcttgttccttgtttgtctagtaaatttataactgggtgtcagacattgtgaattttacctggtgctggatgtttttgtcttctgttaaatattcttgaacttttttctgggatgcaattaaatttatggtgagcactttgttctttcatgtcttgcatttaagctgggttaggtgggatcaaagcagtgttcagtttagagttaattttcttttactagtggacttcaccaaaatgaaaaacttttgctcctcagaaaacattctttttttttttttaagacggagtctcactctgttgcccaggctggagtgcagtggcacaatctcagctcactgcaacctccacctcccaggttcaggtgattctcacacctcagcctcccaagtagctggaattacaggtgcacaccgccatgcctggctaatttttgtatttttactagagacagggttttgccatgttggccaggctggtcttgaactgctgacctcaggtgatccacctgccttggcctcccaaagtgctgggattacaggtgtgagccatccaaaacctttttttttttttttttttgagacagagtctcacactgtcacctgggctggagtgcaatggtgcgatcttggctcactgcaacctccacccccgggttcaagcgattctcctgcctcagcctcccgagtagctgggattacaggcgcccaccaccacgcccagctaatttttttgttttttcgtagagacggggtttcactatgttggccaggctggtcttgaactcctgacctggtgatccgcctgcctcggcctcccaaagtgctgggattacaagcgtgagctgcccacccagcccagaaaacattcttaaaaaatgaagacaagccacagactggagaaaatagtttgatgatatacatgtgaaaaaggacttgtatccataatatgcaaagaacccttaaaacccaataataataaaa

SEQ ID NO: 1604 - protein, 217 aa, Homo sapiens [sequence omitted]

SEQ ID NO: 1605 - DNA, 868 bp, Homo sapiens
  source
  (1)..(868)
  CDS (201)..(668)
  modified_base (223)..(322): a, t, c, g, unknown or other
tcattccaaccctggccccttccaaatctcatatcctcacatgtcaaagccaatcatgcctttgcaacagtcccccagtcttaactcatttcagcattaactcaaaagtccacagtccaaagtctcatctgagacaaggcaagtcacttctgcctatgagcctgtaaaatcaaaagcaagctacttacttcctagatacaatggaggtacaggcattgggtannnnnnnnnnnnnnnnnnnnnnnnnnnnnnnnnnnnnnnnnnnnnnnnnnnnnnnnnnnnnnnnnnnnnnnnnnnnnnnnnnnnnnnnnnnnnnnnnnnnggagtgcagtggcatgatctcggctcactccaaactttgcctcccggattcaagtgattctcctgcctctgcctcccaagtagctgagattactggcatgcaccgtcatgccctgctaatatttgtatttttaatagagacagagtttcaccatgttggccaggctggtttcaaactcatgacctcaggtgatccacccgcctcggcctcccaaagtactgggattacaggtgtgagccaccacgcccggccaacattactttcaaaaacaataagacaaagcttttcggctatatgtatcctctcagattttctagaagaaaattatattgtttgcaaacaatgacagttttgtctctttctttataatatttatacatttttctttctctttcacattgactggaacctccaagaaaatgttgacaagaagcagtgttattgaacatcttgcttttgtttttgactttatagatactttcaccatctacataaaagtttccaacttttttttaccatgtcccacagcaaaaaacaaacagaaaa

SEQ ID NO: 1606 - protein, 155 aa, Homo sapiens
  MOD_RES (8)..(41): Variable amino acid
MEVQALGXXXXXXXXXXXXXXXXXXXXXXXXXXXXXXXXXXECSGMISAHSKLCLPDSSDSPASASQVAEITGMHRHALLIFVFLIETEFHHVGQAGFKLMTSGDPPASASQSTGITGVSHHARPTLLSKTIRQSFSAICILSDFLEENYIVCKQ

SEQ ID NO: 1607 - DNA, 1737 bp, Homo sapiens
  source
  (1)..(1737)
  CDS (201)..(377)
  CDS (872)..(1537)
  modified_base (1265)..(1364): a, t, c, g, unknown or other
ggacaaaaaggaaacagaatggggggctggggtcaaaatgtgccaaaatcaaatcaggcacagaagcacagtgctggctgagcccttggccagctctctgggaggggacactcctggcactataagggatccacaagtgccctttaaagctgggtcctaaaagggccctggaagggccaggccttgtaagtcctcccaacatgctggtggcccggagacagcaaagagtggagaagggagaaagcggggatggctccgaactgcctcttctcccccccagactccagcacttgcacaaccaactaaacacacccagacacatggcctcattgtctgatacacaggaaggcacacacatctgtacacacaggttcgtggttaggtgcactgatgcacacagcctcattgtatacaatttacacacacacacgccctcccagtagatgtatacaacacattcaatccgccagttgggtggtgtagtcacacaatcatacacactcacaaactctgtcaggagtgaacaggcatagaacctctccaggctcatgctcacgcacacacattccacaacccctcagtcaggcccatacaaacctctaatacacacaacacaaactcacagcctgtcaggaaaaaaagcactcacaacatctccgttaggtgcgcaaacccttacaatctcacaacctctctgtgaggtgcacacatatccttacaatcactctgtccgcgtgtgcacacacacatacaagtgcacacacttagaacctctgtgttaggtgcacacacaggctcacaacttctctgcgggcgtgcgcgcacacaaactcacaacctcccggttagatgcacacacactcgctcccagtctctccgccagcccctgcacactcacactggctcagtcggcacacgcactctggcagcctcgctctcctccgggcgcaccccacacccacgcaccctccgggccctgtgcacccctcccccaggcccatgccggcgcccggcagtgaactccagcggcgcggggtgtgcgctcgcccccagcccgcggccgcctgcgcccctcctcacctttctcgcccgcgcccggcaaccggccctcgtcctccttggggttggtcacctgggtgatgatggccgggccgtcctgggtgccggcgcggcggccgcccgcaggcccggccccccgcaagccaagcgcgcgggggcgcggcgcggggggcgcgggggcgcggcgcgggggggcgctcgcagcnnnnnnnnnnnnnnnnnnnnnnnnnnnnnnnnnnnnnnnnnnnnnnnnnnnnnnnnnnnnnnnnnnnnnnnnnnnnnnnnnnnnnnnnnnnnnnnnnnnnctgtttcgttttgttttaatgagaagagtaaaatagaagagtttctgcttgcaacattctgcttcaaacaggcatcagctctcatgcatactcacagatgttttgggattaattgtgaagatgtcatccaattgtatgtttgtgttgttcccttcctgctatcatggctctgatagcctaaatgagtgatttaatactgtgtgaattttgcattggtttataagtgtgttgtttcattaaaaaaaaaaaacagagaaaagcaaggaatacttagaaagcttctttgtatcaactgacagttaatcattcagatggaaatatgcacgttaaaatgtcattgctgacagcctatagtttttagctgtacaatttg

SEQ ID NO: 1608 - protein, 280 aa, Homo sapiens
  MOD_RES (191)..(224): Variable amino acid
MLVARRQQRVEKGESGDGSELPLLPPRLQHLHNQLNTPRHMASLSDTQEGTHICTHRFVSLRQPLHTHTGSVGTRTLAASLSSGRTPHPRTLRALCTPPPGPCRRPAVNSSGAGCALAPSPRPPAPLLTFLARARQPALVLLGVGHLGDDGRAVLGAGAAAARRPGPPQAKRAGARRGGRGGAARGGARSXXXXXXXXXXXXXXXXXXXXXXXXXXXXXXXXXXVSFCFNEKSKIEEFLLATFCFKQASALMHTHRCFGINCEDVIQLYVCVVPFLLSWL

SEQ ID NO: 1609 - DNA, 16554 bp, Homo sapiens
  source
  (1)..(16554)
  CDS (201)..(481)
  CDS (8090)..(8178)
  CDS (10566)..(10637)
  CDS (16134)..(16354)
aatggtgtcattcaccttgatgaggggtcagggtagcggatggtgcgagcatcatgagtcaccagatgagggattccttttgtgcccacaaagatttttctcactttgcacaacttgtacttggtctcctcaggtgtacagcaaagcaacctttggtgtcacggatcagatggaaattctctcctgtcttgtcaatgctgatgacatccatgaacccagcagggtatgttatatcagttcggaccgtgccatcgatctcaatgaaccgctgcatgcaaatcttcttaagtctgttccttaggaaaatgatgaggggaagacactctctcaacttgtggggactggtggacggacgaggagcaaacacaccggtcaatttatccagcatccaatgctttggagctgctacccgcttcagatgcttcttggcaccacgagccatggctgcattaggcaaggaaaagaggacctttgtcttccggtgcacatagcgaaagtttcttaacagcaatttggttgcccaggttctgtgatacctggaaggaagggagtgccctggataccaaacacaaatactgtagtcactggatagatacatcccattaaagtgagtaacttggccatgagttcatggatagatacgtcctcattaaagtgagaaacttggccgtgagtttgtggatagatacatcctcattaaagtgagaaactcggccgttgaggtcgtggatagatatatcctcattaaagtgagaaactcggcagggagttcgtggatagatacatcccactaaagtgagaaactcggccgtgagttcttggatagatacatcgcactaaagtgagaaactcggcagggagttcgtggatagatacatcccactaaagtgagatactcggccgtgagttcgtggatagatacatcccactaaagtgagaaactcggcagggagttcgtggatagttacatcccactaaagtgagaaactcagcagggagttcgtggatagatacatcccactaaagtgagaaactcagccgtgagttcgtggatagatacatcccactgaagtgagacactcggccgtgagttcgtggatagatacatcccactgaagtgagaaactcggccgtgagttcgtggatagatacatcccactgaagtgagaaactcggccgtgagttcgtggatagatacatcccactgaagtgagaaactcggccgtgagttcgtggatagatacatcccactgaagtgagaaactcggccgtgagttcgtggatagatacatcccactgaagtgagaaacttggccgtgagttcgtggatagatacatcccactgaagtgagaaactcggcagggagttcgtggatagatacatcccactaaagtgagaaacttggccgtgagttcttggatagatacatcgcactaaagtgagaaactcggcagggagttcgtgggtagatacatcccactaaagtgagacactcggccctgagttcgtggatagatacatcccactgaagtgagacactcggccgtgagttcgtggatagatacatcccactgaagtgagacactcggccgtgagttcgtggatagatacatcccactgaagtgagaaactcggccgtgagttcgtggatagatacatcccactgaagtgagacactcggccgtgagttcgtgtgccctgctctttcagggtctgatcaccctaggtgaactcatacaggttatgacctgcacagctcaattccacacctatgatcctgcaagccttacctggatcttagctataaaaagcctctttcatggggacttccccatcaagccttctctcctataacctccaaacaatctctgtttccaatgaattaaaaaaaaaaaaaagtttaagaccaccaccactttaccaaatacttaaatttggggcaaaaaaaataaaaataaataaatcaggagtggtataataaattagatatagaaggctgaagattggccctgtaacctgatcacccacttgcaactctgaaatcagcatcctttttcctacaaaaaaatctctgtatctcttccagcgtttttagcttcactctaacatagggagtctttatttatttatttatttttttattttttgagatggagtttcgctctgtcgcccaggctgtagtgcagtagtgcgatcttggttcactgcagcctccacttcccaggcaagcgattctctgcctcagcctccagagtagctgggattacaggtgtgctccacgacgcctggttaatttttgtatttttagtagagacacggttttgccatgttggccaggctggtcttgaactcctggcctcaagtgatcccccctccttggcctcccaaactgctgggattacaggcatgagccaccgtgcccggctgcatcaggggtctttaaccactgtgttcaaagtcacatcatctatgactcttcctggtccctgcatcaagtcctaaatattctccctctgcttcatctcaagactctatcccttctctctatgtcctaaatattctccctctgcttcatctcaagactctatcccttctctctatgtcctaaatattctccctctgcttcatctcaagactctatcccttctctctactccttgttcaggccctcactgctctgcactggagctgactggtctctttattcccaggatctcccgtcactccccatcccacagcctgtgtttctctagacaaactgaaccactgatttttccctaaacaaagccatcaatggcagggcacaccaggggtactcaggtcaaacctacacgagatcatctgcgagacagaaggcccatggttgattcgcctcaactgacttacacgagaccacctgtgagacagaatgcccatagttgatttgcctcaactgttgcccacaggctgcgaaaacgggtagagcatgaaatgggaggttgtagagtcagacagatctagggctgaaccccagctctaccactcaccaacgatgcatcctagaacaagtttctcagcctcactgagtctcagttttctcatctataagatgggtaatcgcaaagataataatgaacataaatcctagttcataaggttgtggtgagggctaaattagagtgctgacacaaaggaaccagcacactgctggcactgaaagagctcaacaaagatcacttctcccctcactcccacctcttcctcccttcagcacagcactgtccaggaaagcaagctgctttaaaataagacatctcataacttgggagtaaactgtcactgcaaaccccctcggttggaagaggaagcatactccagaacacagattagcatcataaggatatcaataaatgcaatcaactccagcaaaagcagcatcggatactctcgctgatcttcacgctttgagggcccctggtgctgctgggtgtggtgcacccttggggaaggacgagggcccctgggtgctgctgggtgtggtgcatccttggtgaaggacgagggcccctgggtgctgctgggtgtggtgcacccttggggaaggaccacagaaaatccaggtccctaggactatgctcagtgctcttcatacgtttaattctcacaacaaccctgtgaggcaaatgccattattcttattttacagttgaagaagctggaattctgagacaactgacagacaggacattattgagtctgaatctgaacccaggatccagcacttcccagcgcctcccatggaggaggagaaggtgaatgctggattctcggtcttcggggcaagcttctgagcacaacaccgggggacacaaatttgtcaggggagaactcaaccaaaaccacatacacagatcatgggcggggacatccctcctccctccatccctccctcctcccggctccaggaccattctcagcgtgcatcgagctacataccgtacatctcgatggagaaatgcatgataccaataccaagaaatgttagagaaaggaaaatccaaaatgactaggaaactattttcagaaaggagaaaaaaaaaagttgcagctgggcacagtggctcacacctgtaatcccagcactttgggaggccgaggcgggcggatcatgaggtcaagagattgagaccatcctggccaacatggtgaaaccctttctctactaaaaatacaaaaaattagccgggtgtggtggcaggcgcctgtaatcccagctacttgggcggctgaggcaggggaatcgcttgaacctgggaggcggaggttgcagtgagccaagatcgcaccactgcactccaaggctggcgacagagcaagactccatctcaaaaaaaaaaaaaaaaaaatacccaaaaaacaaaacaaaacaaaacaaaaaagttgcctatttaaaactagggctgcaaacacagggcagcagagatggtgagccaccactgaccagcagctccccttgaattgatctgaacgcattcatagggggcttgctttagagatgcagatgactctggttggcaggaggtgccattattagaaaaagctcattattagaatgcctagatgagaagctcacttcctcttttggtgcaaaaaggttaggaagaaaccagaactcaccatttgctctgatttttcagctttgtctttgatatctttgattttgccaaagagttgttggatagctttctgagcctcttcaagcgcctagagtaagggaaatacatgaaaaacaaaaagtggctagagacagctccagtcactaactgtaatcaatgctaggcacaaaagaaatttccatgaagctctcctgattcattgtacttatgccaacaatttttctggaccaaaatagtagagacctatagagtccagtggctgcgaacaggtaaacactcgggactcttaccaatgttcctcacaaagtttcaacttaaaactaaatgattcccctctacctcagtcattactgtacatgttattgataacagcaaataggacaagtagatctctgtgtgtgggtgtatgcaaagactcacacagagggacaggggtagctctaaattggggcaagggaaagctctggacttggaagttccagattgtgcattcaaaaaaacctgaaccgtgaatggggactccagaactgcaacaaatcttaaagactttcatagtaagccatttgaaaaccaatgaaatgcacttagaaaggaacactgggccggacacagtggctcacgcctgtaatcccagcactttgggaggccaaggcgggcagatcacgaggtcaggagatcaagaccatcctggctaacatggtgaaaccccatctctactaaaaatacaaaaaactagccaggcacagtggcacgcacctgtagtcccagctactcaggaagctgaggcagaagaattgcttgaacccgggaggcagagcttgcagtgagccgaaattgcgccactgcactccagcctgggtgacagagcgagactccaaaaggaaagaaaagaaaagaaagagaaagaatgaaagaagaagggagagaaagagagacaaagaaagagaaagaaagaaagaaagaaagaaagaaagaaagaaagaaagagaaagaaagaaaaaaagaaagagaaagaaagaaaaaaagaaagaaagagaaagagaaagaaaggaaggaaggaaggaaggaaggaaggcaggcaggcaggcaggcaggcaggcaggcagaaagctaatggtggctcacacctgtaatcccagcacttcagaggctgaggcaggaggattgcttgagcccaggagttcaagactagcctggggaacatggcaagactcggtctctgcaaaaaaaaaagttagccaggcatggtggcgcacaccagtagtctcagctacttgggaggctgaggtgggaagattacttgagcctgggaggtcaaggctgcagtgaactgtgatcatgccactgcactccagcctggtgactgagtgagatcttgtctcaaaaaaacaagcaaaaagctaatggtgagcccagcatttccactgaaataaaaacctacaaggacagatgctacacaatgaaagtattacaacacagctgcagcttctgctaggaggggaagcaacatgagggcagttgtgacatgtggagaccagaaagttcctgtgagtgccagcaggccacagacgtgtacagaccaaatgcactggaccgtccgtgagtaaagactacccacagctaaagtacctgtgagtgccagcagcccacagacgtgtatcgaccacatgcactggaccatccgtgagtaaagactacctacagctaaagtacctgtgagtgccagcagcccacagacgtgtatagaccacaggcactggaccgtccgtgagtaaagactacctacagctaaagtgtctgtgagcgtgtcagcaggccacggatgtgtatagaccacatgcactggactgtccgtgactaaagactatgaattcctgaggcagttatagttctaggcacgagtcagcatctccttaattcactccttcaatcactcaatgagtatttactgaatgcctcccatataccaggcatgattctaggcattgggaatccaatggtaaacaagacagtatggtctctctctctgtcctcaaggaatgaacttactttgagaagtaagggggaggagatcctggaaaaacaacaaaataaagaaacaagataattcccaagtgtggtgaattgacaggtgtggtgaaggacttatgcagtgatgagaataagggagatggtggtcacagaaggtctcctgagaaagggcacacaaatcgggacctgcaggatgaggaggtgtgagaatttgtagatttggagtaagatgattttttttttcttgagatggagtctcgctctgttgcccaggctagagttaagtggcgtgatctcagctcactgcaacctctgcctcccaggttcaagcaattctcctgcctcagcctcccgagtagctgggactacaggcacctgccaccacacctggctaattttttgtatttttagtagagacggggtttcaccgtgttggccaggatggtctcgatctcctgacctcgtgatctgcccgcctcggcctcccaaagtgctgggattacagacgtgagccgccgcgcccagcctggagtaagaggattttcagcagagagaaaagcaaatgtgaagatcctgacagagaaaagacctcggtgttttggaggtccgaaaagacagacagtaggtggtagtgcaatattgcagcgggaagtgtctggaaataatctggagaggtgggcacgagccagagcacggaggcctcaaagcataaggattctgctctaagtgccaatgagaagccactgaagggtctaaacaagggacagatgtatggcttacttgtataagactgtcctggctgctgtgtggcaaaggggctgtgcaggggcaggagggaaagcgggagtgaaagctctgtgagaagttgctgcagtgtccacgagacggtggaggcctagaagaggcagccggtgctgacgggaagacgccgagcgattcagggtttccaggaaggtacaatgtgtaggactcactgatggactgtgtgtgggtgatgagggagagggagaaccaaggatgacgcccgggttttggttgaaaagccaaggccagggttcactgactgaaccagggaatgcaggaggaggacgggcttgacaggcaggtgtgtgtggtggtggcggggctggaagtgaagagtcccatctgcaatacgttacgggtgcctgtgctatggctggaatgcatccccaaagttcatgtgttggaaacataatccccaatgcaatggtgttggcaggtggggcctttacgaggtgaccaggtcatgaggggtttgccctcacgaacaaatgaatggcattatctcgggagtgggttcttgataaaaggatctgttcagccactttctcgtgcatgcacacactttcttgccttccaactctgccatgggacgacgcagtgagaaggccctcgccgcaggacgacatggtgagaaggcgctcgccgcgggacgacgcagtgagaaagccctcgccgtgggaagatgcggtaagaagcccttgcctgatgtgggccccttgaccttggacttcccagcctccagaattataagaaatctcttttctttataaatgattcagtctgtactattctgttacagtaacataaaacagactaagaaaactggtatcaagaagtgggctactgctatagtaaatacctgaaaacatggctttggagctgggtgatggacagatgtggaacagtcttgaagtgaaggctggaaaaagcctgtattgctgtgaacagagtgctaagggggattctgctaagggctcagaagaaaagcagaaatgtagagaaagtctggaacttcttagaaattacttcatggttgtgaccggagtgttggtagaaatacagacagtaagctgggcatggtggctcacgcctgtcatcccagtactttgggagcctgaggcgggcggatcgcctgaggtcaagagttcaagacagcctggccaacatggtgaaaccccgtctctactaaaaatacaaaaattagatgggcgtggtggcgggcacctgtcatcccagctactcgggaggctgaggcaggagaatcacttaaacccaggaggcggaggttgcagtgagctgagatagcaccactgcactccaacctgggtaataagagcaaaactctgtcccgaccaaaaaaaaagatagcttacttgagatcaagtagagacattaagttggacataagattctggagcttggaagagaggtgataggttgggatttaaattcagaagtcattactttagagatgatatgtaagtctgtaagattagaagtcacctaggaagacagaatacacaagagaagaaaagatggcacagggctgacccttgggcatgccaatattcagaagtctaaaataaaaaaaagcagagatgcagagaaaaaccaccagtgacatgagaaaaaatcagggacgatgggtgttacagaagccaaacagaagtgtttgaaggagaaggaaagagtgattgtgccttctgttgttaaacactcatgtaagaggctgggcgcagtggctcaggcctataatcccagcactttgggaggccagggcgggtggatgacctgaggtcaggagttcaagaccagcctgaccaatatgatgaaaccctgtctctactcaaaatacaaaaattagccgggcgtggtggcaggcgcctgtaatcccagctactcaggaggctgagacaggataatcgcgtgaacccaggaggcagaggttgcagtgagccaagatcgtgccactgcactccagcctgggcaacaagagcaaaactccatctcaaaacaacaacaacaacaaaaaactcatgtggatcatgaggtcaagagtttgtgaccagcctgaccaacatggtgaaacccctgtctctactaaaaatacaaaaattagccaggcatggtggtgtgcacctgtaatcccagctactcaggaggctgaggtaggagaattgcttgaacccaggaaacggaagctgcagtgagccaagatggtgccattgcactccagcctaggcgacagagcaagactccatctcaaaaaaaaaaatgaagacagctgctactgattttgacaacagggaagttgttggtgaccttgacaagagcagtctcaatgcagtcaagggaatggacagcgatgacatgaagtagaggctgtgatcacagagcaggccacaaatgatggcctgtgggctgaagccagtctgccacgtctgccacctgtttttgtaaacaatgtgtttttggaccgaaactcattaataatacttaaaccaaactcatttgtttaagtattgtttatggggacttttgccacacaatggcagagataaatagttacaacagagaccatatggtcagtaaaggctaaaatatttactatccagcccttaacagaaagcttgctgaccctggtatagacttttttttttcaagaagtttttgctatgagaaaggaagaaaaatagggcaaaagatggcgtaaagggagtaatttttaaagatgagaaatgcttgcatacgtctgcttgggagtgatttagcaggagagaaatttatttgggggggcaatgggttaattacagaagaggactgttttaaacataatgttctggggggggcaatgggttaattacagaagaggactgttttaaacataatgttctggggggggcaatgggttaattacagaagaggactgttttaaacataatgttctgcggagggggcaatgggttaattacagaagaggactgttttaaacataatgttctggggggggggcaatgggttaattacagaagaggacttttttaaacataatgttcttgaattgtttagtgcaggggaccccaagccctgggccgtgggccagcaccagtccgtggcctgttgggaactgggccgcacagcaggaggtgagcggtgggcaagtgagtgagcatgatcttctgagctccccctcctcagatcagcagcggtattagattctcataggagcgcgaaccctactgtgaactgcacacgcgagggatctaggttgcaagctccttaacagaatctaactaaggcctgattatctgaggtggaacagtttcatcctgaaaccatgtccccctccctggtccatggaaaaactgtcttccaaaaaactgctcgctggtgccaaaaaggttggggaccactggtttagtgtatgagtattagccctttagcagggttataagtatcctttagaatggggaccaaggatatgaacagcactcctatagagcccatagctgagccaatcatccatttggtttaccggggacacgctgcgtttatgattcagtatagttattaacagctccctctccttctcaaagtgactctggtgataaatcatatggtcacctcacctacagcacctaagcaaggctatggcacagtgggaccttgacaaatattgcccactgattaaaagtatcatggtgcacctgtaagagtgctggtgctgaggctaccgctctgaataagtgcgctcataaccattcctctaacttcaggcccaaccatgagcagtggttcaaaatcacagcttcatgctttctgtaagtattctctatttggcttaaacagagtctaatatccaagatgctacatgggatcagtaaattctaaaaaagtttcaatcgtggagtaaaaagtgcaacagaggcctctgtaggcaactgaccactagaaaggactgatctttttcgacacagctcacatggaattctgtgatactgcaggtcatgtcatgttatggtgacatgctaatgggaccatagctactgtgttctagacaaacaccctaaaacatatgacatgcagctaagaaaggcaaaaaaggggctaagttatacacttaggtctcacatatgaagaagtctgcatgatcctatctcagagaaagggtttctatccctttctctcttacattaaacctggcatcctaccagaactgtctctgctgaaggtatcgcttttttcttccagcaaacaaataagactcacacaatcttacatgtcacagtctccaagatagataaactatgtgccagacttttttcgggctggaatacttttgcttgttttaataaggtactgaagttggggaaatgtactataattcattttgcagagtttaaaaactcctctgaagcactggtgctatcaggcaagtccattctcaacacacaccctaatatttgacatctaacctctgatcatgagtcatatagaaagattgttttgcaactggaagaatcatgggtcctacaagaagttaaggtttttttaagaaacacaaaaataccttcactacctggctaatcagaaatgtgctgaaagaatcactctggcactgtccctagacactttttaaaataaaaacgtggttggccgggggggcagtagctcacacctataatcccagcacgctgcaaggctgacggtggattacttgaggccaggagttcaagaccagtctgaccaacatgacgaaactccgtctctactaaaaatactaaaaaaattagctgtgtgtgctagtacatgcctatagttccagctactccggaggctgaggcatgagaatcacttgagcccaggaggcggaggctgcagtgagccaagattgcgccactgcactccagcctgggtgacagagacatactctgtcttaaaaaaaaaaaaaaaaaaaaattaggccaggtgcgatggctcatgcctgtaatcccagcactttgggaggctgaggcaggtggatcatgaggtcaagagatcaagaccatcctgcccaacatggtgaaaccccatctctactaaaaatacaaaaattagctgggtgtggtggcgcatgcctgtaatcccagctactcgggaggctgaggcaggagaatcacttgaaccagggagtcggaggttgcagtgagctgagatggtgccatcgcactccagcctggtgacagagcgagactccatctaaaaaaaaaaaaagaagaaaaaaaagtaataataaaaaaattaaaaggtggctactttccattccaagctgtatgtggattaaaaacagaactaatcactcccaaaaatgtctgcatttaatctaccccactagagtttctgaacggagcactggagctacagcttacatctaaaggtgttataaagcagtgactgttgtggccctttttaggactcaaattctatacacacacagcctgcatcctaaagtgttataaagcggcgactgtgtttaatctgcccctactggagtttctgaactgggcactggtgaactgggcactggtgaactgggcactggagccacagcctgtatctgacggtgttataaagcggtgactgccgtgctcctcttttaagactcaaattctgtaaacaggagatgaaaagcaacccactgaattagcctagaaggctcagcaaaaccaattccagcatctttgtatttctgtgcatcctaatggtaaccactactctgaattctccttgcctcctggaggagacggtgagcaggctctcaaagccacagaaggtcacgtgtggaagataaggagtatggaacctggcacagactctcctgctttcttctttctctttttcctttttttgcagaactgttgtctgccacgttagtagacagaggggctctgattcattggcagtgccttaagaaatgagcatccctctggctctcaggtccatctaattttgcagtctgcgccatcagagaatgatgctgcctttatcctgtgagtccgcaggcagcctttcagagattttaaaccgagatcccctttgtggccactgcaggaaggaggaaaggttgttcattttccgaagagctggtatggctttagactgttctgtgaaaaaataaggtgctattattcacggttactggggagaaaattagatttttccactattttgctaccatttctgttttccaacttgacatctatctgctggttcccttttctattatatggaaaagcaacgtgctgggccaggtgcagtggctcacgcctgtaatcccagcactttcggaggccgaggcaggcaaatcacctaaggtcaggagttagagaccagcctagccaacatggtgaaaccccgtctcttctaaaaatacaaaaactagccagccatcatggtacacacctgtaatcccagctactggggaggatgaggcaggagaatcgcctgcacctaggaggtggaggttgcagtgagccaagattatgccactgcactccagcctgggcaacagagtgagacggagaaagaaaagaaaagaaaggaaagaagaaaggaaaaggaaaagggaagggaagggacaaaaagaaggaaggaagggagggaggaaggaaaaagaaaaaaagaaaagagagacaggaaagaaagaggaaagaaagaaagaaaagaaagaaaagagaaagagggagggagggagggagcaacatgctgtatgagttacaagcaagggattttcaactagcagactgggattcaaaccttggctctgccagttactgtgtgatttctgtcaagcctcttatcctctaggaagtagtttcataatttccagaatgcaaattctatcagctacctgaaaggtagtaaggaatgtgagagtagaaaatatgtttggaatcgtttacccaacactcttcccctccgcatgcgaaatcttcctttcaccgtgtttctacagagtctgctgtccaagagctgaccaggccctcgttggagcagttttcccatgactttttttttttttttttgagacagagtcacgcttcgtcgtggcatgatctcagctcactgcaacatccgcctcctgggttcaagtgattctcatgcctcagcctcctgagtagctgggattacaggcacccaccaccacacccagctaatttttgtatttttagtagagacggggtttcaccatgttggccaggacggtctccatctcctgacctcatgacccgcttacctcggcctcccaacatgctgggattacaggcgtgagccaccagaatgagaattgggaaaaagagtttgtctttcgcgggtggtaggagtcccaagaagtgaaactgagttagagagcagctaggttccccaggaagggcaggaggctggactacaggtagagatgatgagggtgacacacacacacacacacacacacacacacacacacacacacacacaatctctctctcacacaatctcaatctctctctctctctctctctctctctctctctctctctctctctgagctttactcccgtctttggcttcagctgtttgacaagcccagctgagacgctatccttctggcggtcacacttgttgaacttcttcaaacgagacacaacaggatccttccaaataatcccccttttgcctaagcccgtttgaattgggatttttgtcttctgcaaccaagagagtcttgaatgagtttataaagcactcagctcacagaaagtgctcacttaatggcaactattagtattcccacatctcctagatggagtaggatatttcagatgagactaccctctaagaatcagaggttgttactcatcttttagagctttgtaaataagatggctaagttcagtatctgcaggcagactcagaagaacggctcatggattaagaggatggaatctttgaaccatgctgaaaatgagacattctccagaaaaaaattgaagtcttttgttcattcattcaattaaaaagtgagtgcctattacatgtactgtgctagatactgagagaaaaagatcactagctagggaatgtatctttaaagggcttgtaaggaatacatgtctgaattatacacaaaatgatacaaagagcgatgaataaagaatggcagcggccgggcgcagtggctcacgcctgtaatcccagcactgtgggaggctgaggaaggtggatcacgaggtcaggagatcgagaccatcctggcgaacacggtgaaaccccgtctctactaaaaatacaaaaaattaaccgggcgtggtggcgggcgcctgtagtcccagctactcgggagacttaggcaggagaatggcgtgaacccaggaggtggagcttgcagtgagccgagattgtgccactgcactccagcctggggcacagagcaagattccgtcgcaaaaaaaaaaaaaaaacaaaaacaaaaaaaaaacaacggcagcatcatttcgaaagccaggaggtcctccagagagcagaaacatggatgagtgctaccacatctgataagccctacacggaagccctcaccacatccactgagggtggacaccaagggtcaagtcgcctctctttagagaaagtctcttcttttgttactgctgaccaccccggcatcactgagagctgttgctatggaaacgaggtatccccagctgaaacagaggtgcttcagccagcctcagcaatgctaacaatgcagcccgctctccacgacggtgctcaacagcagcagaggctgcgggactctcacacacccagcctcagcaatgccaacaacgcagcccactccccatgatggtgctcaacagcagcagaggctgtcggactctcacagccacagatggctgcacgtctacagctctttgcttccctacgtgtccgagaactcaaccaggactgccctggtcaaatgccagatggcgcccatcagatgagaatcactgatgtttacacaaattcctccacaccacttaggaacctggagtgtaagaaggc

SEQ ID NO: 1610 - protein, 220 aa, Homo sapiens
MTSMNPAGYVISVRTVPSISMNRCMQIFLSLFLRKMMRGRHSLNLWGLVDGRGANTPVNLSSIQCFGAATRFRCFLAPRAMAALGKEKRTFVFREKALAAGRHGEKALAAGRRSEKALAVGRCGDPKPWAVGQHQSVACWELGRTAGEKVSSFVTADHPGITESCCYGNEVSPAETEVLQPASAMLTMQPALHDGAQQQQRLRDSHTPSLSNANNAAHSP

SEQ ID NO: 1611 - DNA, 5730 bp, Homo sapiens
  source
  (1)..(5730)
  CDS (201)..(387)
  CDS (465)..(565)
  CDS (854)..(1101)
  CDS (3176)..(3548)
  CDS (4092)..(4237)
  CDS (4927)..(5530)
  modified_base (6)..(6): a, t, c, g, unknown or other
  modified_base (9)..(9): a, t, c, g, unknown or other
  modified_base (45)..(45): a, t, c, g, unknown or other
  modified_base (63)..(63): a, t, c, g, unknown or other
  modified_base (90)..(90): a, t, c, g, unknown or other
  modified_base (114)..(114): a, t, c, g, unknown or other
  modified_base (116)..(116): a, t, c, g, unknown or other
  modified_base (121)..(121): a, t, c, g, unknown or other
  modified_base (123)..(123): a, t, c, g, unknown or other
  modified_base (216)..(216): a, t, c, g, unknown or other
  modified_base (218)..(218): a, t, c, g, unknown or other
  modified_base (257)..(257): a, t, c, g, unknown or other
  modified_base (260)..(260): a, t, c, g, unknown or other
  modified_base (321)..(321): a, t, c, g, unknown or other
  modified_base (345)..(345): a, t, c, g, unknown or other
  modified_base (356)..(356): a, t, c, g, unknown or other
  modified_base (368)..(368): a, t, c, g, unknown or other
  modified_base (377)..(377): a, t, c, g, unknown or other
  modified_base (430)..(430): a, t, c, g, unknown or other
  modified_base (478)..(478): a, t, c, g, unknown or other
  modified_base (497)..(497): a, t, c, g, unknown or other
  modified_base (519)..(519): a, t, c, g, unknown or other
  modified_base (521)..(521): a, t, c, g, unknown or other
  modified_base (568)..(568): a, t, c, g, unknown or other
  modified_base (602)..(602): a, t, c, g, unknown or other
  modified_base (631)..(631): a, t, c, g, unknown or other
  modified_base (657)..(657): a, t, c, g, unknown or other
  modified_base (662)..(662): a, t, c, g, unknown or other
  modified_base (665)..(666): a, t, c, g, unknown or other
  modified_base (671)..(671): a, t, c, g, unknown or other
  modified_base (677)..(677): a, t, c, g, unknown or other
  modified_base (712)..(712): a, t, c, g, unknown or other
  modified_base (717)..(717): a, t, c, g, unknown or other
  modified_base (727)..(727): a, t, c, g, unknown or other
  modified_base (736)..(736): a, t, c, g, unknown or other
  modified_base (743)..(743): a, t, c, g, unknown or other
  modified_base (748)..(748): a, t, c, g, unknown or other
  modified_base (774)..(774): a, t, c, g, unknown or other
  modified_base (793)..(793): a, t, c, g, unknown or other
  modified_base (809)..(809): a, t, c, g, unknown or other
  modified_base (827)..(827): a, t, c, g, unknown or other
  modified_base (832)..(832): a, t, c, g, unknown or other
  modified_base (3144)..(3144): a, t, c, g, unknown or other
  modified_base (3451)..(3451): a, t, c, g, unknown or other
  modified_base (3470)..(3470): a, t, c, g, unknown or other
  modified_base (3530)..(3530): a, t, c, g, unknown or other
  modified_base (3796)..(3796): a, t, c, g, unknown or other
  modified_base (3806)..(3806): a, t, c, g, unknown or other
  modified_base (3835)..(3835): a, t, c, g, unknown or other
  modified_base (4889)..(4889): a, t, c, g, unknown or other
  modified_base (4891)..(4891): a, t, c, g, unknown or other
  modified_base (5230)..(5230): a, t, c, g, unknown or other
  modified_base (5490)..(5490): a, t, c, g, unknown or other
  modified_base (5522)..(5522): a, t, c, g, unknown or other
  modified_base (5573)..(5730): a, t, c, g, unknown or other
attgantcnacacacgacgtcatcgtctacagtcggtacaatcantcacgtgactcatcgtcncgtccgtacgtactaatacagtcattncgtatacgtgtatcatactagtcngntatcntngtctctacgtacgtcgtctgagagtcatactatcgtatgctcgctcgtccgtgcgacatctcctctgacatatcgatatgcccatcatcagtngnctgattgagctcgactctcagtacgtcctgtgctctgantgntcgatatacatcgctgatctcatcacatggtatctcgacacttctcaccgagcactgtcantcgctcgtgactatcagttgatcnatatgcgtgcntgtcgtagctantgtactgcntcatctatctgtacgtagcgctacgtcagtgatagttagcactactacgtcgngatactctgtcagtagtatcgtctgtacacacagctactcgactcacnagctacgctgatatactcntgctgcgagtctatcagacgancntcatccgtcactcacctcttacactgacacgcactaggtacgtagtnagtcgtacagatcatcttgatgcatcagtcagcntgacactacgtacttcagtacgacacctngtcatcatctctgctatcacgtcacntcgcntcnngtcantcatantatctactcgtacactgctctagtaccggatcaanctggntagtcaccgnatgcgtgcngtcacgntgacntagtagtgtagcattagagagtcgcngcattcgtcaatgtactangacattactagtccgntactattactactcagcntgatnctccgtccggcgcgtcgctagctagtcgttctgaagcggcggccagagaagagtcaagggcacgagctacggccatgcctttcttggacatccagaaaaggtttcggccttaacatagatcgatggttgacaatccagagtggtgaacagccctacaagatggctggtcgatgccatgcttttgaaaaagaatggatagaatgtgcacatggaatcggttatactcgggcagagaaagagtgcaagatagaatatgatgatttcgtagagtgccggttttttttttttttttttttttttttttttttagaacaaataggatggagcaatcctttatttttacacactttgacaaggaggtttgtcgtaaacaacctttccagtggagaacagagaacaggaaaatcagcctccagacatcagcagctgctctgttcagggccgaggactcccctggtgctctcctttgaccccatgaagactcaattggactcacctttggactgatcgtgtacacttacctggtaccccacccgggtggaaaatcgatgggcccgcggccgctctagaagtactctcgagaagctttgttgaattccggttttttttttttttttctttttttttttttttagaacaaataggatggagcaatcctttatttttacacactttgacaaggaggtttgtctgaaacaacctttccagtggagaacagaaaacaggaaaatcagcctccagacattattagctgctctgttcacggccgaggcttccccttgccaatgcggtgaggtggaagggtgtactttcccttcttttatcaccttatcccgctgcttactgatggccctggacgtttaatcgttttctgccgaccaaacccttttcgaaaatattataatctaatcctgaattttttttcggcctatgtttaccggtttccttggcacattctattcatccttttttcaaagctatgcattcaccagtcctcttggtcggcttgttaacactctggatcggcaaccttttatctttgttaaggccgaactttttctggatgttccaacaatggtttggccccagcttcgtgcccttggatctttccttggcccgtgttttagtaacgatttatttattaaaccccccccggaacacaggtgtcgtgaaaactacccctaaaagccaaaatgggaaaggaaaagactcatatcaacattgtcgtcattggcacgtagattcgggcagtccaccactactggccatctgatctataaatgacggtggcatcgacaaaagaaccattgaaaatttgagaaggaaggctgctgagatgggcgggggtcatttttgctgtcaccagcaacgttgccacgaacgaacatccttgacagacacattcttgacattgaagcccacattgtccccaggaagagcttcactcaaagcttcatggtgcatttcgacagattttacttccgttgtaacgttgactggagcaaaggtgaccaccataccgggtttgagacaccagtctcactcggccacaggaacagtaccatttatgcagactcgaaattaacctcactaaagggaacaaaagctggagctcgcgcgcctgcaggtcgacactagtggatccaaagaattccggaacacaagtgtcgtgaaaactaaccccaaaagccaaaattgggaagggaaagaatcctatccacaatgtcctcaattgacacataaatttcgggcaggtcaccaataatgggcatccgatctattaaatcggggggattcgccaaaaaaaccattgaaaaatttttgaagaaggtccctcacttgggaaagggtccctctcaaaagacctgggccttggttaacataaaaattaaccgtaaactagggttgaccattaaaatttccttctgggatttttagtaccgaccaagacctatttggactaacagtgaaatgccccaggaccacaggagaactttttccaaaaaccaaaatttttcaggggaccatctccaggcctgactggttgctgggacccggaatatgttggcttgcctgggtgagttggggggaaattttgtaaaacctggggggaatcctccccaaagggaaatctggggacagaaacgccccgagagaaagcccatatggcgccctttccttggggcgttttagagaacaacctcgcgggataggttggaggaaccaaagactataagaatgatgtccaggggagttttgaacccacaaaatatagggaatttcgcaacactgatagacccccccgcggctancccccttcgaaccgtgtacgactcactatagggcgaattgggtacacttacctggtaccccacccgggtggaaaatcgatgggcccgcggccgctctagaagtactctcgagaagctttttgaattcgggggtcatttttgctgtcaccagcaacgttgccacgacgaacatccttgacagacacattcttgacattgaagcccacattgtccccaggaagagcttcactcaaagcttcatggtgcatttcgacagattttacttccgttgtaacgttgactggagcaaaggtgaccaccataccgngtttgagaacaccagtctncactcggccaacaggaacagtaccaataccaccaattttgtagacatcctggagaggcanggcgcaggggtttgtcaggtggaacgaggtggtggtagggatgcagtcccagagcctcaagcagcgtgggttccacttgcatttgcattcctaaccggtgacttttccatcctttgacccaaggcatggtaacactttgcttccgcatgttgtcaccatttcaacccggaaatggcacaaatgctactgtggtcggggttgtagccaattttcttatgtaagtgctgactttcttaaacaattcctcatatctcttctggctgtanggtggctcantggaatccatttttgtaacaccgacaatnccgggtcctatttggctggcactgcctaggcactttcacaggtatttcatcctaatcctcacaacagccctatagaggtaatcattggtcccagtttacagaagccttgggtgggagattattgcttgatatacttctatttgccacacattttgttggcaagacgttcgtatcggctggtgattcactggtcaagaagctctcattggccaggagttcctatttgttggctgtaagattcaataatcaaatctagatttttccccccggggtgtcgctggagaagtaccgcggatcggtgtccctggtggtgaatgtggccagcagagtgcgcttcacagaccagcactaccgaagccctgcagcagctgcaggcgagacctgggcccccaccactttaacgtgctcgcttcccctgcatccagtttggccaacaggagcctgcagcacaggaagatttatccaagcgctgaagtaaccgcacgaaagggaacaaaagcctggagccgcgcgcctcaggtcgacactagtggatccaaagaattccgggtcctaatttggctggcacctgctaggcactttcacaggtaattcatcctaatcctcacaacagccctatgaggtaatcattggtccatttacaaaccttggggtgggatatcttgtatactctatttgccaccatttgtgcaaagttgttcgtggtgatcctggtcaactccattgcagagtctattttgcgtaaatcaataacaaatcagaattttcccccaggatgtgggccatgggtgagagtaagggcggagagtcaaggggctctcccctgtgaggcacccaattgagtttgcattggtcaagccccacacgagatgggcggggaaaaaggaggataggaaggaggagacagccgtggggtaataaggcctgcccgcctgcagttgggattgagcgtcccgcacgaagggcggtgggaacaagggggcggaagctacctccgagctggcacagattagggccccaaaggcccgaaagaaccttttccaatgtggcttcncncatagacccttggaatcgaatacgactcactatagggcgaattgggtacacttacctggtaccccacccgggtggaaaatcgatgggcccgcggccgctctagaagtactctcgagaagctttttgaattccggggtgtcgctggagaagtaccgcggatcggtgtccctggtggtgaatgtggccagcgagtgcggcttcacagaccagcactaccgagccctgcagcagctgcagcgagacctgggcccccaccactttaacgtgctcgccttcccctgcaaccagtttggccaacaggagcctgacagcaacaaggagattgagagctttgcccgncgcacctacagtgtctcattccccatgtttaacaagattgcaggtccccgtacttggtgccaatcttgccttcaggtcctggcccaaacttttgggaaaggacccaactggaacttttgggaggtcctaataaccccaaaatggaagggtgtaagggcttgggaaccaacctgggtaatggaagaggtcagaacccagatcacagcgctcgtgaagaagctcaatctactgaaacgagaggactataaccaccgcgtctncttcttcaccaccttatcccgcccacctgtgntgggctgaccaatgcaaacttcaatggtgcttcaaaaggagagacccactnnnnnnnnnnnnnnnnnnnnnnnnnnnnnnnnnnnnnnnnnnnnnnnnnnnnnnnnnnnnnnnnnnnnnnnnnnnnnnnnnnnnnnnnnnnnnnnnnnnnnnnnnnnnnnnnnnnnnnnnnnnnnnnnnnnnnnnnnnnnnnnnnnnnnnnnnnnnnn

SEQ ID NO: 1612 - protein, 552 aa, Homo sapiens
  MOD_RES (6)..(6): Variable amino acid
  MOD_RES (19)..(20): Variable amino acid
  MOD_RES (41)..(41): Variable amino acid
  MOD_RES (49)..(49): Variable amino acid
  MOD_RES (56)..(56): Variable amino acid
  MOD_RES (74)..(74): Variable amino acid
  MOD_RES (81)..(82): Variable amino acid
  MOD_RES (271)..(271): Variable amino acid
  MOD_RES (297)..(297): Variable amino acid
  MOD_RES (540)..(540): Variable amino acid
  MOD_RES (551)..(551): Variable amino acid
MPIISXLIELDSQYVLCSXXSIYIADLITWYLDTSHRALSXARDYQLIXMRACRSXCTASSISTRLTSYADILXLRVYQTXXIRHSPLTLTRTRYVLVVLKRRPEKSQGHELRPCLSWTSRKGFGLNIDRWLTIQSGEQPYKMAGRCHAFEKEWIECAHGIGYTRAEKECKIEYDDFVEANWVHLPGTPPGWKIDGPAAALEVLSRSFLNSGVIFAVTSNVATTNILDRHILDIEAHIVPRKSFTQSFMVHFDRFYFRCNVDWSKGDHHTXFENTSLHSANRNSTNTTNFVDILERXGAGVCQIFPPGVSLEKYRGSVSLVVNVASRVRFTDQHYRSPAAAAGETWAPTTLTANWVHLPGTPPGWKIDGPAAALEVLSRSFLNSGVSLEKYRGSVSLVVNVASECGFTDQHYRALQQLQRDLGPHHFNVLAFPCNQFGQQEPDSNKEIESFARRTYSVSFPMFNKIAGPRTWCQSCLQVLAQTFGKGPNWNFWEVLITPKWKGVRAWEPTWVMEEVRTQITALVKKLNLLKREDYNHRVXFFTTLSRPPVXG

SEQ ID NO: 1613 - DNA, 2332 bp, Homo sapiens
  source
  (1)..(2332)
  CDS (201)..(238)
  CDS (803)..(1746)
  CDS (1870)..(2132)
  modified_base (1341)..(1343): a, t, c, g, unknown or other
  modified_base (1392)..(1491): a, t, c, g, unknown or other
cagctgatttatctaataatagcagtagcaatgaggtatcatcctgtcactgtactccagcctggatgacagagtgagaccccacctcctaaataaagtagtaggtgcagcagctaatccttatataacaccagacattattctaaacttcatttactatacaactttatgagttaggcactactatcgctgttttactgatgaagagagtctcagagaggataagtaacttgcccatgtgacacagtaaggagtgaagattctatgtacagcagcctgacttcactgttttttttttttttgagacggagtcttgctctgtcgcccaggctggaatacggtggcgtgatctcggctcactgcaacctccacctcccgggttcaagcagttctctgcctcaacctcccgagtagctgggattataggtacccgccaccacgcccggctaaattttgtatttttagtagagacgggatttcaccattttggccaggctggtcttgaactcctgacctcgtgatccacccgcctcggcctcccaaagtgctgggattacaggcgtgagacaccgcgcccggccagtcattactcttaaacacatccatttacatgcctgggtatcagttggttcctccaatggacgcttaaactcacccactttagtatatgatacacatatatctaatttaagggaactgtatccattttactcagtttaatggatactagtactatgtagaatgaataataaggagagagcaggagggaggtgataaatatggggcagttgtgaacctataggcccgccgcggagcccagcagcagatgcgcctgtgggctctggggggcagaagggagggaccgcaggctggtactcggcagcctcgcggcggccgggagctcaggcgcaggcgcggcccggctgtcaggcgctgatgcgcggggccacctgcagaggcctcctcaccctgtccccgggatgtcccctagacgcggacccccgtgccctccttgccctgtgctgtcacagagtgacctgaatcctcccacgccaaaaagatgggtggaagaaagtatttccaaccctccccccgatcatcccttacccagggagagccgctggcccctcagcagggggctgcgcacagcggtggagcgatctgcggctttgtttctcaggcacctgttgtggatcccaaatagaaacgtcgcccttggggatccgggaccgggcagccagtgtccgggggtgggcgtgcttggccgcacggtccaccagggtgggcgggcctggggagggggcctggggcgcgtggctctgcctgggaagggaggggccnnnaggcgccggggccggggcttggccggccggggcgctggccggcgggctnnnnnnnnnnnnnnnnnnnnnnnnnnnnnnnnnnnnnnnnnnnnnnnnnnnnnnnnnnnnnnnnnnnnnnnnnnnnnnnnnnnnnnnnnnnnnnnnnnnngggatgctgaggtcggcggcggccgcaggacgatgcgcggggcccgggcggccgcggcggcggcgttgctcctccccactcgccgcgtccccggcggggctgcgcccgggggctgcgcacggacgggggcgggggcgcctggggagggaggggagaggatcccagccgccgagtcgcagcctcgtcgctgtctgctgagtcatggcaagcgctccccgcagccctggatcactcgcgtagcgcggctggcgcggggtgcgcagccattgggctgggcgcggggccgcgagcgccaggcatgacgcgctgagccgcgctcacccgtgcccgccgtcccggcgtgcgcccagcgcgggtgcctgtgccgccgccctccagccccgccgtcgagtcgccctcgcctcgcccgcaccatgatcgccgcggctttcctcgtcttgctgagaccctacagcatccaatgtgccctcttcctcttgttgcttctgctgggcaccatcgccaccatcgtcttcttctgctgctggcaccgcaagctccagaaagggaggcatccgatgaaatcggtcttctcgggtcgttcaagaagccgaggtaagacacgccgcgacgggtttctgcgggctaccaggaacaattaagccgatttggagagtgaagcgcggctcgctcccttctcctcggctgcccctagccccatcattgcccactccccaggctgagtgcgtttctttaacgccccttgccctttttgccgtcacctccgccctccagtctcccaggtttgaataaccacggcgatgccgagggcagggaggggaggaaagaactcaaattttta

SEQ ID NO: 1614 - protein, 414 aa, Homo sapiens
  MOD_RES (193)..(193): Variable amino acid
  MOD_RES (210)..(243): Variable amino acid
MKRVSERISNLPMPAAEPSSRCACGLWGAEGRDRRLVLGSLAAAGSSGAGAARLSGADARGHLQRPPHPVPGMSPRRGPPCPPCPVLSQSDLNPPTPKRWVEESISNPPPDHPLPRESRWPLSRGLRTAVERSAALFLRHLLWIPNRNVALGDPGPGSQCPGVGVLGRTVHQGGRAWGGGLGRVALPGKGGAXRRRGRGLAGRGAGRRAXXXXXXXXXXXXXXXXXXXXXXXXXXXXXXXXXXDAEVGGGRRTMRGARAAAAAALLLPTRRVPGGAAPGGCARTGAGAPGEGGERIPAAESQPRRCLLSHGKRSPQPWITRVARLARAPPSSRPRLARTMIAAAFLVLLRPYSIQCALFLLLLLLGTIATIVFFCCWHRKLQKGRHPMKSVFSGRSRSRGKTRRDGFLRATRNN

SEQ ID NO: 1615 - DNA, 2483 bp, Homo sapiens
  source
  (1)..(2483)
  CDS (201)..(311)
  CDS (480)..(1253)
  CDS (1300)..(1421)
  CDS (2016)..(2283)
  modified_base (890)..(989): a, t, c, g, unknown or other
  modified_base (2334)..(2433): a, t, c, g, unknown or other
ccctgatgtgcgcccccattgtagaggaagtgcttatcgggtcacctgttttcagtaaataaagcgcgtttctttgacgctgtaacggtaacacagcggctcacgaatgtgatcacgcctgcattctccatttttagcctacaggattgagaaaaacttttgctatagtttagtaaaattttaccctaagggaggaagcaatggaaaccgtggcttacgctgattttgcacgtctggaaatgcgcgtcggaaagattgtggaagtgaaacgccatgaaaacgccgacaagctgtacatcgtacaggttgatgtggggcaaaaacgctgcaaaccgtgaccagcctggtgccgtactacagcgaagaagagctgatggggaaaacggtggtggtcttatgcaatctgcaaaaagcgaaaatgcgtggtgaaacgtcggaatgcatgctgttgtgtgcggaaaccgatacggcagtgaaagcgtgctgttaacgccggagcggatgatgcctgcgggcgtacgcgtcgtataaaaagatcggatggcgacgtcgtatcgccatccgatttgatattacgcttcttcgacacttactcgcatggccgccagcgccttacgcgccgctttgatcaccagttcacactgttcaatggtcagtgtcagtggcggttcaatgcggatcgttttggcgttattgagcgttccggccaccagtacgcgctggcggaacatctcgctggcaaagttatagccgatttcgttatcaacaaactcaatcgccatcaacatccctttaccacgcgcttcctgtaccagatcgggatattcccgcgccagttgacggaaaccgtccagcaacatatctgctttttgctcaacctgagccggtannnnnnnnnnnnnnnnnnnnnnnnnnnnnnnnnnnnnnnnnnnnnnnnnnnnnnnnnnnnnnnnnnnnnnnnnnnnnnnnnnnnnnnnnnnnnnnnnnnncggttttctctcttccccctttggtgcccccccatttgttggggcattttccgcggacccttcgccctccatcccttttttccccggccccttctcaccgcggggggaattccgggcccctcccggcctgtaccgtggttatccccatatgcactgcccgaccagttccggtttcatccagccctgcgccaggttatcttcttcgatattcatgtgatagaaatcgccgataatctgtacatgtttaagatcgttttcgacgatgtaacggcgggcatcggcgagggtgttgatcatatgatcctgatagcggtttaaacggttcgagatacaccacggttccggtacgcgcggcgacctgttccagtacgcgcagggaatcactcaccattttgcggtcgccgtccaggctacgcggcgaggtcatcggcggtaagcggaaggtaaacatgccccacgcagccggaacgacgatgcctttaccgcccacttctgccagcgcttcgagaatgcgctcgatctgctttaagccattaagacgacgctcttcgataaagtcgccatccatccgtcatagccaccgcaggcggtggtcaccggtaaaccggtttctttgatcgccgctttgacttcttcgatgttgttaaccagcagtttgccgtcaatctcaaaccatcgaagcccatctctttgatataacgaaatttctccagaatgttttccggaaagaacgcctgattctgtgtgccgattttcatttttttcattcctttgaattaaaacgtaacgcccattttgatgctctgttccggatgctggtcgacatactgcatatagctttccgggctattggcaaaggtcaccaccgggtcgattaaatcttcgcaattgagataaccgttcatcagcagttcccacaggtttcttcaatacgcttgcggctccagcgcggataatccgggttcggttcgctgcacgcgcgagagaagacattttggcgttattgaaatgcgcttcgcgtccgaggttaaaaccttcggcaacggcttggcaacgcgacataggagatggtgccgccataagccagaccgcggagcgccgattgcagcgcgtcggcgtagccgctggtttcgataatcacatcggcaccctgcttgccggtcagcgttttgatctctttacctacatcagtgccgatggggttaaggcagaaatccgcgccgtggcgacgggcgatatcacagcgatgggcgataggatcgacgccaatcaccacgaagcgccgcgcgtttagccagttggatggcaatttgaccgattgcgccagccctaccccaccacaaannnnnnnnnnnnnnnnnnnnnnnnnnnnnnnnnnnnnnnnnnnnnnnnnnnnnnnnnnnnnnnnnnnnnnnnnnnnnnnnnnnnnnnnnnnnnnnnnnnntctgttgtactgttttccgttttgttcgttcgtctctctctctcctttgg

SEQ ID NO: 1616 - protein, 424 aa, Homo sapiens
  MOD_RES (174)..(207): Variable amino acid
METVAYADFARLEMRVGKIVEVKRHENADKLYIVQVDRAVNAGADDACGRTRRIKRSDGDVVSPSDLILRFFDTYSHGRQRLTRRFDHQFTLFNGQCQWRFNADRFGVIERSGHQYALAEHLAGKVIADFVINKLNRHQHPFTTRFLYQIGIFPRQLTETVQQHICFLLNLSRXXXXXXXXXXXXXXXXXXXXXXXXXXXXXXXXXXRFSLFPLWCPPICWGIFRGPFALHPFFPRPLLTAGGIPGPSRPVPWLSPYALPDQFRFHPALRQVIFFDIHVIEIADNLYMFKIVFDDRFKRFEIHHGSGTRGDLFQYAQGITHHFAVAVQATRRGHRRLKPSATAWQRDIGDGAAISQTAERRLQRVGVAAGFDNHIGTLLAGQRFDLFTYISADGVKAEIRAVATGDITAMGDRIDANHHEAPRV

SEQ ID NO: 1617 - DNA, 4218 bp, Homo sapiens
  source
  (1)..(4218)
  CDS (201)..(588)
  CDS (721)..(1177)
  CDS (1215)..(1559)
  CDS (2695)..(2955)
  CDS (3373)..(4018)
taacgacgccctcgagttcagagctgaagtcacagccttccctggaacaccccccaacaggcctcatggacaggctcctgccacccaccactcagtcagaaaccagcctcccagctacccgctaaccccgctctcagccctctctccctgcaccacggccaagatggcttcagtccaagccccgctccagccagtccctcatgcctgccctccgtgcagctgatgtcgccagcctctggaggaaacccaagcctgctctgaagggtttcaggaaggtgctcagctcttgcagaggcagccggggctcttcaaagtgcaccgtctcacccctggccccagatggcacgtgcctctctaacgggaccatgccccagctgacactcactcgactcccaaccactgtctcctccaggaggccaaggccgccccaggctccctgcgggtcaccaccttctctgtccagttccgggaaagcactggccgtcctgcctgcctgtggctgttcctgctacagccctaagcaggctccacagcagcacagcacacccctctccagcccggcccagagcaggcccagggaaatgcaaggtgccgctggccctcaccgccctctgagagctccatctcgccggcctccagggcttcgctctccgctgtggctgccgcctcctccgcctcctcctcctcatcttcatcttcagctacactgagctcccgcagtctggtttcggtctcaggggcctcctggggctgcagcctcagctgcacggtatggagatgctgcaagacctgcctctgaggagcagagggatgctcagctcaggactgggggctgtgggcgcagagaaagatggggatggggcacaaggggcaggcaggctgcaacgaagctgggctcactggggagccagtatgggtgggatgggctctcgcacctgcagctggggacgctgggcctgctgggcacagctgagcgctttctggaagcacggggccagcagctcgtaggcatcgccggcctcctcgcgggacagtgcaatgttcagccaggtcttggcctcctggagcaggaggaaggacagggtcgggggctgccgctgtctgcgtccaacgggccccagtcaagcttccccggctgcccagacgaaatgggagcccggcctcccagctgccgagggtggatggtcctaggaaggagctgcccgtccagtaaggacacctgtccatggccaccctgagaacggcagtcctgaggcagagacatgggtgaacctgcattcgggcggggagcaagggtttcacctccagcacgttgccgctgcgcagcctcagttcctcctcatagtggcgcacggccccatggtggtccttcatgtctcccagtgtggtggccagggacacgtggatgatggcccgctcagcacccggtctgtccagcagctcagcaaaacgcagctgggggcagtgccagtgaggccaggggctgccaccctggccaggcctcgtcaacctcactggcccttccctcccacccagccggggccacacacctgcttctggtaagcctcagctgccctgggaaagtctcctgccttggagaagaggtcccctagctgctcacagatgaccatggcaccctgagggtctctgccctcagcctcttccagctgttgctgcagccggaccactgccagcactgccgggaagaggttcatgcaggggggcagcacagggggccctgaccccagctctaccacctgcaagctgtgagccctgtggtggcccccccactctctccacacctctgcctgcctgttggtgtgggggttaatagcagggtctatcttggggactggtctcaagggtcacaagaactaacacacttaaaaactcggggccaggtacagtggctcacgcctgtaatcctaggactttgggaggccgaggcgggcagatcatgaggtcaggagatcgagaccatcctggctaacatggtgaaacctcgtctctactaaaaatacaaaaaatcagccgggtgtggtggcgggcacctgtagtcccagctactcgggaggctgaggcaggagaatggcatgaacccgggaagcgaagcttgcagtgagccgagatcatgccactgcactccagcctgggtgacagagcgagactccgtctcaagaaaaaaaaacaacacaacatggatggtgcctggctcaaagtaagggctgacggctgccaacctccaatggtggtctctgccatcagcactcctggaccacgcgtgccatctcctctcccaccctgggaggctaggggtacaactactgtctccagtttgccaatgaagatggtggctgcgaaataaaagcccagctggtctcctggccgccctttcattgcccctgacacactgtgttgagctcagagaaaaaagggggtcttctcctgtcaggaagtaggggtacctgcccctcttgctgaagctgctgcctccaaggacaggtgctcaggcctcctctgtgagggagagagccctgtacacacctggcgggactccaccccgcccccaggctcacccctgcacacacctcccagggccccattcggacccccaggctcaccatgctggaggttctgacagatggctgccctctgcacaggcttctgggagcccagcctgtaggccttcttcagggctcgcttggcagccaaaaaagtctcccaggtcttggaggacctggagagcaaaggacagcaaaggttttgcagaatccccaaggcccgaatctacgagagcctgagctcggagccacgcacagcgggtacctgtgcaataaccacgcagcactcgctctccatgaaccgcttcctcatggtgtgcgcacactcccgggcaccctccaagcagcgcatagcctgggagtgctggcccgcgcgccagtggatggtgcccaggttgtagcgggcgcggaataggtcctcgtaaaggtggttctgcctgcagaggggtgacgaccactgagcacccaggagtgtccatgacagctgctgatgccacacgggccccagccctgccatgctgtggtctcagggccctaaccatgcctggccttctcccagtgtgtggcacaggtgtgagaggtggggggatgaggcccagccagactgctctctcaggaggactctgggaaaaatactcccctaactacttcctccaggaacaagggactccactccctcctggggcggggcagggccttactccgcaaggaagatgctcttcctgaagtaatcgttgcacagggctgtctgctgcaggctctcaaaggtgaggcccaggttgagatagaggcgggtcctcatctcattcagctctccctgggccagtgtccctggaagatacccccccaaacactcagccacttcctccccacatggggtttccagctttgggccccatttggggcctgtgcagcgcctctcctaccccctccctcctcccgaggtgggtgcaagtgtcctgcggcagatggagcacagagtggataaagagctgacgatctccaggggaaaggttgagcggggcatgcacccctcacacaagagccttgcaaagggagggctccagaagacgggattgcccaaggaggctgcgggggtgctgggctgcagcctcttcggcccgaagttcaggaggcagaaaacgcggaggggtctgcccaccctccagctcctcatccacaatagccaagctcttctcaaaggcagcctgtgcctgcagcaaagcatccctcgactggcagtggtcatagatgtccaggtgggtgcggccgatggtggcccaggccctctgcagctccgtgtggttgcgcagggaatgtgccagctccaggtactggtgctggtgctgagtgtggaaggaagtcactgctgtgagccgactccgcctcaagcaaaccggcaccgccagattcccagagaccctgttcttgctaaggaaagagcctgctccccctaacccccacagagcaggccaaggccagacacgtgcccctcctctgcatgccaagggctctctgtggtgacagtggcttcacgctgtatgcagccaacgctgtcacgtggggaggggcagctgggagttggcggggggttgcagtcctgcctccagcagccagggtcagggagagcttttgggatggggcctgacctccccca

SEQ ID NO: 1618 - protein, 698 aa, Homo sapiens [sequence omitted]

SEQ ID NO: 1619 - DNA, 15203 bp, Homo sapiens
  source
  (1)..(15203)
  CDS (201)..(377)
  CDS (872)..(1717)
  CDS (1918)..(2709)
  CDS (2795)..(3118)
  CDS (14905)..(15003)
  modified_base (14274)..(14373): a, t, c, g, unknown or other
  modified_base (14466)..(14466): a, t, c, g, unknown or other
  modified_base (14518)..(14518): a, t, c, g, unknown or other
  modified_base (14529)..(14529): a, t, c, g, unknown or other
  modified_base (14616)..(14616): a, t, c, g, unknown or other
ggacaaaaaggaaacagaatggggggctggggtcaaaatgtgccaaaatcaaatcaggcacagaagcacagtgctggctgagcccttggccagctctctgggaggggacactcctggcactataagggatccacaagtgccctttaaagctgggtcctaaaagggccctggaagggccaggccttgtaagtcctcccaacatgctggtggcccggagacagcaaagagtggagaagggagaaagcggggatggctccgaactgcctcttctcccccccagactccagcacttgcacaaccaactaaacacacccagacacatggcctcattgtctgatacacaggaaggcacacacatctgtacacacaggttcgtggttaggtgcactgatgcacacagcctcattgtatacaatttacacacacacacgccctcccagtagatgtatacaacacattcaatccgccagttgggtggtgtagtcacacaatcatacacactcacaaactctgtcaggagtgaacaggcatagaacctctccaggctcatgctcacgcacacacattccacaacccctcagtcaggcccatacaaacctctaatacacacaacacaaactcacagcctgtcaggaaaaaaagcactcacaacatctccgttaggtgcgcaaacccttacaatctcacaacctctctgtgaggtgcacacatatccttacaatcactctgtccgcgtgtgcacacacacatacaagtgcacacacttagaacctctgtgttaggtgcacacacaggctcacaacttctctgcgggcgtgcgcgcacacaaactcacaacctcccggttagatgcacacacactcgctcccagtctctccgccagcccctgcacactcacactggctcagtcggcacacgcactctggcagcctcgctctcctccgggcgcaccccacacccacgcaccctccgggccctgtgcacccctcccccaggcccatgccggcgcccggcagtgaactccagcggcgcggggtgtgcgctcgcccccagcccgcggccgcctgcgcccctcctcacctttctcgcccgcgcccggcaaccggccctcgtcctccttggggttggtcacctgggtgatgatggccgggccgtccatgggtgcgcggcgcggcggccgcccgcaggcccggccccccgcaagccaagcgcgcgggggcgcggcgcggggggcgcgggggcgcggcgcgggggggcgctcgcagccgctgcctgggcgcgcccgccgcccggccccgcgctctgggagaggcggcccgggcccgcgccccagctcccgccgccgccgccgctgggctcgagcggccgccgcctcgtcaccatgaaccccggagccgcgcccgggagagccgcgcacggggaggcggagcgggaggcccggcgccgctggaagcgggagcgggcgggcgagggggaaggagcgagcgagggcgggagggcgggagggcgggagagagggagggaaggagaaaggaagggagggaaagaagaagggcgggcgggtgggtgtgtcccggcccggggaccggcctccgccgcgggctctgcccgctcgcctgctcgcctggtgggggagaggggagcggggccgacacagggtgagtggagggcgggagggggcggccgcgcgcgcgggggcccggggcagttgagtggggtgaggggctcggggtgtagcggacggcagaggggctcggggggttagaagtgaggggtgtcaggggggcctggcagaatgagtgaggtgagaggcctggggtgtgagagatgtggggaggagtctgaggcagatgggtggggtgaggggagcggggggattcgcgggggcccgtggggggcactggaaggattcggaagggtgcagtgtgggagcccgggggccgagggggcatggcatggaggcaggagcgaggaagggggcccgaggagggatatttaccgcgaggaggcgcgggaagtgctggcggaggtgctgtgagggtgtctcgggaaggtgctgggcgaggggcgtccaggcgagggaaccgaggggcctgggacgtgagtgcggagggaagcggtgtgcagaagtgggggctgcccaggagcggtagtgacacccagacggcccgcagaggggcccgggcgcggcgctgctgtgatggagaccggggagcgtggggaaggttcggagaggcccagggctgcgctccccagcttgaggggtcccaggagttagcgggatcgggagtgatctgtgcagagagggagtcttcggaccgggccagaggctcaggttgttcggatgctggcgggactcgcgtcagcattcggccccagagcccgcgtgaggggcggcgggtcctgaaggaccaacctcctgcacgtgagggtgtcgtgactgagaggggcctgagcagtgggcattttcgggtgctgtgcagcaaggggaccgggggagtccgtcgagggcagaagagcggaaggcgctggtggcagaccaagtctggcagggactgtgcttgtgcaaggcagctggccactgtcgcgcctagcacgacggccagagcgtgggagagacgacaaagtgcctcctcagcctgggagcgtcggggcctttggacgcccgcgtcctgcgcttccaacttgcaggccacactctgcagccccgtaagccgggggggcggggtagtgccgcaggagggcgggctcgggggtggggccaggaggctcgcgcgcgctctccacgaatcaggagggcctgggagggcctacagggcgcgacgtcggtgggcagggttcagtgggcggcctgaggcgaagagctgcttgcctccgcctgctaggttgcgcgcgcacttcaggccttgcgggcatgtccagctcttctgtggcttccagcaggcgaggccaaacaggatctttctcacttccccacatctcctggatcctggagctgatgcagtcaggtcccgtgctcaccgggggaaccggcgagcctctccaaagtattaaaggacacttccggaagagcctttggcctgtggtcagcccgcagacatcggtggtctctgtacctgtaggagccccatgagggtccaggtgtgggagacagtcctgggacagggcttctgcggccgaggcaggtggaaaggcactccaggggagctgctgtaaaaggtagttggtaggcaagaggtgggcgttctgctccaaatccaggacctccactggcattctggctctgtgtgtgtgggcgggaccaggtgccagttgcccttggggcgtgctcacgtgtgagtagctgcttttccaagggcacctttgggaccccagtgaatcacctcatggggtagatccatgatagttgaagaagtgcccttttagtcaggaaggcaagccctagtgtaatagcccaggctccagggcatgcccttcttaatcctcccaatacagaccacaatactgggacggactcccaatactccctaatacagaccacattagggccccatggcagctagcatttcccttgttctaacttctaatgctcttcacatttgttatgagggtgtggctgacctgggacctggtgaaatcaattttctaaaataagaaaaataaaaaagaaaaagacttctgaattctaaggggtcagagaaggatcttccagagattgctgagtggggagggcctggggatatggttctacagtttttggtcataaccacaaagattagcatctctgctgcctggtcgatgaagcatcccaaatagtccatcagcgagggcaaagtgatggaaacatttggagtcactgattaacatgcttgagggctggatcccttatttgggaggtgggagtacttccagagcttcttttcacttaatgaaggctgggaagctcagagctcagtggtacagggctggaggaagtcattttcatatatagagtctttcttgtttggcctcttttgtagcaatgactccccaggaccctccagtaacaattttcctttacctgcatcccccaccatcctcaggttcctgagatcaccttgaaaaaaaaaaaacccttaccttcgcccaagtctttcaggctcaagcaagaaaaacaacttgctatcttttaagtccttgttcccctcagttatgctctttgatttattattttatcaatattaatagaatcaaagaaaagtatcacctatagccctatcaccatcccttagtccatctctaatttcctccatttctccctgtccttgcctatatgctgacataattttatgtagctataaaaaagccatgtttaaaattataaggttagcattttcttatgtggtgacataattgctgttactactattataagtgattgcataataccttactgaaacagtcttagataacacagtattttggttttacacatgaaagaaagattcaaaaattgttgggacaagtacctatccatgaggaaaaaatatatctttatcccagtccttacagcacattcaagatagactgaataattaaatataaaaaattaacataaaccagaacaaatgggtaagtgctttttgatcttggatgggaaaggcctgagagtgacaaaaacttaagaaattgccaggataagactgataaatttggctatattcattcaacaaacatttattgagtgcatattctatatgcaaggttctgctctagacactggggatctcagagttatctaaaatgacaagtagggagttgagctatcatactctcacacaagtcagtcagtcatagccaaaggctgtccctgggggccttaagcccctgggcactctggggctctctgggaataggagcaaagcagccccactgacctgaggacaggtgccagccatgggaagccagagcacatcaagccccagtgggggatgtccagaaacagtgaaaggggcccaaggggacctagacagagcaccaaagtgttggttgaagttacgtttcccaaattcccatcatacagtgtccttgtaccacctgtacaagaacaggtttaatatttttctttaatttttatttacatataattcttttaataggaaactaatagattaggttttgagttttttgtttgtttgtttgttcgtttgttttttgagatggaatcttcccctgttgcccaggctggagtgcagtggcgcaatctcggctcactgcaatccccacctcctgggttcaagggattctcctgcctcagcctcctgagtagctgggattacaggcacacaccaccacacttggctaatttttgtatttttagtagagatgctgtttcaccatgttggccaggctggtctcaaactcttgacatcaagtgatccacccacctctgcctcccaaagtgctgggattacaggtgtgacccaccacgcacagcctagatttttttaaaaaacatacaaatgagacatgtagaaaggaccatgaccttagaatgaaggtgctacacagagtagggggtaaagattgggataccaagggtagggggacatgaggctagggctgacgaacccagccccaagggaccaaggacaggagcagataggaagatggaagaaattgcccagggcaccctagcctggagtctctggtagagctccaagagggagtggttggagttggactcaggtgacacataggggtgacactgctctgtgagtgcaagcgtgaggagtgaggccagaaagaggctgcccctgaggaaggaacattgggcattgagatcaaaatgagatggtgatttgaggaaaggggaactgggggtggacatcacagatgggtgttcagctagaaggagcagcagcatgttccaggcctagaggcgagggacagaacatgctctggaaaggtctgcaatggctgggattttggacactggtgctgggtagctctcagatcaagcaaagccttgtaaaacaggaaaagcatctgggctttatttggggggctgtgggaatgacataatcagatatgtgtttagaatatttctgctgaggtagtgcaagaggcagggagacctacagaagatattgcattaatacagaaagaggatgatggtagttgtgaggattaagggggctagacagattccagatacattttggaaggaggttggacaagtcttgcctactgcttgggcttgaggagtgagggatgagcaaggaggaaatggcctccaagtttctggcttgtgggcccagacaaagttgagggccctttgcaatgctctctgcctccatcattcgcagcctgcccctgccctgctcgccacctttgaatctctcctggcgggcactgtttcttggtctgctttttctcctctttgtgggcatctcagtctcaagttttgtgtgtctgttactcagactctgtctctcgctctctgtctcaggtatttttctatgtctctgtctctttctgagtctagcttcacatgtctctagctcagtcttcccagccctttctttcaggagctgggcctgagggtggtaagtgtcctattggaaaagaagtggaagttggatttgggcagagattcgtggtgattagtaaagtggaaatgaacctgagcccacccacaggtctctctcctggggtcaccttgggacctagatgaggttcctccaggcagcagcccttctctcctactgggaaccaggcccagagtctgaaatcagttccaaagagccctgtgctagcctaggcaggccaaaccactcccacaccaagtatgtatcggatgcccttattgtgccaggctagggccacatgcagtggacaaaatacccttaaggggctcacagcctaatggaggaggcagaagagcaatcagagggtggcacagagtagaactgatttattctccagggagtccccacagaggtgatgatgctaacagtgtcatttccagagccttcagttcctggatgagcggactttttcatctacaatctccacagagaaggctgtatttgaggagaagtaggacataatgacggaggaagaggtggaggtcctgaagaccaggttgagtttggaatttaacctaagggtaatctggagccactgagacctcttgagcaaggaacaggcaccagttcagaaactagttaagatctgaaggttaaagtcaaaactcagaccagcttaagcaacagtgggggctctactggctcatgtaatcaaatcacagttacatgcctgggctggagtggcctgcgagtagcatctgaagcaaggagatagagatctctaggggaaggatgtgacctccagctactacttttccccataaccgggatgatcaaggtgttaggaaaggcagaggacatccttacacctcaagacaccctgtattccccactcagcttgttccaggacaccatccctaagggatccccagaagctcatccttctgccttcaacacccataactcccatgcttcctcaacatcctgatcctttcttaccaagacccactctcccccatcacacatggattcttccaatcaaatgtctatgtccactgacacctggcttcctagccatcttctacctctacccttgtccccagggatgttctctacttgtccccaggtgggacctggggacagcatccttcccatctaaagacacttcactcccaagaataaggctttcaaacgggtcagtggtccagcaggtgcagcccgccccctggtggccacaatgttgtgtggtccttttcctgagcccagctgaatgtggaaggcctctctccctgccagttcctcagtgtacaccacagtcagagtgggctcagtcgtgtctcttaccttacctgtcatgatttgcactcttgttcagttttccccagagtattagcagaaatgccctcaggaggctgggcgcagtggctcacacctgtaatcccaggactttgggaggccaaggtgggcagatcatttgagatcaggagttcaagaccagactggccaatgtagtgaaacacccgtctctactaaaaatacaaaaattagctgggcatgatggcgcaggcctgtaatcccagctactcgggaggctgaggcaggagaatcacttgaacccgggaggcggaggctgtagtgagctgagatcgcgccactgcactccagcctggcaacagagtgagactccatctcaaaaaaaaaaaacaaaaaagaacgccctcaggaatatgaaggcctgagtgcctgtctggagagggtagaaagcaggggaactggagcgatgtgccccacttggcagccagtcttggaggaggaaaatgaaaggcaaagtggatgcaagccactggtgaaggaaaaaagggcagtcaaccagggtcctgggcacacagagaaaagggcatctggcctaaagctggtggtcaggagatatttggggaatttgagaacaagacacatcctgatctgagatagactctaggaccttgggaatgagctgaaacattcttagcgtacccagaaacccaagaagccttcctggagggggacacgcctgccaccacttctgtacctccaaaattacagccctgccttacccagagagtttgggtgcaaaaagaggacatggcctcaggcttgggccctctctgacagccccggctgggggagggcatggccctgccctgaaaccctatcacaatagaatagctcccagagcagagggggcagggtatctctgtgtgccctcagcccactagcaggagtggctttggctcctgaaagggcagagagtcacagagtctcaagttgatttagtgactctggagccattgagccccttgaggtggaaccccacacttagcccctgtgtggattgtcccttggatgactccccatatctcagctagcaggtatcatgtggcctggctgatggaggttacttttgcttggctgctgtcatctgtcgcctctctcagccaggctccccaggccctgggctctggcccagccacaggtaccccctttattccctggcctatgcctacacaggctgtattggagctgaggtgagcagacccagacgtggccacactctgtggtgtgaattctatgtcacccgtcatcccaaggctgcctgctgatgaagaggaagggccaacccatatgtgcatcactgcatgcacccgtgtatatattaggggtccatatgcgtgtgtatgcagccccttctgggaaggtagttgccctctcacatcttttatagcatcagctttgacaggcagctgccatggcagacctcccactggcaccattcacatggcggtgccttggctgggcaagggagatatttcacgggcaggtctggtcacagacacacaccttggtacgtgcagctacatgctcatttgtacttgggctcacacgtgacaaggctgtctctgcccaggctggtttctctacgttggcactgcctgtttctccctccctccctcccgctctggccctccaggtctcagccctgacaagcactgccctcctctttcagctcccctggaacccagcctcctaccctcttggtcttggaaggttctcagagcctccctcatgaacatgatcacagatgagcatttgtaggcaatttctacttttcacactaacttcccagaggcctgggtagagagagagctgggctctctcctctggaacaggggtcagggtatgggagggaagaatacaaggaggtggccaggggccgtggctcatgcctttaatcctagcacttcaggaggctgagacaggcggatttcctgagctcaggagtttgagatcagcctgagcaacacagtgaatcccatctctactaaaatacaaaaaattagctgggtgtgctggcgtgcacctgtagtcccagctactcggaggctgaggcaggagaattgcttgaaccttggaggcggaggttacagtgagccgagattgcaccactgcactccagcctgggcgactgagactccttctccaaaaaaaaaaaaaaaaaaaaaaaagaatacaaggaggtaaaaaaaaaaatctcagtaaattagtcagtctgtctcctgactccactctccttccctctctcccacttccccctcccctgccacacagccctccttggttgctgctaacatacactcaggcgcccctgatgcacactgttcccctcccccatacactgccaacccacattcctaaatggggctcttaaccccagtgaactgtccccatctaccccatctggctctgatcccaccatggccatgggaggcactccttgtgatccacacctgagtgcctggctgggatgggtggagaaggaggccctatctcagctgaaagaggcaacaggcaagtggcctcctctctctggaccttcctttctaggcaagaacacacagatgatggtttgttgccagaaggctctggaatgggtgcaaaccagaaggggttccctgtcctggtctgagtttagggatgggaccaaagaagtaaaatttctggacgttctactaaaaattatttttaaaatatcaaaagcaaaaaatattttggggaaacggatactagccacatggaattgactagacgttgagagttcacacagcttgttaatatttagtgtctttctgactccctgatggcccttggtaagagaaaagaaggagggtggttgtcacccatcctgcctgtttactgcacaccaagctgtggctgggtaccgtgtttccaaaggcgagaggctcccttgggtgcaggaaatggagaccatgtcagggaaagatcagcatgagggtcctggagtgagagtctctgcccatccaaggcctcacaggaactcagctcaaaccataaagaaagctattatatcacctggcaggcctcagggatgacctcaggaaactgggtctttcaggagcaaggccactccagactaaactcctgttactccagacaagtcatttgtcatgaatgtgactcagctgcatctttcatcactgcttcagtttgggtctaaccatttgtcctcttgttaacaactcactaattttcataagtcccagtttaaatctgggagacagtctgtttgccttagttcattccgatttttcaagttactatacttatgtaaaaaattacccccaattttagtgacttttacagaatcaaaaaatacttatatgcttatgaatctgcagtttaggcagggcttggtgggcctagctcatctttgctttctgtggggtcacctgggctgcttgatagtgggagctggactgatctggaggcttactttctcgcatgtcacagttgatgccggctgttggctgatgctttgggctgttggctggaaaacctacaaatgctattgaccatgtcttttattttctgtactctgatgttttgacatattggggtcttgtttttggcatcttggggccttgctgaccttggagggactgcccctttgatagcagattcctagagatagcaaataactgacctgtgagggtgtctttcatatgcaagccagtcaatccagtgcccacattcccaaccaccccctttatccagcaattacaggcccctattttcctgccctagtcacccaggggccaagtaccagactactggggccagcccctacacctcagagcccaccaaaattatttaaactagctaatcctgaacctgcttaccctgttcctttttgtagaaaccacactaaatgcctttgccatagttttcctttctccctcaggttcctgaccaagctggtgcttctgcgtgtgttcctgcatgacttggtgtgtccccttctcttggatctgtgagtaacaaactatcttttctttttttcttttgagacagagtctcgctgtgtctgtgtcactgaggctggggtgcagtgatgcaatctcaggtcactgtacctccgcctcctgagttcaagtgattctcctgcctcagccttccgagtagctgggattacagggatgcaccatcacacccagctaatttttgtatttttagtagagagagggtttcaccatgttggccaggccggtctcaaactcctgacctcaggtgatctgcccgccttggcctcccaaagtgctgggatttacaggcatgagccactgtgcccagcctaatctgtcttttcaatggcagtcgtctcttgacctgttggcctcttcatacctgaataataataaaacctatattttcttttttgtttgtttgtttgtttttgagatggaattgctcttgttgcccaggatggagtacaatggcgtgatctcagctcactgcaacctccgccaccagcctgaaacctatgttttcaaacagtgatctctccagtggcctgggcttcctcacaacatggtggctggttgcaagggtgtgtcctctgagagagtcccaggcggaagccatatcacattttatgacctagtctcagaaattactcagtgtcttttctactgcattctgttcaccaagactatcataatgtcccacctaggttcagggggaggagaaatagactccatctcttgaaggggcatggcaacgtgctagaagagcctgtgaatggaaatactgtggtagccagttttggaaattacagtcttcaacgatcatcctctctgggcagagctcttcatgccaggacacctcataggtcactggccagtcaatggggtactgtttacaggtcagatatctaatcctgtcccactcttgcccttagacctgagcaaaagggacgcttgccctgggcctggtgctttagaagtctttatttaggcctttgtccagttgttcccttccccatggggtaagaaatttgcaggacaccagggcatgtggctacctgaagtctgtgcctccacctcccctgttacgaaatgcacctggggcacctaggaccttggaatttcctatcccacaggcttgagcatggggcccacacatcaggggagagcagtgaggcagctgtgagccaggagcctgggcttggctgtccctgtgttgtcacactccggtgcagcactccaaggaatctgttcgtttaaaattcgaacttggtcattcagcctcagattttgttgcattttcctgatttagatggaatggaatgaagaaaactccacagcatacagaattggcctccatttgctctcttgtcctgcaaatgtcagaggtgggcctgccctgacagctgtggaggggggcatttcctgaggtgtagagaagatcccccttccctttcctcccagctttgggtagagcctgaggcagctggaggtgtgtcaagccctgtcatggcaggactctgtcttcaccagtcttcacaacctctctgttaataatgccatcttacagatgaggaaacaggcttcacgaggttaagtggcttgctccatcagagctgagatggtgatgattgcctttgtgtcggggaatcctatctgtccgggaagccgctgctcaagatgacagggcaagtcattgattgggagtttccagatcttaactctaagctcccgccactcctgcatgctgtgcttaaagcaggatggcgtaggaaatgattgtactggatttatctgaggaagggaaggcattgacagaaatctagaaaattattctgggataagcataatcattagtcaaacctcctcagcctcatttttctggagatgaggttacctggacgaggagcacgtgatcaggggctaagacgggtacttttcctgcgtgctggatagggaggcctgaaacccagaatctactagatctgtgctccttgggcttccctgtccttaggaagctaaatttacaactccaaactgcatatctattggactattcccagagagatgttaagagatacagataaatagcaagagattaagacacaggcccaggccgggtgcaatgactcatgcctgtaatcccagcactttgggaggctgagatggacagatcacttgagccctggagttcaagaccagcctgggcaacatggtaaaacctcatttctacaaaaaaaaaaaaatgcaaaaaattagccaggtgtggtggtgtatgcctgtagtctcagctacccgggaggctgaagtgggaggatcacgtgagcctgggaggtcgcaggctactnnnnnnnnnnnnnnnnnnnnnnnnnnnnnnnnnnnnnnnnnnnnnnnnnnnnnnnnnnnnnnnnnnnnnnnnnnnnnnnnnnnnnnnnnnnnnnnnnnnnttttttttttttgtgctgtggcggcccagggggagccaggaaggaagggagagagaacggagaggggagggagggccgagaaggaagagaganacagagcgcagagcaggggagagggagggcggcggaaggaaggaagggaagngtgaggaggcncgccgaagccgggcccaaacacgccgtcaggccctgcaggtcagaccatggatcctttttgtgctggcagacacctttgaacagctntcagtacctggtattccccagcacacagtctggaaaacactacaccagatgcattttagaaggaacaaacagcttacgtaatatcacccgcaggaagtccatgcattttgaaaaatgtctccacaggatgtttttcttgccagtgttttctctaatccgaggggtcctccaagcctccccagccctgtgagtgcaggtcacacctacccagggacagactgccttggggtcacaatggctgattcttcagcacttctaactcagcttctctttctttctgcctttcagatgggcttctttcgccgaaggtacaaagaaattatcgaagctgagaagaaccggaaagagaatgaagacagttgggactgggtccagaaaaaccagtgagctgccacaccagtcacatgacctgatcactagcctgtcatccttggtctttgtatcttccatatttggaagaaaaaaatcttctccagatttttcggaggccccactgatgctgttctcttcttcattctatcaagcccaggtgccagcctgaggcagccacttcggccaggtcacacgaccggggccagcaccacttc

SEQ ID NO: 1620 - protein, 745 aa, Homo sapiens
MLVARRQQRVEKGESGDGSELPLLPPRLQHLHNQLNTPRHMASLSDTQEGTHICTHRFVSLRQPLHTHTGSVGTRTLAASLSSGRTPHPRTLRALCTPPPGPCRRPAVNSSGAGCALAPSPRPPAPLLTFLARARQPALVLLGVGHLGDDGRAVHGCAARRPPAGPAPRKPSARGRGAGGAGARRGGALAAAAWARPPPGPALWERRPGPAPQLPPPPPLGSSGRRLVTMNPGAAPGRAAHGEAEREARRRWKRERAGEGEGASEGGRAGGRERGREGERKGGKEEGRAGGCVPARGPASAAGSARSPARLVGERGAGPTQGEWRAGGGGRARGGPGQLSGGAVWEPGGRGGMAWRQERGRGPEEGYLPRGGAGSAGGGAVRVSREGAGRGASRRGNRGAWDVSAEGSGVQKWGLPRSGSDTQTARRGARARRCCDGDRGAWGRFGEAQGCAPQLEGSQELAGSGVICAERESSDRARGSGCSDAGGTRVSIRPQSPREGRRVLKDQPPAREGVVTERGLSSGHFRVLCSKGTGGVRRGQKSGRRWWQTKSGRDCACARQLATVAPSTTARAWERRQSASSAWERRGLWTPASCASNLQATLCSPEGLGGPTGRDVGGQGSVGGLRRRAACLRLLGCARTSGLAGMSSSSVASSRRGQTGSFSLPHISWILELMQSGPVLTGGTGEPLQSIKGHFRKSLWPVVSPQTSVVSVPMGFFRRRYKEIIEAEKNRKENEDSWDWVQKNQ

SEQ ID NO: 1621 - DNA, 1767 bp, Homo sapiens
  source
  (1)..(1767)
  CDS (201)..(309)
  CDS (693)..(1567)
  modified_base (588)..(687): a, t, c, g, unknown or other
ttcagaatatttttacttaaagcagttttcaaaactcgatgttttccagtttgcttggctgcatccacgtctcaccttaagcagcacacccctccgtcctcgggagggaagcagtgagtttggttctgtgttgtgctccctgttgtaccagtgcagtgctcggcaaaccccaggtggaggagtatggcccaagaatgtagatgaactgggaacccctcccttgtctggatgcagctgctctgaggaaacaatgctggccgcactgcccggaaaaaggcgaggctgcccagcccagcgctggtcccgagggtgttctgcaatgatggaaacattgtatagtttgtatcttggctactgagcccttgaaatatggctaatgatggagaagctaaagctaattctttttttttttttgagacaagagtttcgctcattgcccaggctggaggcaatggcacgaagttggcttaccacaacctctgcctccccggttcaagtgattctcctgcctcagcctcctggatagctgggattacaggcggcatcaccacacctggctaatttttttgtatttttagtagagacggnnnnnnnnnnnnnnnnnnnnnnnnnnnnnnnnnnnnnnnnnnnnnnnnnnnnnnnnnnnnnnnnnnnnnnnnnnnnnnnnnnnnnnnnnnnnnnnnnnnncacaggtacacagcagggacgtacgcactccgggtacacacgcaggggcacattcacgcggggtattcagcagagacacgtgcgtgcggggcacagagggggccgtcacgccgggtatccagtacaggcacgtccacgccagggacacagcaagtacagagaggataagcaacaggtaaccaaggggccgcgggacttgggcaggcttggagatcccgccctgtgctcatcccaacccggcgacaaggtggtcccctccctccagccccggcgcgcactgcccgcactgcagcgtccgcacagtggacaaggcccgggaccacagtgggcgcccccattgtcctccagcccgctcaggctcaccagctccccgcgtgtctccgtgggtgctgcccgcggcgcccggcgttgcgagtttttacacggctggctggctgcagcaaccaaacccaaactcccagcgcgccgcgcaaccacaacatcggcgtcgcagtggcaacggctgaacggccaaccggcgggcgcggctggagcactgtcacccaataggggaagcctgaggcggagcggtcggccaatcacggcaggaagcggacgggcgcgccgcctgtcaactgcccgtagcccagagccggaccagggcagggcagcgcagcgatgccacggggaaccgggcgggacgcagcgggggtgggagcagggccttactgttgcaggggtgtgggggcgtggggacgtggggacgtggacgcaggaagagagtcaggcctcagtcctcctcatgccgctctggctgggaaccacagttactgtagagcggtccagaaaaattggggacatgcatcacgttttccaaataagtataactgtctcaccctaaaaacacaacaaaacaaaacaccccaccagtatacaaaaataaaacataaaaagaatttactaatgagatgcaggagtaatgattcacttagtaaaggaatccttaattttagacaaatttgcttgcaaatttctcatctaatgcatttttttcaagactaataagtatttggaaattgtgtgtcgataataaaattatca

SEQ ID NO: 1622 - protein, 327 aa, Homo sapiens [sequence omitted]

SEQ ID NO: 1623 - DNA, 1447 bp, Homo sapiens
  source
  (1)..(1447)
  CDS (201)..(446)
  CDS (597)..(764)
  CDS (1047)..(1247)
atcagacccagagagtcctttaaaaaaataaaaagattctatcgcagtggaaactgaacaactttttttctaagacgaccacccctcgggaacaaaagttatatttcagtcacatgttgggtgtaggaatagggagcaggttttttttttttgttttttgttttttttttttttaagcgcactaattacgggggtgttttacggttctggagacaatccgggttgctctgaccaattgtgaccggcatttcattgtcaaaaagcaagggggtgggggccgaggagccggcaggggctcggcggtgggggggagtagcaaggttacgctaaagggtacagcagccaccgcgagctgcatctctttccctctcgccccaaataatttcctgcgaacagagcaactgcaacagcctgctctgaggagcccagcacgactgccctggccggtgcagctcagggtttccaccacgtagaaggaggggagaagatttttaccttaatgctacactgagcaggagtctcagacatgtctcacagcgagagagatcaggaagttctcaggttttttccactttcctttcctctccccaacccagaaaggctccacggccagccagacgcggtcatttaagaagtttcttccagcatctctcccggcagccgccccgggggtctggagcgcgcggggcggggcggggcggccggcggagttgggcgcgcggggcggcgggggcgtgggagacgggcccgagcgcggcggcggggtctgcaggtcgcggcgcggcgcggggacccgggacgcagcccggccggcctcccggtctctcctcccacccgcagccggcgcccccgccccccgccctcccgcggctctccctcgctctctcgaatgttttccttcctggaagagagaaactgaaaggcagaactgagaaagctctttgctcattgatcttgagagtttcagtgcagaaactgacgtgaattcccagcactgagctctgcctcttaaaggagccaccaggaaataaaagctcgggttacagcccggcatcggggaaataaaagctgcgcgggggaggggcggccgcgggggcgcgggcggaggaaacccgggtagcggggccgcgtggggccgcggctgcgagcggggcgagcggcgcagccccccaggccggcccccggtgcgggcgcccgccctccacgccgcgagacctcccgctggccgagccaatttccgggcttaaggaagacacctttaaaaaacgttacattgtggccccagacaccacaaaacaggttttattaaactcctcccacctcccctggctccgtctcttggatacatcgatgtgcacaagggttttgaaacgtttcactaagcgcagatgcaacgaaagtaattatctatgaagggccattccggttaggacgcggaatccgaagg

SEQ ID NO: 1624 - protein, 204 aa, Homo sapiens
TVLETIRVALTNCDRHFIVKKQGGGGRGAGRGSAVGGSSKVTLKGTAATASCISFPLAPNNFLRTEQLQQPALRSPARLPWPKGSTASQTRSFKKFLPASLPAAAPGVWSARGGAGRPAELGARGGGGVGDGPERGGGPGIGEIKAARGRGGRGGAGGGNPGSGAAWGRGCERGERRSPPGRPPVRAPALHAARPPAGRANFRA

SEQ ID NO: 1625 - DNA, 13904 bp, Homo sapiens
  source
  (1)..(13904)
  CDS (201)..(259)
  CDS (1585)..(1698)
  CDS (2500)..(2653)
  CDS (3320)..(3412)
  CDS (4412)..(4670)
  CDS (4917)..(5078)
  CDS (8240)..(8328)
  CDS (8481)..(8635)
  CDS (8738)..(8836)
  CDS (8920)..(9051)
  CDS (9131)..(9236)
  CDS (13657)..(13704)
  modified_base (31)..(130): a, t, c, g, unknown or other
  modified_base (5375)..(5474): a, t, c, g, unknown or other
  modified_base (13901)..(13904): a, t, c, g, unknown or other
tcccaaagtgctgggattataggtgtgagcnnnnnnnnnnnnnnnnnnnnnnnnnnnnnnnnnnnnnnnnnnnnnnnnnnnnnnnnnnnnnnnnnnnnnnnnnnnnnnnnnnnnnnnnnnnnnnnnnnnnaacatgacatgcaggcagggttggagtaggaactgaactcttggtataaaatagtaaatgatggctgggcatggtggctcacgcctgtaattccagcactttgggaggcccaggcgggcagatcacgaggtcaggagttcgagaccagccaggccaacatggtgaaaccccgtctctactaaaaatacaaaaattagctgggtgtggaggcacgcacctgtaatcccagctacttgggaggctgaggcaggagaatcacttgagcccgggaggtggaggttgcagtgagccaagatctcatcattgtactccagcctgggcaacaagagtgaaactccatctcagaaaaaaaaaaatagtaaatgatgataattgcctgcatctattgagagcttagtatctcccaggcactatactaaatgtccaacctacattgagtaatttaatctttacgtcaaccttagaggtagatatcatcttcagttgacagatagggtatagaggagtcaagtcacctgcataaagtcacagagctagtaaataaaaccaggatctgaatcctttaatctggcccatgatctgaaactttacactgtaccacatgatagctgccatttttttgagcccctacaatgcgccaggcactatactagtactttatagacctctcaacagacattccattttacaaatgaggaaactgaggtttaaaaattcgaagtaaattgccaaggtcctcatggtagaactgggatttgaacttagatcttttcaacttcaaaacatatgttttttaccgtggtatgctgactagctatatgcatgaataaggacttccttttaacatctgagtttggaaatgagtattttcttaacttctaattccttgtttaaaaattgtataaaatggctaggtgcagtggctcatgcctgtaatcccagcactttgggaggctgaggcaggaggctcacctgaggtcaggagtttgagaccagcctgaccaacatggagaaaccctgtctctactaaaaatacaaaattagccggccgtggtggcacatgcctgtaatcagagctactgaggaggctgaggcaggagaatctcttgaacccaggaggcggaagttgccatgagccaagatcatgccattgcattccagcctgggcaacaagagggaaactccatctcaaaaaaaaaaattgtatgaaatatccctaagtatagccaaggagataattcatttaaagaaaaccccatcaaggaaaagtaagacatatttgaaaccctttcatctagcacatagcaggcactcagcatgtagagtcaaataatctacttttttccatctttatcatgcaggagaagtcattagctctcttaccattttttcctttagccctttaacaaacatttatttttcttcttcttgtttctctctctctttcttctaagctacctggcctatcgaaactttatgattgacacttaccgactgaacccccaagagtatcttacctctaccgcctgccgccgaaacctagcgggtgatgtctgtgccatcatgaggtgggtcttgtggctgaggggaagggggtacatgaggatgcctgcctatggatgtgttttggcaacagtagagatgccagcaaggaacacagaggagcagacagaaaaaagcacctctagagaaaggtgaagtacaggtttggggaatgaatgacttgagggattagcaatggcattctctgaagtgtagaatataggacaaagaaggagcatgtctgtaattgaaagatactggttcaggccaggtgtggtggctcatgcctataatccaaacattttgggagaccaaggtgggaggattgctggagcccagaagttcgagaccagcctggacaaaatggcaaaaccccatctctagagaaaatgcaaaaaaattagctaggcatggtggcacgtgcctgtggtcttagtgactcaggaggctgaggtgggaggatcccctgagccctggaggtggaggctgcagtgagcggtgatcacaccactgcacttcagtctctcttagggaaaaaaagaaagaaactggttcagttttactagctattcaggaagaaatgttcggtaggtaggtagatatagagattggcccaggctgaagatgtagacttgggtgtcactggcatttaggtgataaatgaacaactggagtaggtgagatttcttaaggagtacaatgaacagaggaaaaggccggggttgggtggggagggggtttatgccccttctaccccccacttttcctcttcctcgtgcacctttctggctatccgtgtgaccctgtctctgcctctctctgcacagggtccatgccttcctagaacagtggggtcttattaactaccaggtggatgctgagagtcgaccaaccccaatggggcctccgcctacctctcacttccatgtcttggctgacacaccatcagggctggtgcctctgcagcccaagacacctcaggtagggtgaggtgctatggggatggggcgggttgggaagattgggcttctttgaacttttctttttctggtttttagggtaatggttcaggagtgttttgaggcttcttccttttccatgggatgcaaagggtcacgggaatcagccccatgtgtttagcatcctctctcagcctttgtacctaaggctgtaattgctgagggagaagagattatccttttactcaaggagtagacaggctaatgtaggggagtcaatagagaaaaatggcttaaaattaacttgcatgaaatttttaaactttgtcatctttgccacattttttcatttttgcctcataattatcatcttcatttttttttccatttccacttcatccattacaaaaattaggaagaaggttatgtggcttgcccaaggtcacagagtaccaaatctaggattagaacctaattgtccagctcctaagagaacctataaagataatgtgaatatgtatggatatcatgccaacgacatgtcttattaatcatgaagggaacatggaacagtggcatgagtgcccccagagcttgtgggccgcccagcatatggtcttgaggcctccagggccttggcctggtcatttcctgcccagcctccatgacgccaagctctgtcccccagggccgccaggttgatgctgataccaaggctgggcgaaagggcaaagagctggatgacctggtgccagagacggctaagggcaagccagagctggtaggtggggtgcagaccctgctgggctgctcattttcccctttattggggggcccctgcccgggaagaagagacatgagagcagaggaactacagcagtaagggaggaagtcccacccaggggtgtccctggctttgggaaagaagctccttctgtctgttttttctctctgtcagcccctggctcccggtggtcacttgtactcacctgtttctttccctccacaaatagcagacctctgcttcccaacaaatgctcaactttcctgacaaaggcaaagagaaaccaacagacatgcaaaactttgggctgcgcacagacatgtacacaaaaaagaatgttccctccaaggtaggaggtgcgggccgactctaggggtagagaatgttcgctcctcagaggtcacaggctcctttcttctcacctgcctgtgtttcccctgcagagcaaggctgcagccagtgccactcgtgagtggacagaacaggaaaccctgcttctcctggaggtaattggggcaaagaaaagagagtttttctctgaaaacagaagtgggctccgtgtagaggctcacgcctgtaatcccagcactttgggaggccaaggcaggaggatcacttgagtccaggagttcgagatgaacctgggcaacatagtgagactccgtctctacgaaaaattttaaaaattagccaggtgtggtggcacacacctgtggtcccagctactcaggaggctaagtgggaggattgcttgagcctaggaggtcaaggctccagtgagcttcaggaccagctccaggctggggatttgggccatttcattaacttcatatcctttcttagtgctacttcaagatcccccttggacctagcagagtacacaaataccagaacatagagaactttgaaaccagctgcccttagtaggatggggggagtcagccttcgagaaaagtggctaagtaagcggagttatgtctccaccactaccaccaggcactggaaatgtacaaagatgactggaacaaagtgtccgagcatgtgggaagccgcacacaggacgagtgcatcttgcattttcttcgtcttcccattgaagacccatacctggaggactcagaggcctccctaggccccctggcctaccaacccatccccttcagtcagtcgggcaaccctgttatgagcactgttgccttcctggcctctgtcgtcgatccccgagtcgcctctgctgctgcaaagtcagccctaggtaatgggggtgggtggttccacctggccttcttagtttgcttttgaagggctagttactcagactgtgaatcctctcaagtttggctgccctgctggccttgtctgtgcgggcctcagctcaggcacctgtctaggctccatactagcttagatgaagacatgggcttgtgagtaagcttttgcagggattgccagaactgttccactgtgccgctcccagcctcattctttctgggtcttgcagaggagttctccaaaatgaaggaagaggtacccacggccttggtggaggcccatgttcgaaaagtggaagaagcagccaaagtaacaggcaaggcggaccctgccttcggtctggaaagcagtggcattgcaggaaccacctctgatgagcctgagcggattggtaaggccaggcaggttcccagatttcttgcctttcacaagatccagagctacctggcctcctgtgccatttctgcctcaagttggcattagagcacaacatgaatgagaacattggtagggtttttattttccccatgagtttacctcaggggctctggagccctactagtcctctcatgaagattttgggtagaaaaatctttgcttgtagaaggggctgttagaaaagtcttgtgaaggccgggcgcagtggctcatgcctgtaatctcagcactttgggagccaaagtggggnnnnnnnnnnnnnnnnnnnnnnnnnnnnnnnnnnnnnnnnnnnnnnnnnnnnnnnnnnnnnnnnnnnnnnnnnnnnnnnnnnnnnnnnnnnnnnnnnnnnagttaaaccaaggtcttcttaggtcccgggtttagtaagggaaacaaatccggtgtcttcttttaatgggccataaaatttgggggtaaaagtgatccctgaatgtgttcccccccatcaagtgtcctggtaacccttgctttttaggtggggtgatcccccacggcccattttggaattaaaaagggggggtaaggcaaagcccctcctttaaaaaaaaaaccttaaaacttaaagtggggttaccatgtggatttttgaaacccccccatgataaagtttatttttttttggaccccaattttttttttttttttgagatggagtcttgcccagtcaccagaccggagtgcagtggcgcaatctcggttctctgtaacctgcgcctcctgggttcaagcgattctcctgcgtcagcctcccgagtagctgagactacaggcgcccgccaccacgcccggctaatttttgtatttttagtagagacggggtttcatcgtgttggccagaatggtctccatatcctgacctcgtgatccgcccacctcggcatcccaaagtgctgggattacaggcgtgagagccgcgccccagcctaagggtagatttactggttctttcggaccacgaaaagaagagcaggaaaactctttaggctgagaaaaaaaatggaggagagagaaggcatatttattatagatcagagaggcaggcagagcaagatcataggagctgttgaatagtatgctagaaatatggattttatcctaaggcttagggaagcctttgtttattttatttattatttttttgaaacagagtcttgctctgttgcccaggctggagtacagtgatacgatctcagctcactgcaacctccctcctgggttcaatcgattctcctgcctcagcctcccgagtagatgggattataggtgcccgccaccacgcccagctaatttttgtatttttaagagagacggggtttcaccatgttggtcaggctggtctctaagtcctgacctcaagtgatccactgcctcggcctcccaaagtgctggaattacaggcgtcagccaccacacccagtcagggaagcctttaatgagaggtcacatatccagatttgcattttgggaagatcatagggataagagggtaaagaatggactggagagggacaacactgggggcagggagatcagtgaggagactgttagagcagtcaaagcaggaaacgactaaagcctgatgggatttgaagattgctgtgatatggagcaggtggaggagcaaggaacagcctagacactaactctggggtttttggcacagggtggctagatggataagggtgccgttgctgacttagggagtgcacagagagggaattttggaatttgagatctctgcaggacatccaagagaagacatgcagaaaacaaatctattgtccatgaggtgttcctcccttgccctcttattggaacatcatgagcaagcaaccactcataagtgtagtcatgggtgagatctcttaggcagcgtggagagtgaggagacaaaagatggccatgagccatcttacaggtgtgaaccactgtgcccggctgaaattaatagaatttaaaataatgtaacttaatgctagcagagtagaaaggaggtacaaatgagctcagttcttcatcttttatagcagggaatcaatagatacaagcatattagaattccgtgagaacaaagaaaacaggagggttttaaaggttgttacatttggaatatggcaataggagtaggatgggcaagaaacatttacttttagttctgtttttactgttgttttctgtatgctgtaggtattactggtataatttctgaaagctaggttgggcgcggtggctcacgcctgtaatcccagcactttgggaggccaaggcgggcagatcacaaggtcaggagatcgagaccatcctggctaacacggtgaaaccctgtctctattaaaaatacaaaaaattagccgggtgtggtggcggacacctgtagtcccagctacttgggaggctgaggcaggagaatggcgtgaacccaggaggcggagcttgcagtgagctgagattgcgccactgcactccagcctgggcaacagagcgagactccgtctcaaaaataataataataatttctgaaagtttatgaggtaaagatggtccactctactctggttaagaaaggaaggacaggccagacacagtggctcacacctgtaatcctagcaatttgggaggctgaggtgggtggatcacctgaggttgggagtttgagaccagcctgaccaacatggagaaaccccagctctactaaaaatacaaaattggctgggcgtggtggcaggtgcctgtaatcccagctactcaggaggttgaggcaggagaatcgcttgaacctgggaggcggaggttgcggtgagaccagatcacgccatgcactccagcctgggcaacaagagcgaaactctgtctcaaaaaaaaaaaaaaggaaggaaggacagagggagggactagcaactgttaccatggcttccctgcctttctcaaagggaaatctcaccaaaccacctatgagtccaagcgtttggacctttaaaacaccaggattaactcatttgttgatgcattcgcctcttgatcatggtcctgttgccccacaggttcggggtgagggcactggcgtgctgggctcattatccctgcccctctcagagctcctcgtggctgaccagctctgcttggaccgctggtttacactcagcagtggtcaggggcaggtgctactgagagcacagctaggggtgagtgacaggagatggtgggcaggatgagagggaggaggggagggccttcacaggtgagggacacccaggagggtgggaacagagggccgtgtccttagagtgagggaactgagagaactctgcccagctcacagctttcttgcccctagatcctggtgtcccagcactcgggagtggaagctcatagccacagctacagccacagctcctcatcgctgagtgaagaaccagagctctcggggggaccccctcacatcacctcctcagccccagagctccggcagcgcctaacacatgttgacaggtaaagggctgggacaggaaggtgggacgcagtcagaaataaaaagtattacaggttcactaggctctagctttccccagacctactgatatttctccacagtccccttgaggctccagccgggcctctgggccaggtgaaactgactctgtggtactacagtgaagaacgaaagctggtcagcattgttcatggttgccggtgagaccccatccctcctgtcctccagatcgcctccatcccttccctcaggttaccatatcacctacatcctcctgttgtaggtcccttcgacagaatggacgtgatcctcctgatccctatgtgtcactgttgctactgccagacaagaaccgaggcaccaagaggaggacctcacagaagaagaggaccctgagtcctgaatttaatgaacggtcagtcagtgggcattcaggtggagagatggcaggcttggaaaggactcctggcccctaacatccagtcctaccccaggtttgagtgggaactccccctggatgaggcccagagacgaaagctggatgtctctgtcaagtctaattcctccttcatgtcaagagagcgtgagctgctggggaaggtaagagggcaggatggcagggcagaggtgagggctggaagctgctggcaccaaggttatagtccctgtgaggaaggaagtaccccacgtgatcctttagaggtgactcacctctgcaatggtttgggacgagtatgtgatgaaggaacatggtctttggagatttcaaaacagcatcatcagaatgagatcctgtctcaaaaaataaaagaaataacatctttcccctatcatcttccaacacaggtgcagctggacctagctgagacagacctttcccagggtgtagcccggtggtgagtgtctgcgtgggtgggggatggtctggatatttcagtgggagaaattccaatcacaggaaaggaaaaaaagatacaatctgagcagagaaccattgattctatcaagtagagaagcccttggatcgtgtctcatttataaatatgatgacacaagagtcatctttctacatgagccctcttttcacaggtatgacctgatggacaacaaggacaagggcagctcctaggagctggcgagtcccagcctgactgctctgtcttcctgccttcgtctcgctccatcaccgcctcaatgtgatgagcctaaagctagggtccaagggcagagcctgtgcccttcagccctttcacctaacaggcccatattcgggcctttgcctgaccaaagagaagaaccgtatgttccctttactgcacggcctttatccttctgggcccctggggcggggacctgagctggctgtttcctgctttgcctgcacattgttctcccttcctcccaactcctcagggccttctgtatctgtgcctggccagtggcagcactagcagtggtattagcttatgccaaatacagctttggaaggatctttttttctttaactagatggtcaccttcttccctaccacacatgggtgggaaggtggacaggctaacctctccagctgtgagcctcttagactactgcatgtagcaaatgttcagcagctcaggcccccatgtccagttctgtccccactgtcctcaaccctgtcctgaaaattctactgctttgatggctggggccagtctcttgtcactttggaaactgaggacgcgtggattctactcaagcctccaagtagtggcatatcagtcttggagctcctagctggtgatacggagagggctttggaggacttgggacagcagggccaatttttttgcccaagtgcctaggctgctaactcactgactagaacttaatctggtactttacagttttgcaccaactctgccaagccactggatcttacattaaacatcatactcaaaccagctgtggttcttttccttaaggatagggaatcaatctacccatctgatgtttattcctactgtcaaaagcctttatccaattcgtgaatcatgtcagtttaattaatggtcaaagcctactaaggttgcagccaccaagaatgttgaggatggtcaagagacctgtgtaaagtagctgctgttgcatttcaggtgagactcatttccagtcacagtgatgaactctgttacccatccaacttgtctgctgaccactataggctttccagggaagggattcctaaacctggtaaacctgggagctctgtgccactgcacaggctcctggtgtctctgtgccactgcacaggctcctggtgtctctgtgctgtcagggcatgctcagctacattcaaaagggcttcaggcccatctagcaggagctgagaaatacacccatttcgatcatctgtacaccttgaactctgctccttgcaagaactttcctggaatgcaagctagagaagctgtgctccatctgttctgccaattgaaaggagagagatggacagagtgaactactgaaaacagggtcactggcataggaacttggggatttcataactgactcagagagactttactatcgtctcttgaaaaatataaaccttccttaggatgctgcccactgggagaagagggaagactcaggggaaaggattcctgctcagttccacaagttgtcgaaatttgcttaattagcaaaaactgaatttaaactccacactgtccacaaactcagcctctatgttctcagtgacccttttgtattcactgctggttcctctaccatctccacttccttcccatcaaagtaagaggaccccaagccttggctttgagcaaggaggtcttatttatttgctccattccccaactccggctctaaaatcacagggggaaaaactccaaaaacagagcaaagaaaatttttaaggtctcttgtcaaatttctagatactggccacgcgcagtggctcacacctgtaatcccagcactttggaaggccaaggcgggcggatcacgaggtcaggaggtcgagaccatcctggctaacacggtgaaacctcatctctactaaaaatacaaaaaaattagctgggcgtggtggtggacgcctgtagtcccagctactcgggaggctgaaacaggagagtcgcttgaaccagggaggcggaggttgcagtgagccaagatggcgccactgcactctagcctgggcgacacagcgaaactccatctcaaaaaaaaaaaattctatggcgtgaacccgggaggcggagcttgcagtgagccgagatcccgccactgcactccagcctgggcgacagagcgagactccgtctcaaaaaaaaaaaaaaaaaaaaaaaaaaaaaaaaaaattctagatactagctgggcatgcagcccaaggcctgctgttctagctggcttcagataatacaacctaggattttgtaatgtgtgattttaagaaaacattcttgagctagtttatcacttcaagtaattacatttccagaaaactagaggacatggcacaaattcttccatcccagaagggtccctactctttcctaacctttttgagttcaatatatataagggaagaggtactactatacatattaaatacaagatgatggctaagtgtgatggctcatgcctgtaatggcaacacttggggaggccggccgaggcagaggatccagagaaaactaccacccttaaaaaaaattagccaggcttggtggtatgcacctgtagtcccagctactcaggagtctgaggcaggaggatcgcttgagcccaggagttcaatgtaatagtgagctaggctcgtgccaccactctactccgccctgggtgacagagtgagaccttgtctccaaaaaaaagaaaaaaaaaaaaaaagataacaaccagaaaaaagaaaacaactaaatacatacaagatgagacacaaaacacaattgcacatttatatatgaagatggaacacattttaagggtcattagtcacatgaattaaatatacttctgtcatttctcaaacaactgacttttaacacacatacacgatgcacaccttttctggagaaagatatgactgcatatggttacgctatcactgattgcaaatactatcctcttggaatgtgtttttattggaccaaacaacgtgctgtagttaactaggtgtggcaacacagttgtctacccaacagccatttcccctcttccctacatacagaatcccagaatgtccctggtggcagtatgccagccccaggaaattaatcaagatcccctttgctgaataatcactttcccttgcaagttgaaatgaccctgacccagttttggtcaacaagatgttagaggaagtcagggactgtagcatctaaagaagaaagccctcattgccccttcctttctgcgtaggttattggtatgaggatattatgtctggaactgcagcagccttttttttttttttctttttttttctttttgagacagagttttgctcttctcacgcaggctggaatgcaatggcgtggtctcggcttgcagcaacctctgccttcggggttcaaacaattttcctgcctcagcctcctgagtacctgggattacaggcacctgccaccatacccagctaattttgtattttgagacagggttttcatcacgttggccaggctggtctcaaactcctgacctcaaataagctgcccgcctcggcctcccaaagtgctgggattacaggcatgagccaccgtgtcaggccagcagcagctttttttttttttttttttttgagacagagtctcattctgttgcccaggctggagtgcaatggtgtgatctcggctcactgcaacctccaccttgcggatgcaagtgattctcctgcctcagcctcctgagtagctgggactacaaatgcccgccaccacgctgggctaatttttgtattttcagtagagacggcgtttcaccatgttgtccaggctggtctcgaactgacctcaggtgatccgtctgcctcggcgtcccaaagtgctgggattacagacatgagccattgcacctggccatgaagatatttatatacatctcacattatttccttaagtggggccaggcgccgtggtttacacctgtaattccaacactataatcccagcactttgggaggcagaggccagcggatcacgaggtcaggagttcaagaccagcctggccaacataatgaatgcggatctgttctaacaagnnnn

SEQ ID NO: 1626 - protein, 489 aa, Homo sapiens [sequence omitted]

SEQ ID NO: 1627 - DNA, 880 bp, Homo sapiens
  source
  (1)..(880)
  CDS (201)..(680)
tgcccgcactggcctcccaaagtactgggattacaggcgtgagccaccacacctggctttaggattcaggttttgctgttacattacttgccattcctttttcatcttttaacatctctcatctgcttgctttcttttttttttttttttttttcctgagactgagtctggctctgttgcccagactggagtgtagtggcatgatctcagctcactgcaacctccgcctcccaggttcaagcgattctcctgcctcagcctcccaaatagctaggattacaggtatgcaccgctatgcccagctagtttttgtatttttagtagagacagggtttcaccatgttggccaggctggtctgaaactcctgacctcaagtgatccacctgccttggcctcccaaagtgctgggattacaggcgtgagccactgcgcctcatctgctcttatctttcacattgactttgacgatttatttttattgttgttattgttgtctccttttcttttttcttttcttttctttcctttctttccctttccctttccttctcccttcctccctccctcccttcctttcttccttcctcggttccttttcttccttttctttcttttctttttttctggagacagggtcttgctctgttgcccagtctggtgtgcagtggcacaatcatagctcactgcagcataaaactcctgggctgaagggatcctcctgcctcagcttcccaagtaactgggacatcaggcgcacaccaccacacccagctcattttttttttttcagttttgtagagatggcaccttattatgtttcccaggcttgtttccaactcctgggctcaagagattctcccaccttggcctcccaaagtg

SEQ ID NO: 1628 - protein, 159 aa, Homo sapiens
MISAHCNLRLPGSSDSPASASQIARITGMHRYAQLVFVFLVETGFHHVGQAGLKLLTSSDPPALASQSAGITGVSHCASSALIFHIDFDDLFLLLLLLSPFLFSFLFFPFFPFPFPSPFLPPSLPFFLPRFLFFLFFLFFFSGDRVLLCCPVWCAVAQS

SEQ ID NO: 1629 - DNA, 1972 bp, Homo sapiens
  source
  (1)..(1972)
  CDS (201)..(1772)
  modified_base (975)..(994): a, t, c, g, unknown or other
  modified_base (1319)..(1328): a, t, c, g, unknown or other
atattttagagcaaggtattgggagcctctctttatgagccgtattaccttgggcaagtgacataacctctctgtgcttcattttcttacgtgtaaatggggattgtaaaactcataagattgctgtcaggattaaattaatgtatgtaaagcacttagaatagagctcggcacagagaaatgctacatatatattagctattactgccactgccaccaccaccatcaccaccaccaccaccaccatcaccatcatcatcataatcacagccaccaccaccatcatcaccaccaccaccaccaccatcaccatcaccaccatcaccgccaccaccatcaccatcatcatcataatcacagccaccaccaccatcatcatcaccaccaccaccaccaccatcaccaccatcaccatcaccaccatcaccgccaccaccatcaccatcatcatcataatcacagccaccaccaccatcatcatcaccaccaccaccaccaccatcaccaccatcaccatcaccaccatcaccgccaccaccatcaccaccgtcatcaccaccaccatcatcaccatcatcaccattatcaccatcaccaccaccaccaccatcaccatcattagcagctatttaatcaccaccaccaccaccaccatcaccgccaccaccatcaccaccatcatcaccaccaccatcaacaccatcatcaccattatcaacaacaacaacaataacaacaacaacaaccatagcaacaattacatcaccacaacaaccaccaccaacaccaacatcaccacaccaccaacaaccaccaccaccaccaccatcaccaccaccaccatcaacaaccaccactaccatcaccaccaccaccatcatcaacaccacacaccaccaccaccaccaccaccaaccaccaccaccaccaccaccaccaccacaacaaacaccaccaacaacaacaacaacaacnnnnnnnnnnnnnnnnnnnnaccaccaccaccaccaccaccaccaccaccaccaccaccaccaccaccaccaccatcaccaccaccaccaccaccaccaccaccaccaccaccaccaccaccaccaccaccaccaccaccaccaccaccaccaccaccaccacaaccaccaccaccaccaccaccaccaccaccaccaccaccaccaccaccaccaccaccaccaccaccaccaccaccaccaccaccaccaccaccaccaccaccaccaccaccaccaccaccaccaccaccaacaccaccaccaccaccaccaccaccaccaccacaacaacaacaccacacnnnnnnnnnnatcaccaccaccatcaccaccaccatcaccaccaccatcaccaccaccatcaccaccaccaccatcaccaccatcaccaccaccgccatcatcatcaccaccaccaccaccaccatcaccaccatcaccaccaccaccaccaccaccatcaccaccaccatcatcaccatcaccaccaccactgtcatcaccaccaccaccatcaccaccatcaccaccaccatcaccatcaccaccaccaccaccaccatcaccatcaccaccaccaccatcatcatcactgactactaccatcaccaccaccaccaccatcatcaccaccaccatcatcatcaccatccctgccaccaccattatcacccaccaactaccaccaccaccaccaccaccactaccaccaccactaccaccactgtattagtccattctcatgctgctaattaagacatacccgagactgggcaatttacaaaggaaagaggtttaatcgattcatagtacagcatggctggggaggcctcaggaaacttacaatcatggtggaggggaagcaaacacatccttcttcacatggtggcaggaagaattgccgagcaaagggggaaaagccccttataaaaccatcagatctcgtgaaaattcac

SEQ ID NO: 1630 - protein, 523 aa, Homo sapiens
  MOD_RES (259)..(265): Variable amino acid
  MOD_RES (374)..(376): Variable amino acid
ITATATTTITTTTTTITIIIIITATTTIITTTTTTITITTITATTITIIIIITATTTIIITTTTTTITTITITTITATTITIIIIITATTTIIITTTTTTITTITITTITATTITTVITTTIITIITIITITTTTTITIISSYLITTTTTTITATTITTIITTTINTIITIINNNNNNNNNNHSNNYITTTTTTNTNITTPPTTTTTTTITTTTINNHHYHHHHHHHQHHTPPPPPPPTTTTTTTTTTTNTTNNNNNNXXXXXXXPPPPPPPPPPPPPPPPPPSPPPPPPPPPPPPPPPPPPPPPPPPPPPPQPPPPPPPPPPPPPPPPPPPPPPPPPPPPPPPPPPPPPPPPPPPTPPPPPPPPPPQQQHHTXXXITTTITTTITTTITTTITTTTITTITTTAIIITTTTTTITTITTTTTTTITTTIITITTTTVITTTTITTITTTITITTTTTTITITTTTIIITDYYHHHHHHHHHHHHHHHHPCHHHYHPPTTTTTTTTTTTTTTTTVLVHSHAAN

SEQ ID NO: 1631 - DNA, 949 bp, Homo sapiens; identical to SEQ ID NO: 1373
  source
  (1)..(949)
  CDS (201)..(749)

SEQ ID NO: 1632 - protein, 182 aa, Homo sapiens [sequence omitted]

SEQ ID NO: 1633 - DNA, 1330 bp, Homo sapiens
  source
  (1)..(1330)
  CDS (201)..(1130)
ggcaacggtgaggacactgacaccgaggagattggcaaacgttacaaatcagggcatcggtgtgtttctgtgtctgttttttgtagaaccaggtgttaagcatttaccatacaatactgcagacgtgggagggttttgagtgttacccagacacccccaaattcttctaacaagtcttcagaggttgaataacccaagccatgttacacagcttaggaaagaatgaagatgggtttaatccactgagtccagatctcaccatctctaccactagaccaggcagctctgtgtggggaagtgtgtctgtgtgtgcgtgtgtgtgcacaagtgtgtatgtgtgcatgtgtttgcacgtgtatatgtgtgcacacatctgtgtgtatatgcacaggtgtatgtatacgtgtgtgttggtgtatttgtgtgtgtgtggaaatgtatgcatgtatgcagtgtgcatgtgtgcatgcatgtgtgtgcatgtgtgtataggtgtgcatgtgtatgtgtgcacgtgtgtatgtgcacgtgtgtatgtgtatacatgtgtatgggtgtatttgcgtgtggatatgtatgcatgtatgcacgtgtgtgcatatctgtgtatgtgcaactgtgtatgtgtgcacgtgtgtatccatgcatatgtgtgcgtgtgtgtacatgtgtgtataagtgcgtatgtgtgttcccgtgtgtatgcatctgtgtctgtattgtgtggcatgtatgtgtctattgtgtgtgtatgcatgtgtgcgtgtatgcatttatacatgtgtatgtgtgcgcatatatggatgcatgcatgttgcctgcatgtgcacgtatcgggtgtgtgtgcgtgtacgtgttcacgaatatgcatgtatgcatatatgtatgcacgtgtgtgtaaattttgccgtgactgttttcctgtggaaaggctgaagtgtgcaggttcttgtgccttgtgggggggctggttcttcacgtatgtgttgtgtggctgtgcacaggttctgtgcctgtggggggctgttcttcacgtatgtgttgtgtggctgtgcacaggttctgtgcctgtggggggctgttcttcacatatgtgttgtgtggctatgcacaggcagaccatgctatagtcctgtagctgtgtggatgcgagcggagggggtagggcccaggaggccccatcccctgagctctactcctcctaggacatcctggacctggagaaccagcgagaaaacctggagcagccattcctgagtgtgttcaagaaggggcggcggagggtgcctgtgaggaacctgggaaaagttgtgcattacgccaaggtcca

SEQ ID NO: 1634 - protein, 309 aa, Homo sapiens
MLHSLGKNEDGFNPLSPDLTISTTRPGSSVWGSVSVCACVCTSVYVCMCLHVYMCAHICVYMHRCMYTCVLVYLCVCGNVCMYAVCMCACMCVHVCIGVHVYVCTCVCARVYVYTCVWVYLRVDMYACMHVCAYLCMCNCVCVHVCIHAYVCVCVHVCISAYVCSRVYASVSVLCGMYVSIVCVCMCACMHLYMCMCAHIWMHACCLHVHVSGVCACTCSRICMYAYMYARVCKFCRDCFPVERLKCAGSCALWGGWFFTYVLCGCAQVLCLWGAVLHVCVVWLCTGSVPVGGCSSHMCCVAMHRQTML

SEQ ID NO: 1635 - DNA, 29283 bp, Homo sapiens
  source
  (1)..(29283)
  CDS (201)..(219)
  CDS (7017)..(7163)
  CDS (14418)..(14563)
  CDS (18345)..(18441)
  CDS (21075)..(21210)
  CDS (23825)..(23913)
  CDS (25418)..(25481)
  CDS (28963)..(29083)
aatcaatgggatagaattcagagtccagaaattaacccatacatctatggtcagttgatttcaacaaagatgctaagaccattcaatggagaaagaatagtcttttcaacaaatagcacaggaataactggatatccacatgtacaagagtgaatgaaattggattcccacctcacaccatgcataaaaattaactcaaaatggatcggagagctaaatgtaagagctaaaattcttagaagaaataaaaatcttagaagaaaataaaggtgatattttagatcaagcaagtttttgtctcttttagttcagttccttcattggtggcttcttttgtgttaaatagatatattttgtagtgtaccattttaattcccttgtcatttcttccactatatattttgagttatcttcttagtgattgtgctgaggatgacaattaacaccttaatttataacaatctagttcagattaacaccaacttaattttagtagtacatgaaatgtcgcacctatatagctccatctctctcccccacccatgatgctattgtcacaaaatatgacaccaaaagcataaacaacaaaacaatagatagattagacttcatcaaaatttaaaacttttctgcatcaaaggtagaagtctagcctctctgtgtggtctccgttgacaccatggggaggaggacaccttgccactggctccctgcttagccttccctgatagtcccaacaggggagttgaggggctgacttagttcatttgggctgctgtaacaaaataccataaactgagtagcttataaaaacagaaatgtatttctcacagttctgaaagctgggaagtccaagatcaaggccccagcagattgggtgtctggtgagggcgcgccacctcagacggcacttcctctctctgtcctcacgtgatggaaggggcgagcagcctctcttgggcctcttttataagaacactaattccattcatgagggctccaccggcatgacctagtcacttcccaaaggcaccacctcctaataccattcccttaggggttaggacttcaacatataaacttagggggcagcgggcacaaacattcagatgtacagatgccttgttctctgtggtgtttagaatagtgaggttattgtctaaaagtgtttttcttgccaagcttcccatcagcttgtcctttggtagtgagaggaggcttttcttggggcttttgttttttttttaccctgctccacccctgttggtatttccagagtgctggcttcttcgcctacaagtttgggatgtatgaggcaaaaagaatacagaatacccaagaagctcaccaatatgccattcctggggtcccaacttttctagcttgtctgccttcttctctctgcattcagaattgtcttatgtttgtctttttttttttttgagacggagtttcactcttgtcacccaggctggagtacaatggtgcaatctcggctctctgcaacctctgcctcctgggttcaagtgattctcctgcctcggcctcctgagtagctgggattataggcgcccaccaccacgcccagataatttttgggttgtttattttttttggtagagatggagtttcaccgtgttggccagactggtctcgaactcctgacctcaggtgattcacccgccttggcctcccaaactgctgggattacaggcgtgagccaccgcgcccagccttttgtttgccttatatgtgatgaccagggttttagttgtacatagcaggaagaatagggaaaagtacatctactccatcttcccagaagcagatgttctataattgactttttaaatggaaagttataaaataattttttgtatgcaaggagcattaaaatattgaaactggctgggcgtggtggctcacgcctgtaatcccagcactttgggaggccgaagcggtcggatcatgaggtcaggagattgagaccatcctggataacacggtgaaacccacctctctactaaaaatacaaaataatagccgggcgaggtggcgggcgcctgtagtcccagctacttgggaggctgaggcaggagaatggcgtgaacccgggaggtggagtttgcagtgagccgagattgcgccactgcactccagcctgggcgacagagtgagactccatctcaaaaaaatattgaaactaagattcattatatttgtaaatacaatttgttagatgtataataattagttctgtggtaaggttttatttcaaaaaactaaatttgaataacatatttctttttacaaaataaaagcagattgccttttttgtccaccaaagccatggctctaagggggaagaaaaaacctcgctcatgtttatgagaagttgggctaataataaacatgtcccaaaatgctttccacaaagtgctgattctgttgagctttttagttgcaagtaacagaagcaagttcttaagcaaaattgggctgttcctggcttcaggaaggtctggaaccaggaggtctggaaccaggatggccccagggtcctgaggagcgacaactaatgatttgctcaggcctcaccttgggctgaagggagtcaacctttcttcagcctttgtgtttctcagtccaagatctggatcccagagaaagagattctgggctgcctggcttgggtcacacttgggccgtgatgtctagggaggatggagcactgggaatgacagttccaataagaccgtgtccaatggggagggggcggaggagagtcctccccagcaaaatcagggtgtcgtttatcagaagaaaaggaaaggattaaaatgttagtcaagtgagagtcatagatgtttactccagatgctgatggctggattccaggttaagagttctagagccaaatgagtttgagaacctgagttagacaaggagaaactcccctgagagcctctaacatgctctgggggcctcccagcagtgggtagaggatgcattgcctttaactacatggtgcttttcttgccttggcaccccattagcatctctgggaactcagctggggaaaccctggctgggcaggtctccagcgagccttttagctctgagatcctgtcatcccacaggaaggacgtgttctgcctgcaggtggctttattctgtcttgctgctcatcgggtgagtcagaatcagttcccagctctgaccttttccaggtgggggacacatctcaggtgtggtgaggttgtggcagagctgggactagactggggtcccctggctccacatctttcccttctgtggcagcgctgagccttgttgggagagaagttaaggacagctatccatagtgatttcagttggtgggcctccctctcggtcctcctgccctctcccgtccctggccaactgccccttctcagggaagacctgccctcagctctctaagccccgcgatctaggagagggcaggggggagggttgacttcactgttactgctgactgtgtcctgagggggaagcctcggccagctctggccactgcggggcagcttgctaattatctgtctttccagatggactgaacatatgacagtgaggactgtttgtcttgttaactgccgattccctagggcctgtcccccgccttaaagaatgggcaggatttcaccagggaggggaaccaggcggggttgggaagagaacatgctgggaaggaggttgcagcattggccagcatagagcattccttggtgttcagtggtggaatatggatggagggtgtgttggggacttgctatagtgtggtttaaatgctagtacactttgacccagcaattccacttacaagaatttgtcccaagggactaatccatacaaacgcacaaaaatgtgtgcactaggctattcaatcacagcattgtttttttaaaaggaaacataatagacacgggggactccaaaacggggaggggtgggggtgagagttgaaaaattaccgattgggtactgtgttcacttatttgggtgatgggttcactagaaacccaaacctcagcattacacaatttacccatgtaacacacctgcccatttaccccgactctaaaataaagttaaatgaaaaattaataataaaggaaacagcctaaatatccagtaatagcaaagcaatgatataaaatatggcacatccaaaaataatgagttatttgacatttaataaaaatgacaaattaggtatgcctgacagggaaatgtgctcacaatatgttaagtaaaaaaacagattataaaacagatggtaatcttatttttataaagtaaattaacatttccattgatatgtaaatttatggacagaaaaatgtttgcaggaataagaaccaaaatgtttatagtcattatctctgggttatagaattaaaagtgacttttctattatggtggtgttgttattgttatttttttcatttttttctcatgctaccttgtctaagatattattatttttatctatatatatttcctatttagtctacaatgaatatatgtttggtaatcattttagaaagtacaaaattccgtgccaggtagtctgaacctaactcataggtgatgtaaattaactttttataaattgagtaattgacaatgccctaagcaagtgagccagttaaaagagtttcattgaaaccctctgggaaattgaagacactattgacaagatagcaaaaagtattctctggcctatatttctcttgtaaattctgattttggaatgttgcttttctgcacaagatggtggcaagttaatactttaaagggaatagcacagcaggtttagaccttgtcaggtcagtgtgatcgggccaccaaagtatccaattcagggcagcattttgtaaaccagcaaagcagccagattaaccttcagtagtaacattccagttgtgggtctggagtgtggctttgtcactgatattgtttttctggttttgttttggggcagcaaatggttgagtgtcagaagtgtcctggggccccctggcttgtgcccaaatcatgtccactcctgtgaactttccttacaggaaaacctgattggcgccctcttggcgatcttcgggcacctcgtggtcagcattgcacttaacctccaggtaagtttcagttaccagcactgtctggggacagagacacagcagacaagtcagggtgtcttatccaggtccagctgcctcctctctgcagggccttgcctactgcatccctgggctgcacctgggacaataccttgtgggccgttccaggatttctcttgattcagtggccccactccatcccgccctcgccctcctagccaggtcctcactgtctctccttgggctttgcagtgacctcctgctagcttctctggctctggtctcatccctctttgccttgctgcaaagctgctggaattaccatagttttgtcaaattcaactctaattacagcactgttcattacttaaaagcctcagggatgccctctacagctgctgtggatccccccactgacctccaaatcccctcggcctgtctgagttcacaagcagctgtggtgtgtagcaagttgatagctaatgagcttctcatgggggcaccaaggagctggtgttactggcatgcaggcacagttggggtgtgcactgggggagcaggacgttaatgcccctggaggctgccttctgccagcaggggtgggaggcagggaataaatgccccaggctcttatcctctgctaggatgattctaaggtgagattcacagggtttttcagagggtcccctgtgggactgagtcccagttgcccacgggactaatccgctcatgaatgcacctttcatctctgttccctgcctcactttccccttcccttactcgtgctccctggaattatctcatacagactacctgctcccacattcttgtctcagggactgcttctgggaaacccagataagacttggtacctgctaacaggatgaatcccacagcacactggccggcttcactccaccagcactgcccagcttctgcctgcagtgaactgctctccctccctggagcaggcaggagactgtgatccctgtgggcacacacttgtgccttgttcacctgtactctatgcatctcagctctgggatgtgtatgtttctgtgtgtcgctgagaccacgtggtctcttagctacttgtctggttcattctcttctttctccagggcagcatctctggttgtttatctgcttctgggcagcccacatcatgatcctccccaaatggcagacttggccctctaagtcaacatgactttctagcctgctttagttactgcttcagtttcgatgtcccaggttcacatttccccccaaaaaagaatattgaccatgcttgagccacgtatccaccccagggagagcaaggcccactgatacccacacaactgcccagcgagagctgctggcatgtagacaggaaggagtgtgccgaacacacagtcatccaaacgtggggaatcctggaaactgcagagagagggaggaggtcgacccaagggccaggccaagtgggatctttagactatggctcccaccctgagactgcattgcctgtgacgtgcattagaaatgcctgttttcaggctcatccacacctctccgagactgactcaggatgaggcccaggtgggtattttgacagagcttctcaggggattataaggattcccagcctgttggagagctactgtcctagaatttagatctagtatttagatccccactgtcttactcttctctgagtcaggactccacaagaacctgacaagtcttcccaatttatttgcaagttgggggtggatttagggtacctacatcatagcatttttttccccaaacatctgagcaaattgcattatttctcgggtttctagaagtactgccacatccgcctggcaggctccaaggatccccgggcctatttcaagaccaagacatggtggctgggcctgttcctgatgcttctgggcgagctgggtgtgttcgcctcctacgccttcgcgccgctgtcactcatcgtgcccctcagcgcagtttctgtgataggtaagaccagggctgccccaccctcccctggggtgctcccagctgcgtgaccagagtgccagcgccaggatcaaaggtgcccattgaacaaaccagctttagcttggataataatagcctaatacaaagggcttcagacacaccaggccctgtaagtgcttacagatattaattctgctaatcctccagccacctgttgagggagatgttgttgttatccccatttaacagatgaggaaactgaggcacggggtaatgaaattactttccccaaatgacacagctagtgagtaacagggctgggatatgaactgggctgtctggctccaggttctgtttaagattcagaaggcttattagaattgctttttatttctaaaagaagaaggaagataaaccttaacccatgcatcttttcaccatcaagatacattaagcttgtcactgagtgcagtggcttgtacctgtaatcccagctacttgggaggctgaagtgggaggatcgcttgaggccaggagtttgagaccagcctgggcaacatggagagaccccatctctacaaaatgaaacaaacaaacaaaaaagaaaaacaattagctgggcatggtggtatgcatctgtggtcctagctacttgggaaacagaagcaggaggatcccttaagtccagtgtttgagtgctgcagtgagctttgattacacaattgcactccagcctgggtgacagagcaagacctcatctattgaaaaaacaaattaagcttttgtagggtttggggccaggccaggctggtctcaaattcttgagctcaaactatctgcctgcctttcctcccaaagtgctgggactacaattgtaagccaccacactggccattaactttctcatctgccagctttctgtgatttctgtaatcactgaaccagtgtttcagaacatttgaaccaactaaaagacaagggagctttaatgttcatgagaacacaagcaaaacagaattagaaaaaaaaaattcttcttaaagaaaagatgttagtagattagtgaacaatagctttttttgtgtgcatagcagccaggacaatgaacttgctttgaaatatttctttccattttgctggcaagcactactctgcccagatgctctgctctgctcttaaaggagaaagtcatattttgggtcttattcctccttgagttaagaggttctcttctatgcaagggatggcagatgcatggtaactatgtgcccctcccttgctgtgctcaaggcagacatcgttaatcaatcatggcattccttcctagagagcatagatggggcctcagaattctcagtgcttccaacagtcactaccaatcaccaggagttggcaagggagcagaaacctatttactttccctgatcctgttataagtcccggtttttcctaaccagggttgctgaactggcagcttgcaaagtgaatgaggtcctcagacatggtgtgtgttttttcccacacagtacttttttaatgtaatttgaatgtctttagctgaggcaagtagtttgccagagtctcagcctttccctgttgtcttacttccagaccattttctatatttgtgttctgttactccccagcccctgtatgtgatcatacctgtagccttatcactctgctctgcccactgcaggtatctccaaagggctcccaaacctttttcacaatgagaaataagtgtctaagtgactggtgctttaaatattagtcttcgaattttaataaggttcaaataaccaaattcttttttttttttaaagaggccaagttataatgataaaacttcagatatcagccactggaaatgaaggggccctatagcttctgaggtcatccagtgaggagtaatattaaaaataataatgattatcacttattggatatctatgacttaaccatcactgctccaggtacttttagtaataatattagcttagttattgagattgactgtgtgccaaatgacttacatatatcattgaattacccctatcattcagaaaagtaattttcaatggtgggctggtaaaccacctctcagagagacaaaggagaagaaaaagaagaggagatggagggatggagaaaggggatggaaaagtggaaaggagaaaaggaagacctgatttgtagcgcttgccagtttatatggtatagacattatcactcccactgtggctgatttcaagctacggatggttttctgaatatttaacaaaatatttaacattctatgagctggtgccagctggatctaacaccgtatttcatagactagagaactgagactcaggtgaagtgacatatccaaggacacacagccagaagaggcagaactagggtagtgagtgatccaggtctgttcacagtgactgccagccctatcctttcgggcagtcccaagggcgtttgagtacatctgtgaacgtgtaagagccagggagaggaaagagccgggggaaatgtcagaggtgggtgttacagtggaagaagtaagagcctggcctcctgcagtcctgggttcaagtcttgccttcccctaccaccttcatgatctcgagtgggccctttacctctctcagcttcagtgtccccatttgtcaaataggaataatgagagtacccacctccaagggtgaacatgccagaaataacttgtgtaaattgcctgtcacacagcaggtactcaatgcttctagccttgtaggaaatcctcaggaaggaaggctcctctctgagcctccctttcctagatggaatcacacaggaaccaagcttttggcagcatgagtgacaggttaggaagtaccaagctccaatgcaaagaagccacccagagggcatgggtgaagggatgccctttagctgacagcagcctcaattcccttttctttgtgcttcatttttcagctagtgccatcataggaatcatattcatcaaggaaaagtggaaaccgaaagactttctgagtaagttcagtgatttgagctgtgtccttgattttatatgaacgctttttattaattgtaaaaccagttcactctaattcagaggttatctgcctcctgctgtcctctgtggttctatgttctgccctcaacaggctcctgagagctggattttttaatcaggggttctcaagcctggccacacctcagaatcatcggtgaggcttttaaaaatggacttttatccaccccattggatcaattttgagcatctattattgggattttaggaggcctaagaaaagaaaccctctctccctgactgagttctaaagcaatgggagtcaaacacagatgatcagaagtcatgccttactcctaataaaagctagattagagcattttaggtgagctagattaaagcataaagctgcttaggtgagcagccaagggaatgtccttgtactctccccacaggaccctccagctcccagtcagaccttgggcgggtccccccaagaaacacttgggtttacagagtggagacacttagccagaattattgcctcacatagtttgggccagagaaggaagaaaaaagatcaaagccccagtatttaatttttttatttttttaagaagattagctccacctaagttgagaaatgtagaccaatagggcaagaggcagaagtgtcactttaatggaggtccctccacatggaaacccaagaagtggggaagaagcgtttcccacaaaacacctactaagtcccatgttgtgttataggtgctgggaatacagcagtaggatagatggggcttctgctcacagagattatagtcgtgtgtgtgtgtgtgtgtgtgtgtgtgtgtgtgtgtgttgtgggaggggagagatacaataaacaagcaactaaatgaaataattttaggttgtagtgagtttttcagagaaaattgaatgctttcggggactggggagatgggaacactttcctagactgatcagggtcagactctctgaggaggtgatttttccccccaacttttaatttaatttcaggggtacatgtgcaggatgtgcaggtttgttacatagggcaacatgtgccatggtggtttgctgcacagatcatcccatcacctaggtattaagcccagcatccattagctattcttcccaatggtctccctcccccaaacccccaccctccaacaagccccagtgtgtgttgttcccccaccatgtgtccatgtgttctcatcattcagctcccacttaaagtgaggacatgcagtatttggttttctgttcctgcattagtttgctgagaataatggcttctacctccatccatgtccctgcaaaggatatgatatcattttttttggctgcatagtattccatggtgtatacgtaccacattttctttatccctctgtcattgataggcatttaggttgattctatgtctttgctatcgtgaatgtgctgcagtgaacatatgtgcacatgtatctttataatagaacaatttatgttcctttgggtatatacccagttaatgggattgctgggtcaaatggtatttctacctctaggactttgaggaatcaccacactgtcttccacaatcgttgaactaatttacacaaggaggtgatttttaagcccagatccaggtgatactaaggagattgccatccccaggtctgtgggccgggttttccacataccaggagccacaggtgcaaaggatccaaggcaggaacaagcttggtttgtccaagtctcggtaaggctgtgtagccagagggtaatgaataaagtgagagggagatcagtgagacatggaggactggctgatgtgtaggccttatgtgccatactgaggagttgaggagtgacgtgatggtggcccaagctctgtcctcagagattctgcgctctgggctggggccggggccggggcattggcattcttatagagcttcccagggtgaagtgtatactgatgcctgcaaatcactttgaaatgcatcaaaaataagatgaattaatgcatggatagagagatggatagatttgtgagaaaacaagtataatgaaaggtcagtttagaatctggctgttgggactatgggtactcactatacaactttttgaactttaatatatgtctgaaaaattttaaaacagaacttcagggagagaaaatttccaagatgttgtggatatacagccaagtttggggaccactctgaatcattgatatagaataagatcaaggtgggaccaagaggccaaaaaagaaaagaattttactctaaaaaaaaaagcagaactttgccaaaagaaaaaagtagagactttggagctactgccaagaagaccaaatgacagactgaatttcaatagtcttaatgatggggcacgggggttagggctggttctaagaccactatagaagtttgcatccctttgggaatactctaggtaatcctaggatgagagccgtgctagtccaagcagtgccctgtgtgacttggaaaaagaaggcccctctgggcatctgtagttttgtaggcacaagccttgatgagcagaccatgggctggattttagcccatctcacctattgagccaggtgcccttgtgcagtgagcaacctgcacagctgaatatggctgttttacctggagttccattacattcagcaaacattcactcagtgctagacctgtgttggacgctgcaggtgtggagatgagtaagacccatccctgcctgaagaaaactttagataacagacctactttattgagtttaaccgtggctcattcattcattgaacaattgaacaaccgttttttgagcacctcctacatttacgaggcctagtactgagaataaagataaaagacatttaacatggtatcacattttctctagacagtgggatgaaataggcaaagttagttctatcccagaaaagtccagaggcctgtggtcaccataagtgtgtcttagaactctcagccattttttggctgcctggggctgggccggaccttggaggcttttcaccaaccttacagagttcaataggagtgtgacaagactccaggggagagataagagccatgccacctggaccactaacagttctctgacaggtctgtggcgtagaatattgatagtaattatatagttattatatagttcccttggcgttaggttaaatagccagttgagaaaggatgaggtaatttttaaaaggtacgtgttgagctctgaaggtttgcctttatgttttattttatttgtttttttagtttgcccataaagtgattttagctttaaaatgttacctgtaaaatgcacattaaaatcacagtgcaataccatcatggctaaaatgaaaaagacaaaatgtaagtgttgacaagaatgtaactagaactgtcttactctactggtgggagtgtaaattggtacagccactggggaaaaacatttgacactaactaccaaactgaacatccacatatcctatggaggaattccacctctcattttatactcaacagaaatgcatacatgtgtttctcaaatgacatgtacgagaatgttcacagcaacattattttttataactccaggctggagactcctcaaaagccccccagcagtagaatggataaattgtgttgtattcacacagtggaccactgtacacagtgagaacgaatgaactgccactgtgccccacaacgcagacgaatctcagaaacatcatgctgagtcaaaagagatcacaccgtatgggtccatttgtataaagcacaaagctaggcaaagccatcagtgctgttacaggtcaagatagtgtaaccctgagggtggggtctagtaatcaatttcacaaatgagaaatttcagtatctggctaatgttctctttctccatctgggagctggtttcatgagtgtgttcactttgggagaattcctcaagcactttttgtatgcatgttatacttcattaaagttttttatttttttacattaattgtttttttaacaaaattaaggaaaatcatttattttttaaagtaaagaaaaaccaaaaatacaaacaataccaggtcatggtatgttgcaggagaagcctgttttttcatggctgagaacgtgtactgtatcttgggcctgttgttgcaatgagtccgtgacagcctctcttccccgcagggcgctacgtcttgtcctttgttggctgcggtttggctgtcgtgggtacctacctgctggtgacattcgcacccaacagtcacgagaagatgacaggcgagaatgtcaccaggcacctcgtgagctggcctttccttttgtacatggtaagagaagcctccagtcgttccccctgagatggcaggagggagatcaagtcctagaaaccagaaacgtgaatacccagcaataggggattccgtgagttgcggcacattttaccagcatgaaagaccgtgcttctggagagtacacagctcatggcgaaatgcttgtttcatttatgtaatatcaaaactctactggtgggagtgtaaattggtacagccacttgggaaaaacatttgacactaattaccaaattgaatatccacatatcctatggaggaattccacccctcattttatactcaacagaaatgcatacatgtgtttctcaaatgacatgtatgagaatgttcacagcaacattattttttataactccaggctggagactcctcaagtgccccccagcagtagaatggataaattgtgttgtattcacacagtggatcactgtacacaatgagaacgaatgaactgccactgtgccccacacagtaatatcaaaaccattatgatgtcagttttattttttagaggtgtgtataggtatgtggtcatgtaatatacctaggaaggcctggatgggaaagcaaattccatcagtagttggctctgggagatagtgttatgactcagttcttatttcctcttcatctttatgaattgtccaaaatttctacagtaaccatttcaaacttttatggtaaggggaagaaaaagttaaaactgtaaaccatttaagaatgttattttattttttttcccagtatcacactgctgatagaagcccaggagacacgggaaattttgtctcctaacccctccgccagagctcagtcctctgccccagttctatcccattttaagtctataaatcaactgattaaggaaaacatctaaagtatgtgataaagctactggtacgttcttgttccatgccctgcgctgtgctaaacacatttttatgtatcatctcagattctcttaaccctgtaaagtaaatgttcttcccattttatgggtgagaaaaccagggctctgagaggttagctgacctgctcagagttcataaaagcagggttggatttgaaggccgggcccacctggcctcaggtgccatcttccttccccgtggcctgccgacaaaggtgttcactgttttcctctgacataaacagcctggtctctgattgagtctagaggccctggaacatcctttttcctcagattatccacaaggcagaggatcacttcccctgaaatgggggctgtgtcatttcccaacaggcagccagccccagcatgtagttggtgacagagcaaaagaccgcctccttgggcaaagcgttaccccagaacaggcctttcactcagaggattgaagcccaagacttcctaagtgctgtgtggccttagccaagtcgctttccttctctgtttccctctctgtaaagtggcaagaatctctggacttaaaattgctattgggagatccaggaagtagcatttaagtcacccagaaggtggtagatgctcagtgaatgattctgttgtcttacttcatcatgactgggaggcagtgctgccagctggagagatttggccaaaccaaattcagtcaatatttattgagcgtctgctgtgtgctagacactatggttataaaaaataaatgagacatgcccacagtactcacggactgttgggaggcaccacatatgcacagccatctcatgatataatgtccagtgctattccagtgttcattttagaatcatggagaacgggccacatgtggtggctcacacctataatctcagcactttgggaggccgaggtaggaggattgcttgagcccaggaacttgagaccagtgtgggcaatgtggcaaaaccccgtctctatttggaaaaaaaaaagtaaaaattagccaggtgtggtgatgcatgcctgtattaccagctactaaggaggctaaggtgggaggatagctttgagccctggaggtcaaagctgcagtaagccatgatcacagtactgcactccagcctgagtgacacagtgagaccctgtctcaaaaaaagaaaaagaaaaaaaaaatcatggagaatggctgaagaattgggacccctcaaatgcaggcacagtggttgggaatgttgatgattgacagcacatccacttgatgaagtattctgcagcaattaaagataattatgacaacttcacaaaacatgaagattgtttatggtaactaaaaacagcccagtacaaaatcgtgcattgactataatgacaactcgttaaaatatggattcactggaacaaagacaaagaagaaacggggaaatgaaagcagctgtgttttatggtctctaattagaaggaatgttttaaatgtttcaaaatgcccattaatgtttctgggttttttttatactaaatcagctttgataaggggtttgggataggcaaatgagactaagctgttgtcaaagttttctgctttagttgcactgggcgctagggctggcttaacttcttgggaaagtgttagcaaatatctgggcttttaaggggtagaaaggaacagttgttgatgcaaggagggggagcttctcaaactcggacttgccatcgtctagtggtaagtttctactgatagagcaccagacagtgtggcctagcaggaaagtgcatgggcctgggagccagactgtccaggtttaaattcctctgtgccacgccatcgtggtagtacctgcttcgtagagttattgtgctgatttagtgagtttaacgtagataaaatgcttagaacactgcctggcgtacaaggagacgtcatttagtgtaagctatgattatgggcccataaaaagaattcttaaccctactccacagagggttaactaaggtttagagaagttaagtgacttacccaaggccacacgactagtttagaggcagacctaagttccagcccaggtctccctgactccaaaggccttcctcattctactctgtgaagcttcacactggaagcttggctgggagcacagggagtatatactcatattctttatttatgtatttatttatttttttgagatggagcctcgctctgtctcccaggatggagtgcagtggcgtgatctcagcaattctcctgcctcagcctcctgagtagctgggattataggcagatgccaccacgcccagctaattttttttttttttttttttgtatttttagtagagaccgggtttcaccatgttggccaggctggtctcgaactcctgacttcaggtgatccacccgccttggcctcccaaagtgctagggttacaggtgtgagccaccgtgcctggcctcacattcttgaccaaataggttggtgaacaagtgtctccctcttggaccaacccattgttttaatggggatgcccatggagcagtggagtgggaagaaaccatctcagcctgatgcatcttggccctccaagaaagagtggatatgagagcagcacgtcaccctcaaagcttcagcctcaggacaacagggaattccttctcagtactagccagggattagagagattcactctgtgtttcccttttcccctgaacgtctaacagtagtttgggaaatgctgaatcatagctcagtcattccctttcaaccctgtgactctggtgatggcccagcccaccagggtctcccggtctcgcctacttctgtggtccccactgacccccctgcttgctgccttccacagctggtggagatcattctgttctgcttgctgctctacttctacaaggagaagaacgccaacaacattgtcgtgattcttctcttggtggcgttacttggtaagttggcatctggatgattgagttttgccaccaccaagaagcaccaaatggaaatgtgggttttgtttgcagagctgtagccgctgggcacagaagttgcttgagactggctgaggttgttctgtctccatcagtggctctggggagctgggtccctgctgaccggaggcaaactcctgtgctccaggagcctccaatctaaagggagaaaatagcactaaacaactagccaaattcataggtcatgtaagtttgggcaataacaattccaatgaggaagaataaagtagagtgaggatgaggtgagttagtttgtttcagagacggtagtagtagagcatgccccagcgattgagccctgaaaagatccatgcaaaacctatcagagcttagggattcattctgattcaaaggtaaaactagattttgtcatctattttttcttttccttttagagggatgggtgctgtggaagagatagctcctgaatcagcttgaggctagaactgcatattaatttttcctttttttttttttttgagacagtcttgctctgtcacccaggctggagtgcagtggtacaatcttagctctctgcagccttgacctcctggcctcaagtgatccccctgcctcggcctcccaaagtgccaggattacaggcatgaggccctgtacctggctagaactgcatataattttatagctaaatagagctgtggggaatccatccttcctgaggagaagcagacagaggcggaggagcaggctggtgtcagggctggtgaagcctgctaccgcgctgctcttgagtggcctcaggctaatgaccctccctccttaagccacgctgtccacttctctaaagggggggcctatgagaacatccaagtcacggaagggagtgggggttaaatgagatgtgcacaggtggctaatatgtgcatttttcttccaaccttcctactgtgtgccctaccaccgccacaagccatcaaccaaatagatacctgtcaccgaagacagggtttccttaattttttaacagctctgttgagatataatttacataccataaagttcacctgtttaaagtatacaattcagtggtttttagtatttcatagagttgtgaaaccatcatcctaatctaattttagaacattttgtcacccccaaaagaaaccctgtgcccattagcagtcactccctgttccccttttcccagcctcaggcaaccactaagctatcttctgtccctgtagatttgcctttttgaacaccttcataaataaagtcgtatgctttgtggcctgatatgactggcttctttcactgagcatgatgattctgaggttcacccacatcatagcatgaatcagtccttcattcctcggtgactttgttttcaaagtggatgggaaggatcacggccctgaaacatcctctcctcttacgtaggaaggccagaaggttctgaggccattggccaatccccttctgactaagaaggactacctgatgacaagtgcctaagtggttgctgacgtttggaaacagtagcctaatgggtgaggagcccaagagacactgcgtgttgggggtgttggcaggagaaagcgaaataaaccaaagctgaagaataggaaagcaaagcacagcagcagggaccgggggcttcacctggaccacgcttgggggctgtctctaactcctgtttggcagggcagtctgaaagtctgcagttagaagacatttctgaacagtagggtggagcaagggtctccacagggaggtgagcaggatgcttcgctgggtacacagagagaatattagaacttcaatcattttttctctgccttttaaattatattcctgtacaaattttataacatgcctaccatttaagttcagggtcacatgactttaatttgaaaacagatacacacatattggaaatgtttgcacatatgcacaggggtgtgcattccaaaacactggagaaatgtttttaaaaatacaagtgaccagctgggcgcggaggctcacgcctgtaatcccagctattagggaggcagagatgggagggtagcttgagcccaagaattcaagacctgcctgggcaatatagcgagaccctgttgtccacaaaaaggaaaaaaaaaaatacaacaacaacaaaaaatacaagtgactgagcactaaaaaacccaacaattcctaagctgtttacccaacacatgtttttcctgtggttgccatgagactggtaagttcgttgatccactcggatccttttggccacagtgctgggcactccgggcctcagagaactgaacttactgcccatgcttggcagtttagaagtgatgtctaggattaccttcagggggttggctttcctccctcctttaggatgtagtcagcacagagcatgggagtccatgggagaggtgcacacgagacccagtgcaaacggcgtctgtcactgtgcaaactgccggcttgactctgttcctgttccctcccctctgtctccccaagtcctttggggttatagactggctttccggacctaactctctgcatttccctgaggctccccattcgcccttgtctcccatctgcaggctccatgacagtggtgacagtcaaggccgtggctgggatgcttgtcttgtccattcaagggaacctgcagcttgactaccccatcttctacgtgatgttcgtgtgcatggtggcaaccgccgtctatcaggctgcgtgagttacaaatccttttcctgctgggccctgccattcgggctgcttctcttttgggggcctgatgacgtatgctgtgaagccacaaggaggccagaacatgccccagggcctggcatccagcatggagagaggagctgctaatttgctgagttgtcacctggagggacacctgccactcaaaagacgaagccaggccaggctcagtgacccacgcctgtaatcccagctctttgggaggctgaggtgggtgggtcacttgaggccaggggtttgagactagcctggccaacatggtgaaaccccgtctttactaaaaatacaaaaaaataaaataaaattagctgggcatggtggcacatgcctgtagtcccagctactcaggaagctgagacacagaattaaaaaagaaaaaagaaagaaatacgaagccagcagtggatggatttttccccactccctcagaatgtgataatttttgtttgtttgcttgtttgtttgttttttgagatagagtctcactctgttgcctaggctggagtgcagtagagccatctcggctcactgtaacctctgcctctggggttcaagcgattctcctgcctcagcctcccaagtagctgggactacaggtgtatgccaccacacccggctaatttttgtatttttagtagagacgagatttcactttgtgggccaggctggtctcaaactcctaacctcaagtgatccacccaccttggcctccaaagtactgggattacaggcatgagccacaacacctggccagaatgtgagaaatttgtggttggaggcagccttacttcccatcttctccggggcagatgatcgtctcaggggcctcggaagcatggccatccctaggaggcacctgcttgtctgctgggttggaaagaaaagttgtcatttcttgacttcagtatatcacctccaaatcttcctgagtggaaggcaaagtgccccctcctctttctaagcatgaagttaaataaaaggcagcagcctgagggcagggcctgtgtcttgtttgcgtttgagtcctggagcccaacagagggcctgggaggagaggctctaggaatcttgtaggtgacaaaacctgtgtaggtacacaggactcagcagcgcacaaggctgattcaacctgggaagctcaggctcagactgaaggtccaccagctacatggcctccaggcaccataggagcagctgctgctggcccggtgtgagcccagctcttttctcagtgctttatggaaccagctcatttggtccttacaacactcctttgatgtacaggatattatccccattttgcatacgaggaactgatgcggagagagtaagaggctagaaagtggcggagctgagatctgaacccaggtgtctggctccccagcccatgccctcactgctctgctcttctgtcgcctactcagcttctccaagacagattcttcacctgctaatgagaacaacagtccctacctaagagaatcacatgaagctcttatgagaatgtctctagggaaatgcccggtaaacatgagctgcttctatgattattggccttgctattgttattttggttattatttttggtcccactacaacaattccagtcatcacctggaagcccctgccagtcaaaggccctgtgctgagcactccaggtgtcacaaacatggctcagatgccaccgcccacctcctaaggagctactcattccctagccagtgcagcccactgagggtgctcagcacacagagatgatgagggtagtcactcactgccctcaggcattcacggccctggctgggggacagccagtgaagaaactagtacagccaagctgcatgcagtggctcacacctgtaatcccagctactcaggaggctgaggcaggagcatttgagccccgtagttagaggctgtggtgagctgtcattttgccactgcactccagcctaggccacaaagcgaagtaaaaaaataaaagcaattgagtggtgagcatggtgtaagcaactatgcagagaaagggcaaagaatatcttccaaaacaagggtattgtttatcatagatggagtgattaggaaggactctaattttctctttttcctgtatttatttcagtgatcacattattttcaaattaaaaagaaattttgtttaaaagaataattatgacactaggcagaacgtgattagtgctgtaagagtttctgggggcaggggtataagagatgcaggaatggctctttttagtggggtggggatacggggggtgaggagaagggcatttcaggtgacaggagccgtgcagccaaaggtgtgagaccatgatggcatggttcaattgggaaatggggatgggccttagctgtgtgtctaggggaagagtgggaatcaagtatgggccccagactagggatacacaatgtcctgtaacatgagggtggcatttttagaaacccaaggaacattcctaaatgtatcatcttcatatttcaaaccaaactctactgttgtcagctcttagcctttccaacgtctccacagcccactgactggagtgcttttgtgttgaaggtttttgagtcaagcctcacagatgtacgactcctctttgattgccagtgtgggctacattctgtccacaaccattgctatcacagcaggtaagggtgacccattgctagatttctgtcttctactttagcagcagggtattatcccagggcagagggaggctgattctgctgacttgttctccccgtagagtgatttatgggttcatggagaatgtgcaggatttccagacagagagacccgggtttgtatcccagcacagacgcacatcagctctgcaaacatcacttaacctctctgagcctcagctccacattcataaaatgggagtgataacacttagctcctagaattgtaatgggtatgatccaaatgtgccctatgccatactgtgtgtactttaacaagttttgctatcttctagctccacaacccccactggctaagtgaccacaaatctcttctgtataattttagagattatgaatatgcatagcactgcaacatcatcaatgctcaataagtgatcattagcattacagcccccttttcctctatttcacctctaatttttttttgcattttctttctgtagtggcctcagaggctgcaatcatataaagctgtttgttaatttgtttaaatggcataataggtgactaaaatcttcagagtaaaaaatccaataagaactaagtgctttcctttggtgaaagcctggctgtaaagccctatgctctgccaacacttaagacaagtggtgccgcagttcctgtctacacaggaggaacacacgaggcgcacagcttccagggcccatgctgtgagcagcaccaggggccatgaggcattgacccagagcagccagaagccataagctaagtcagggtcaagaagcttggtcaagaagcgtgaagtccagtcaaggttgaaaggaatcacaaacaccatggttgagtgagaacagaagtcaaggcagggaatcaggagctcaggaatacagctggaggcctgtgtgggtgagatgattctggacaaaggctggctcagggcaggcgcagtaggcccaccccactcccataccacaggagtagacccacagacttgggatctactggccacatgaggttagaaagctctaacagcataagcacaaagccttgtttatctatcttaagaaagatggaggggagatgactgcaggcacaaactggtaaatagggtctgtggtttggttagtaagtgttcattgtcgttttcctgctttgattatgcactgtggttatggaagatatgactggggaaagctggaggaagggtgcatgggaactctacaccatttttgtgagtctaatattatcccccaataaaagttaaaaaacaacatggagatcagaggggtctaaggtggaaaaaagttgacaacctgatcccctaaatggcttttattcctttcttcttgtaaggcacagtcataagttttgatcattttagtttcctaaatggaagagagcttagccaaatcctagacagactggcagatgggtgatttgaaaacagctcagcggtattttctatgatttgctgctgcaggtgcaatattttacctggacttcatcggggaggacgtgctgcacatctgcatgtttgcactggggtgagttctgtcctgcttgccagccccaaaacattgtgtgtagaattccaagcaggttgcccctctctctcccttattgctacagccgccccatcctttagagtcagaggagctgtggggttttggagctttgtccccagaggtgagcgttttattcctctaagggctttatcttccccttctcttttggactctaatctctttggcatttctcaaatatcacattttgacacatgaaaagtctctcaacctcacctcggatctaagaaatgcatattgaagctacatgagataccatcattttgcaaaaactaacaggattaatagtattccacattggcaagaagatgaggaggcccgcctactaccacactgttagcatacttgaatgtgggaggaaaatttaacaacagcaacaaaaaatccaaacaagcatactttttgatacagtattccattctaatcatttatcttggaaaaatgcttcaacagggatgcaaatacacatgtatgaggctatttattaatttttaaattagttgtataagcaaacaattgaaaacaatagaaatgctcagcagtagaatacaagtgttaaaaaattatgccatatccagataatagcatgccatgctgccattttgaaaacttgaggccagtctgtaggtgctgacacagatccatgtctagaacacattcatcaaaaaaaatcacaggctgggagaggtggctcacacctgtaatcccagcactttggaaggccgaggcaggtggattacctgaggtcgggagtttgagaccagcctgaccaacatggagaaaccccgtctgtactaaaaatacaaaaattagttgggcatgatggtgcatgcctgtaatcccagctactcgggaggctgaggcaggagaatcacttgaacccgggaggcggaggttgtggtgacccgagattgcgccattgcagtccagcctgggcaacaagagcaaaattccgtctcaaaaaaaaaaaaaaaatcacaaacttttaaaaatttggccttggccgggtgcagtggctcgtgcctataattccagcactttgggaggctgaggcaggtggatcacctgaggtcaggagtttgagtctagcctggccaacgtgctgaaaccccgtctgtactaaaaatacaaaaaaattagccaggcatggtggcaggcacctgtaatcccagctactcgggaggctgaggcaggagaatcacttgaacctgggaggtggaggttgcagtgagctgagatcatgccattgcatgcctggacaatgagagcataagtctgtctcaaaaaaaaaaaaaagtggccttaccctataatccagcaatttcacctctagattctttacccaaaagaaagagtacatctgtattagtccattctcatgttgctaataaagacatacctgagactgggtaatttataaaggaaagagatttaattgactcacagttcagcatggctggggaggcctcaggaaacttacagtcattgcagaaggggaagcaaacacgtccttcttcacatggcagcaggaaggagagaagtgccaagcaaagggggaaaagccccttataaagccatcagatctcgtgagaactcactcactatcatgagaacagcatgggggtaactgctcccatgattcagttacctcccagcaggtccctcccatgacacatggggattgtgggaactacaattcaagatgagatttgggtggggaaacagccaaaccatatcagcatctgttgacaaaatgactcgcacatgagtatttatatagtagctttattcatcataggtctaaattggaaacaacccaaatgtctaccaacaggagagtaggaaaaacatagtatattcagacaatgggttctacgcaacaattaaaataatgagctataagccaggtacagtggctcacgcctgtaatcccagcactttagcaggccaaggcgggaggatcacttgaggtcaggagttcgagaccagcctgaccacagtggcaaaaccctgtctctactaaaaatacaaaaattagccaggcgtggtggcttgcacctgtaatcccagctactcgggaggctgaggcagtataatggattgaacccgagcggcagaggttgcagtgagccaagatcacagcactgcactccagcctgggcgacagagcaagactcagtctcgaaaaaaaataatgaactactaatacatacaataaagaagatgaatcttgaccaagcatggtggctcatgcttgtaatcccagcactttgggaggctgaggcgggtggatcacctgagatcaggagttcgagaccagcctggtggtttgccaacatggcaaaaccccatctctactaaaaatacaaaattacaaaatacaaaaatactaaaaatactaaaatacaaaatactaaaaatacaaaatacaaaattttgtactaaaaatacaaaaattagcctggcatgctggcacgtgcctgtaatcccaggtactggggggctgaggcaggaggatcgcttgaacctgggaggtggaggttgcagtgagccgagatcctgccacttgactccagcctgggcaacagagcgagactccatctcaaaaaaaaatcaaaaaaataaaaaaggaagatgaatcttaacattttatcaaatgaaagaaaccagacataaaagagtacatattgtatgatttaacttacatgaattaaagaacagactaatttcatccatggtgagagaagtcaagatagtagttacctctggggaagggctggcatgaaatggaaaggggcccaggaaaactttctgagggggatggacgtattttctgtcttgaactggttgatgattccccaagtaaaattcattcagctagacatctagggtttgtgcattttgctgcttataaattataccttaatgtttagaaagtatgcttgtttatgtaagctataggaaaaagggaaaaaacaaaacaaaaaataacctggaaggctatacacctacctggccgagtgagaccaggagtacagggactctccaatttttattgatttttactatctatacttcagtaatgattgaaatgaatgacttcaatttaagaaaatgttttaaaaggcaagcttccgagaatcctgattgaatggaagtgaagagccatgagaagctcgcccaggagagtctaatttattctgattacagctcatggagagtgtagggcatgtgaggccactccagctattgttattcaacttgcatctgcccctgctgatcccctgagaggctggcagcctctcagggctccttgggcggtgagccctcctccgcagcctgcaagcctttttacctctttccatcacctgagcctgaaagtgtgcctgcccgaccttgctcctggccttatttctcttcctatcttatctccattccgcaggtgcctcattgcattcttgggcgtcttcttaatcacgcgtaacaggaagaagcccattccatttgagccctatatttccatggatgccatgccaggtaaggttaaagccccgtgggtctagctgaacatccatatagaatgactgctacttcctgtttaaaaagagacaaccaactgctgtgctgtgcctttatcgtgtgactgttctctcactgtcttttttcttttctttttaattttgtgcaaaagggtaggcaatggctgaggcacctcggttggttttgagcacatcttgccagttctgtgtctatttggggatct

SEQ ID NO: 1636 - protein, 272 aa, Homo sapiens
MDRRAKCSKDPRAYFKTKTWWLGLFLMLLGELGVFASYAFAPLSLIVPLSAVSVIGRYVLSFVGCGLAVVGTYLLVTFAPNSHEKMTGENVTRHLVSWPFLLYMLVEIILFCLLLYFYKEKNANNIVVILLLVALLGSMTVVTVKAVAGMLVLSIQGNLQLDYPIFYVMFVCMVATAVYQAAFLSQASQMYDSSLIASVGYILSTTIAITAGAIFYLDFIGEDVLHICMFALGCLIAFLGVFLITRNRKKPIPFEPYISMDAMPGKVKAPWV

SEQ ID NO: 1637 - DNA, 14425 bp, Homo sapiens
  source
  (1)..(14425)
  CDS (201)..(235)
  CDS (306)..(436)
  CDS (4906)..(5171)
  CDS (5209)..(5853)
  CDS (14055)..(14225)
gaaactctgagcccactaaacaactctctatttcctcctcctctggcttttggcaaactctgttctactttctgtctttatgagtttgaatattctagatgcctcgtataaattgaaccatacagtattggtcttcttgtgtctggcttatttctcacagcataacgttctcaagggtcatccatgatgtagccagaatcatggctgagaaggagccgtgtatttgtgtgcacatgtctgtctcaccctatggtgcctgaggctctcccagggctgcttgagaactgagtccttgtgtttttcaggtttggggtgatccacttggtgttcaccaacctgcttctgtgggccaacggcgtcctcaatgagtcaaagcaccaactcaatgagcacaaggaatggctcatcactctgggctttgggaacataacaacaggtgagtgctgagagaggtgagtggcccctctgccatgttggaatgtcttggaaacctgcagagtccacagtgttcagagatggagtgcaggttccaaagaacttcaggcccaccaaagtcagcatcagccagacagccccctgttgttgaaaatcttccaaaacctgaatctctcataagtgatgtgtactgagcataattaaggtttcttccatgactcagggacttgtaagacccacggtgatcattctgatggccatttctcatggtccagtttgccgcagaaataaatgtctttgttttcaactacagaagattgatggttgcctctgcttgtgtttttaattaaacctctattaccagttctttctagtaaaagtatggcttttaaaaattcataaaagtctaatggtaggttgtggttaataggctgtggttcatttaaagttttaatttaactgtagttggcttataattctagctcatgtctgttctaacttgttcctatttgagagcctgttgggttaatctttatattttcatctaaaatcctttagcatttacaatatgtcacttctatatgagaacattcaggctgaggggaatgtggggcagggaactgggtgtctcaggtttgttcccatcatgtacaagctgtgtgacctttagaagacttttaatctctctgagcctcccttttctcatttgtaaagtgagggtatccaaatcatgcacttgcaaagatcccttccagctttaacatgcagcaagtctgtgacagctgtgtgaacccaggctgtcctggagagccactttgaacctgttttgtcatcagtggggtggagacaatgaagtcaccacccccaaccagcaggcactcggtgtttgggcctcatgtcctctttggtatcaatattagtagcagcaatgacaacaataacaaaagtaaatttttattaagcatttgctgagtgcctgccactgttgttggaaatttacacatgtcatttaatttgtacccccacactctctggtaggctatatatgtgtgtatatgtatgtgtatatatatatatatatatatatatatatatatatatattgttgtttgtttgtttgttttgagacagagtctcactctgtcgcctaagctggagtacagtagcgtgatctcggctcactgcaacctctgcctcccatgttcaagtgattctcctgcctcagcttcctgagtagctgggactacaggtgcgtgccaccatacctggctaatttttgtatttttaatagagacggggtttcactatgttggccaggctggtctccaactcctggccttgtgatccgccagccttggcctcccaaactgttgggattacaggcgtgagccactgcgcctggcctcaggtagacaatattaacctcattatatggatgaaggcatcaagccacggagaagttagcccagggtaacacagtgaacatgtgatacagccatgatttgaatcctaacaatctggcttcaaggccctctgtgaaagatgaggttggattaattttctaaaaaaggactctgtcagctgtaacattctgttactctgaacttttcctcctgatttcttcccttgtcttctgcataacaccgtattgaattgtaagtgctagggaagccctgtgtgaattgaagattattactggggcagtgactcacacctgtaatctgagcactttgtaatcctaaggcaggagcattgctttagcctaggaatttgagaccagcctgggcaacaaagggagaccccagctctggaaaaaaaaaaaaaaaagccaggcatggtggcatgggctcgtggtcccagctatagctacatgggagactgatgcaggaggatcacttgagcccaagaagtcaaggctgcagtgagctgtgtttgtgccactgcactccagcctgggcaacagagggagaccctatataaaaaagaataaaaaaagaaaaagaaaatttcatagtgttctgtgaaagtaaaattaatgctacgatatagtttttctcagattttttttttttttagacggagtctcgcttgtcgcccaggctggagtgcagtggcatggtctcggatcattgcaagctctgcctcccgggggtcacactcttctcctgcctcagcctcctgagtagctgggactacaggcgcccaccatcacgcctggctaattttttgtatttttagtagagacagggtttcaccatgttagccaggatggtctcaatctcctgaccttgtgatctacctgcctcggccttccaaagtgctgggattacaggcatgagccaccacacccagctgcttttctcagattttgtaagtaatatatacatatcataaactaaaacaatgacaaagtgtgaagcaaaaaaatccacaacacttacccagaaatgcagtaagtgctgcgaatgtttggttatttttttgtagtgtgccatttatttatagttgattttatactatatatttgatctttttttattgcaaccttcaataagagacagattttacactgtaatccaaacacacacatacttatgtgtgtatgcttgatgaaataatacttaattttactgtatcagagatgcttccaaattttatcggagttgattccactccattctatcccattctagtccactgaaaattatttctgctacaaaaaagttggttgctacctgattttgcagccttgtactgggttgtgacttgcattaaagaaatatacagtttgttcttacttttttccattttccttgaaacgagattactttcttaatattaaaacacatcctggctgggtgcagtggctcatgcctttaatcccagaacttcgggaggctgaggcgggcagatcgcatgagctcaggagttcaagaccagcctagccaacatggcggaacgttgtctctacaaaaaatataaaaattagctgggagtggtggcatgggcctgtggtcccagctactcagcaggctgaagtaggaggatgcttgagcacagaaggctgatgttgcagtgagccaagattgtgccacagcactccagcctgggcaacagaggaggctctgtctcaaaacaaacaaaaaacaaaccccccccccatacccaaaaccataaagcacatcttaattataacgtgcagtggctgtctactatctcattgttgggatatactaaaatttacttaacaatttctaaattgttggactttgagctgttcctctctctctctctctctctctctctctctgtctctctctctctctctcacacacacacacacacaaacacacacaattttacctgactttttttaaattattttttgagactgagtctcactctgtcacctaggctggagtgcagcggtgcgatctcagctgactgcaacctctgcctcccaggctcaagcgattcttctgcctcagcctccccagtagctggtattacaggcttgccaccacacctggctaatttttgtagttttaatagagatgaggtttcaccatgttggccaggctggtctcgaactcccgacctcaagtgacccacatgccttggcctcccaaagtgctgggattacagggctgagtcaccactcctggccttacctgactctttgattacatttttatttgtccctttgagtagaagggtagaatggaaagaatggaattatgggtcagagactgcatcgccttcagggctttggtgacctgtttcgtcatttacttgcagcatctgccctcctgtgatgagagggccctccatatgacagccagcttctcttccagaaggtggtgcccgtttactttccccgcactgatatcagagagcacctgtctcctgcatgcttgctagcactggagtcttaagaggcatatcttttgctaattaaaaggggcattttctccagaaagtattttttaaaaataatcttaaaaaatcacacatgtaaatcatcttcacagaaaaaatttagaaaatacagggaagcaaaatctagaagaggttaaaaatcatctgtcatttttccacccagagataacaattgttgacattttagtttgtgtccttccaggttttttctgtctgtctgtgtgtgtgtgtatccatctatctatctatcatctacatatctattttttacaacaatagagtcatcttctctatcctctttggcaactcaccaaataaatgtgatttaggtaatgaatatgctttggggatactcagggctatcaaattagccatcatattaaacgtgataataagccatgacatgaaaaagcttgtaatccagtgggaagactcaagcctgaatccacagtggaaacagttttctgtgcttttctgcttccccttgcacctgctaatagcccctctgtgtgatcaacctgtctcccctagttttagatgaccacacaccgcagtgtaactgcacgcccccaactctctgcaccaccatctcccacgggatctactataactactacctctaccccttcaacatagagtatcagatcctggcctccacagtgctctacgtcctatggaagaacatcgggcgcaaagttgacagccatcagcaccagaagatgcagttcaagcctgatggggtcacggtgggcacagtcctgggcctgaccgcgctggctgccaccattgccgtggtggtgggtggtgcacctgattcatattgggtgctccaagaccaagagcgagtcagcactcatcacgttctacctgtatgtcatcaccctgatgatgcttatgggggctgcggggctggctggaatccggatttacaggacagatgagaagtcactggatgagtccaaaaatccgccccgcaaactggactcggacctcttggtgggcactgcctcaggctcctggcttatctcctggggctcaatcttggccatcctttgtgccgaggaccacccccactacacctggtacaacctgccctactccatcgtggtgatcatggagaagtacatccagaacctcttcatctttgaatccattcaccgagagcctaaaaaactctctgaggacatccaaacccttcggatggtcacagtctgcaatggcaacaccatgtcccttgcttcctcctgcctcaagagtggagttgtggccggagacgtggctccctggggcagggacatgccaccagcagccaatggaaatgtgtgcctgagagaaagttgtgacaaggaggagaagcaggaggagagcagctggggagggaacccaagcccagtccaccttcctcgtttcttacagggcaacgccaagagaaaagtcctgaggaatattgcagccttcttgttcctctgcaatactttggtaatctgcaccaagttattcttattcttttaattttgctgtaaactttcattttaggttcaaggggtacgcatgcagatttgttacatgggtaaattgcgtgtcgctgaggtttggtgcacaaatgatcccgtcacccaggtaatgagcatagtacccgataggtagtttttcaccctgcaccccacttctgacctctccccctagtagtccctagtagtgtctattgttcatatatttgtgttcatgactaccattagctcccacttataagagaggacatgaggtatttggttttctgttcctgtgttaattcacttaggataaggactccatttctatccaggttgctgcaaataatgtgatttcattcttttttaaggctgcataatattccatggtgtagagctaccacattttctattttttttttttttgagagagggtcacgccccattgcccaggctggagtgcagtggcatgatcacagctcactgcagcttcgacctcctgtgctcaagcaatcctcccatctcagcctcctgagtacctgggaccacaggcatgtgccactacacctggttaattttaaaaactttttttgtttttgagacagagtttcactcttgttgcctaggctacagtgcaatggtgctcactgcaacctctgcctcctgagttgaagtgattctcttgcctcagcctccagaatagctgggattacaggcacctgccaccacagttggctaatttttgaaaatatttttagtagagatgggggtttcaccatgttggccaagctggtttcggactcctgacctcaagtgatccacctaccttgacctcccaaaatgctaggattacaggtgtgagccaccatgcctggccaaaactttttttttttttttttgtagagataggttctcactgtgctgcccaggcttgtcttgaactcctgcgctcaaacaatcctcctgcctcagcttcctaaagtgctagtattacagatgtgaaccactgtacccggccataatacattttctttatccagtccattattgatggacatctaggtttctcttgcctttttaaaataaggaatggaggcagcttgtaataaaaatactgtaagtataaaattacaatataaggctggaaaatagacctatattctacaaatctacctactgaagacttgctgtgtgctaggggctgggctaggtactaaagattaaagtggaaagactcagtctctttcctctaaaaggtctcagtataatgggggagggagacaatgagcaaatctaatatagtgaacaggacaagtgctgagatgggcttgtgcaaggtgtactaggagcagggatccagaaggacttcagtgagtagtgagtgcttgaggtgaggcccagtgtcaatcaggagtgcttttagttgcaagtgacaggcaatttgattcacagtgtcttcagtcttatcaatgtttaattatctcctgagaattccagaggttggctgcttggggttggcctggcagctgaaccgtgtcatcaggcatccaggcactgttcatcttgtcacttgggtcgtgtggtgtttgttgcgacatggtcatgagatggctgcagctgcaccaggcatcacatctgggttcaagacagaaagcagtggggaagggctggtgccagacaatgtctctcatgtgggcacccctcactgcaagggaggctggggaagtggacggtttgcttcccagcctctctgatggaaggtagcaagggagaggaaggtgtacagtcactcacccatctgtctgcatcagcaaggaatgactggaagttcaccaggttatcaaggcggggaaaagcatttcaggcagagacacacaatatgtgaagacacagaggcaaaagacaccatggcatgttttgagagcaccaagtagtttggcataaattccatgtgtgttaagcagagtagcagaatgggaaataggagagagggcccaggtaggtggactctggcttgagcagggcttcctaggcctggctggagtctagtctttatgctgagggcaagggaagactctctcagatttgtgttttggaatgatcctcccagtagctgtgtgtagcaaggatggagacagatagggccagaagcagaaagactgggagagaaagccctgcaacagcccaggcaggaaggggaggagcttgaactagggcagtgatggagggatggagagaagaaaaaggaataagaagcattgtgtgctgttgggatttttttaaagacacataaaggaaggatggtgggggtcagtaagaaggagggggaagcagcctttgccaccgcatgagtctctgcagtgatggtgactggtggctggaggggagtgccccagtccacagaggtgcctgcccatcactctgggtgaagtcagctctgtgctactagcctctgttatcaagcctgctccctgttgccccagcagctcagaggcttttgagcttcctcccctgaatttcagatggtgcatatggggcctgcagcttttgatatcaccctaagaacacaaagttgggaaagtaagtcccttctaaagtcagaatggctgtgtgtctgccaagcaaacctgatccaccctagccttggatcacccaggttccttcagtttgctaggcagtgaggaggggctctgaaggtggaaggcccagaagagtttggctgcagggagaccctcttctccatctaacagacatttgccaggcacctgctgtatgccagggactatgtcaggggcacagcagtgagtcaaaaattgaaagagttaacaagagagatagatactgtaagctgcatttttttgaggtgcatattccaaaatgcaaattcttataaagtcagagctagttctagaatcttcctcaagtatatgctttttgtacatatcctgtgattaatattaatatacatatattttgagatggagtcctgctgtgttgcccaggctgtagtgcaatgatgcgatctcggctcactgcaacctccacctcctgggtttaagtgattctcctgcctcagcctcccgaggaggtgggactacaggcatgcaacaaccatgcccagctaatttttctacttttagtagagacagggtttcactaggttggtcagggtggtctcgaactcctgacctcaggtgatctgcctgcctaggcctcctaaaatgctgggattacaggcgcgagccactgcttctgacctaatatttctttttaaaactaagttctgaaaagttgtctttccctggttgcctttttggttgaccactgggtgaaatacttggcttgcatttttggacccacttgaagaaagatagcactgtctgaaataccagaatcaagtggcaattcatggtctgtcaggacccgaaagccagacccagggcccagtccaaggagaagggtgggctccgtctcttcctccctgtgcttggcccatgatgcccccaggcactggttgggttctggggggttgaaccagaggatggaaatcatcgcagggtggagtcttaggatacccgtgctggctcatggggtggcactttgaaaccttgtggttgaccccaggtggtgccaaaggcatctggcagagagcaagagctgtcttctccagcatcgggagccagtccagaggccccagctgcaggtgctgatgtgcatgtccaggtggagtgggctccactccagagacggacatggaaatgttagttgaatttccaggagccgtggcactggagacaacagagggtggttgtggtgacggggaagggcagggtgctgtgggagatgggtcagggaaggcctcttctaaggaagggtgtggatggggctgggatgagagactatcagggcagagctgcaggtgtggggaagggacggatgcaaggcaaggcagggctcactggacatgacctgggagcacagagcagagggcagaggggagaccacacagggcctgcgagccaagactcaatcttaaatgcaacagaaaaccatggaaaggtctacactgagagtgacgggatctgactcatgcttattttgttatatttttaattgtggtaaaaaactcatcacataaacttttccattgcactcactttcaaatgtatagtggagtaaagtacgttcacattgtgcaaacatcacaccatccatttccaggttattctcatctggcaaaactgaaactctgtccccattaaatatgaactccccattctccccagcccctgacaaccaccgttctttcagtctctaggaatttgactcctagactcctcatataagtgaatttgtggagtattagtccttttgtgattaggttatttcactcatcataacaccctccagggtctccaggttgcaactcgcaaagggtgacagatgccaaacatgacccctgccttcacacttgagttcctggggagatggtgatactatgttggagatggaggactctggaggaggggcaaccttgggagcagtgggtggaggtcagtgtggaaggaagaaccagagttaagtaatgaacgtgttctgtttcaggtgcctctgtggcatccaaatggacgaacccagtagacaggtattttggttttctattgccgtgcgatgaactaccactaatgtatgacaaaagcaacatgcatgactgtttttgtcccatggcatttattgtgactcatggctttgtgggttagaaattctggcagggcttggatgggcagttctgttcctcacagcatcaagtgaagttggtgaagccttggccagaagcttcgtggtctgatgccttgggtgggggtggctgggaggctgggctcagccaggactcttgactggggcatccacaggtgggtctccagcatgacgtctcagggtggttggactccatgcgtgatggctgagggccccagagctgaccctccaaaagactgaactggaagctgcctgtctcctaaggcctgggcttggaaactgcatggtgtcatttctgccatattttattagtcatgtagtcacagagtccatctagattcaaagaaagaggtcataggccacttctcaataggataagtaacaagaatttccagccaactaaacagcacatataaagatgtggatttcagaaaagaggtcccattttcctgccttcctttcttctcccttttcctccctgtctcccttgcccttcctctcacccttcttttaaaaggtgtcccttaagtacctacagaggtacagggactgctatgaatggtgagggtacagcaatgaccaagatctctggtcttcctcttatggggcttacaaaccaggcaacagcaggtgaaaccatcaactgagcaagaaagacaccttatagtgtacccgtgttaagcagagaagtggaaaaggagggtgtgggaaatagctcttgggctgccattgtagatcagatggaccagcttagcgggaaggcctcgctgaagggtgacatgagacaggaaggggttggccacgcatgttcagggcagagggaacaacggctggtataaacccccagtgggagtgagcgggtctggtttgagaaacaggaagaagggttgcctgcaatgtgggtggggtgagtggggagaagcgtgggtggttagaaatcagctaacagagcactttatcactcagtgcgggagtgtagaatttattttaaatattttgggaagactttaggggtttaatcaaggtagggacaggatctgatttccatataatgtaaatctggtggccgagtggaaccctagttcgagctgggagaccaggcacggggccaccgccatggtccaggtgagagaggccggctggacaggtggagagagagagccacaggtgggctgaagatactgctttggaggtgcacagtggagatgcgctgagggactggatgggagagggcatggttatgagagtaggagggagataaggttgacacctggagcctcgatggaccacctgggaggacgatgtagctgagcagatggagaaatggggaaggtgggttgagtttgagatgtgttttagacacccaagttgccaccggaaactatgagtctggggttcttggaagtggtccaggctggagattgagactgggaagtcataggcctatagctggtatttacaaccagggactgggagagagccccagggttcatgtgtagagagaatagaaagggacccaggaatgagccctggatgctggctaacattaagaggcagagcaaaggatgaaacagcaaaggagactgggagggacccgccgaacaagtaggagagctcctaagagtcacagcagccagtaagcaaagcagaagagaggggtcttggttccagggcccccgtggtgtataccaaatgcacagatgctcaagtcctatatataaaatggggtaatacttgcatgtaacctacccatcctcccgtacactttaagacatctctagattacttagaatacctaatacaatttaaatgctatgtaaatagttgttacattgtattgttcagagaataatgacaagaagaaagtttgtacctattcagtacagacacaacaaaccattttatttttttaattaatttatttttattttttgagaccgagcttcactgttgcccaggctggagtgcagtggcatgatcttggcttactgcaagcttcgcctcctgggttcaggggattctcctgcctcagccccctgagtagctgggattacaggcacatgccgctacaccttgctaattttttgcatttttagtagagatggggtttcaccatgttggccaggctggccttgaactcctgacctcaggtgatccacctgcctcggcctcccaaagttctgggattataggtgtgaaccactgtgcccagcctactttttgaatatttttgatctgtggttggttcaatccacagacacaggtccctggatacagaggtcggctgtatataccagggagtgttctgtatggagatacaaatgaaggctatgtgtctcagttacgtattgctatggaagagaccaccccaatactcagcaacttaaaacaatgtacatttatgatttcatagtttctctgacttatgaatccaactacagttttagctgagtatctctgcacagggccattcccaggctgaaactgttggctggggctgcattcatttcaaggcttgactttccgagaggtggcagaggatttgtttccaaatctactcatgtgactgttggcaggattcagctgtggcttgttgggctgagggtctgagttccttgctggctgttgacaggagtactccctgggccccttgccgcgtagggtgcttcgcagcatggcagctctgccacctgtctttcaggagaagatgagcaagagggataacaggtccttttgcaacctaatttcagaagtgacttcctgtgtcttttgccatattttgtgagttggaagtgagtcgttaggtgcatcccacactaaaggggtggggactccacaagagggtgactgcaggagctggggatcattgagggtcatcctagaggctgcctgccacagccagggagtggaggaagctgaagaagggtgcagcctgaagcaggagtgaggagcctgacaactcaaggggtggcagaaagggagagaactgggacagagaagagcctgagaagcagggaacagtgtgtaggttccgtgagcaacacaaacaaaagtcactgctttcagttttgcaaacttaattctcatctaagccctctcagacacgtgttagaattcccatctttcaaatgaggaaactgaggctgggcgagggctgtagagatggagagagttggatgggttcaaagagcgctcattagggatggattgcagggaagggtgggtgaggaagtgagcaggatcatggcagacatggatttggtggtttctgtggagatgggaaatgccacgaggtctccttattgttctgtcaggggtgactcagtccccgtgcatcagggtcagctcccatgaggcctgggacttgagtggggcctccatggtggcttggaagctgctccccaccacaggccattttctcttctcttgcagctttggatacctcccgcttttggctgtcgacctgagtatgacaacggattggaggagattgtctttggctttgaaccctggataattgtggtcaacctggccatgcctttttctattttctatggaatgcacgcagctgcctccctctttgaggtctattgtaagatatagtctggttccacaagagaccgaggagtgagctaacaagagttcattggagccaactgggaatggccaggttggacaaatattgcctgacaaacatgagaagggccaccttttgtctgcaaagattgtgcttcctgtgggctggaactgcccatcacctctgatgaatgtaaacaagttagatcaaaatccataaggtggct

SEQ ID NO: 1638 - protein, 415 aa, Homo sapiens
MAEKEPCICVHMFGVIHLVFTNLLLWANGVLNESKHQLNEHKEWLITLGFGNITTVLDDHTPQCNCTPPTLCTTISHGIYYNYYLYPFNIEYQILASTVLYVLWKNIGRKVDSHQHQKMQFKPDGVTVGTVLGLTALAATIAVVTKSESALITFYLYVITLMMLMGAAGLAGIRIYRTDEKSLDESKNPPRKLDSDLLVGTASGSWLISWGSILAILCAEDHPHYTWYNLPYSIVVIMEKYIQNLFIFESIHREPKKLSEDIQTLRMVTVCNGNTMSLASSCLKSGVVAGDVAPWGRDMPPAANGNVCLRESCDKEEKQEESSWGGNPSPVHLPRFLQGNAKRKVLRNIAAFLFLCNTLLWIPPAFGCRPEYDNGLEEIVFGFEPWIIVVNLAMPFSIFYGMHAAASLFEVYCKI

SEQ ID NO: 1639 - DNA, 1354 bp, Homo sapiens
  source
  (1)..(1354)
  CDS (201)..(1154)
cctacctatacttcacctacacttcagtacactctacctatatcttacctactctttagtatactctatctataccttacctacacttcactatattctacctacactctacctacacttcagtacactctacccataccttcagtacattgtatccctatttcacctacactttactatattctacctttactccagctatgcttcagtacattcgacctatatcccacctacacttcagcatattctatctatactctccctgtgcttcaggatactctacctgcaccccacctatacttcagtacattctatccttactccacctacactttattatattctacctatacttcacctacacttcagtacactctacctatactacccctgtccttcagtacattctatgtagacctcacctacacattacttttctctacctgtactccatctacacttcagtgtactctactcatactccacccacttcaatatactctaaccatactctgcctacacttcagcatactctatccatactccacctacacttaggtatactctacccatactccacctgcacttcagtacattctatgccacctaaactttactgttctctatctatactccatctacacttcagtatactttacctatactccacctacacttcagtatactctatctatactctatctacacttcagtatactctatctattctccatctacacttcagtatactctgtctatcctccacctacactttagtataccttctctatgcttcatctgcactttggtatactctacatagactccacctacactttactgttctctacctatactcaatctacactttagtacactctactcatactccacttacacttcattatactctacctatactctacccacacttcagtatactttatctatactccaccttcagtgtactctatcatctacactccacctacactttgatatactctacccatactccacctgtacttcagtacattctacttcacctaaactttactcttctctacctatactccatctacacttcagtatactctatctatactctacatacaacttcagtatgctctgtctatactccacctacactttagtataccctatctatgctccacttgcacttcggcatactctatatagactccacctatgctttactgctctctacctatactccacctacactttagcacactctacccatactccacttacacttcagtatactgtatctatactccacctacacttcagtatactctatctatactccacctacacattggtatactgt

SEQ ID NO: 1640 - protein, 317 aa, Homo sapiens [sequence omitted]

SEQ ID NO: 1641 - DNA, 2110 bp, Homo sapiens
  source
  (1)..(2110)
  CDS (201)..(270)
  CDS (404)..(1201)
  CDS (1330)..(1910)
agtatgcttaataaaagatctttctgaaatttaaacactttatgtaaaagggtacaggtagaaaagtacaattgctatttgaaaaaagctctgtttgttaatattgccttccaagatagtaagggtgtttttctctctcttcccttaaaatagacctatgacacccagagttgtagggtttgcaaatttggactataaacatgaagaccgtacttatcttatatacaaaaacttgccgcattgaacgaggcaggaatttctaccccagtggtagtggtctcctttatgtacataatgcagaagtgaaaattatacagtagtcaccgataggaaggaattgtatactctagtgccgtccggggattttgtgccgtgggttaagagttcttggatcgtcatccagttatcgaagattttcttattcctcttcttcatcatctttttgtggctcagttcgagaatgttcatctccttcctgtcatcggctgcttgctgctccttgagacaatccaacctgctctgcatcatgaactcgcgccgccgccgctgctccttggccttcaccaggtgctgcttcctctcctccttgctccagtagcgccccatcttcatctcgctcaccgcgtcgtcgtcggtggtcatgccgctgcgctcttcccggatcttcagggcgcgctcccgcagcaggcggtcccgcacgggcctcttggtgatgtagcgcgtcccgtcgctgcggatcttcaccttccactccatgcgcggctccgacggggtgggagagctcaggtccttgcacatgctcaccaggctcatctggctttgcgcgtactccacggccgacttctgctggatcagctgcatgtagctctggtagtgctgggcgtgcgccgggatgtgcgcgtgcttgtatggggagtggtgataggagggcaggtaggcgctgcccagcttctggctgggcgtggggctccggctcccgtcgctggctctccgctctttgctttccaggggctggttggggtccagctccttcagggacgggctataggtaggggtgcccacttcgggatcttccgtgatggagagcagattcttggaggctggcccgtaggcttccgtggtccccacagccccttcgctgctcgggcagctgatgccctccgccgctctcctcaaggagttgtcgggggagatctccagggtgagcggggtgctgcggcagctctcgcctgtgttgtaggcgctcgagcgttgtccttgtcggatttctccgggagctcggtgatatctgagagctcgtgtctgcgcacgtcgatgctggtgttgtagttgcggaagccgctgttgtgcagcatccaggactcgcggtactgctccttgagctgctgcatcttgtgggcgcgcacgatgctcaggcactccagctcgatgctgcgcagctcttcgttcagcagctccagctccttgtccacgctctcagggtcactcttgccggcgtccagggggccgctagggtagtacaggccgtaaggggtggcgctcttcacctggcacttgagctccaggagctcgcggaagcgctcgcactcgtccaccgggatccccaggtagtcggcgtccgtgcagtcggccgaaatgaaagactcgttgctgaagggcaggtcgccgctgcccaaggtgtcctggctgcaggtgagcttcctctgccccgccagcgggttggaggatgcggtggcgtcgtcgccattgttctcttgctccgagctctcgtcattacgggtgctctcgtcggtccgccccacaccgctgtccttctcgtgctggttggacaagatggtggctgtatctgtggtcccaccgtcttcgtcgtgcttcttctgcataaacacaagaacaaagggtcacagtgagggaggcctgcgcagcaggtactcaggtttgacctttccttgcggtttctggatagggcaggctgtacatttctaaggccaagggacagcatctgacagtaggaccacgtcaatagcgtgggccttagctacacctacccgtatctacctgggcaagtcacttattcttgttcttgtcctcagttttgtaaaatgaggat

SEQ ID NO: 1642 - protein, 482 aa, Homo sapiens
MKTVLILYTKTCRIERGRNFYPSVIEDFLIPLLHHLFVAQFENVHLLPVIGCLLLLETIQPALHHELAPPPLLLGLHQVLLPLLLAPVAPHLHLAHRVVVGGHAAALFPDLQGALPQQAVPHGPLGDVARPVAADLHLPLHARLRRGGRAQVLAHAHQAHLALRVLHGRLLLDQLHVALVVLGVRRDVRVLVWGVVIGGQVGAAQLLAGRGAPAPVAGSPLFAFQGLVGVQLLQGRAIGRGAHFGIFRDGEQILGGWPVGFRGPHSPFAARAADALRRSPQGVVGGDLQVAEAAVVQHPGLAVLLLELLHLVGAHDAQALQLDAAQLFVQQLQLLVHALRVTLAGVQGAARVVQAVRGGALHLALELQELAEALALVHRDPQVVGVRAVGRNERLVAEGQVAAAQGVLAAGELPLPRQRVGGCGGVVAIVLLLRALVITGALVGPPHTAVLLVLVGQDGGCICGPTVFVVLLLHKHKNKGSQ

SEQ ID NO: 1643 - DNA, 16105 bp, Homo sapiens
  source
  (1)..(16105)
  CDS (201)..(307)
  CDS (2130)..(2260)
  CDS (6605)..(7542)
  CDS (15735)..(15905)
aggaaacatacactgagattagaaatggctcatgagagccttccctttattgtagtctgggattgtcaaatccagtgatgagaaaggcagcctggcatgagaaaatgacgtctgcccttggtttgtggaccatttccacatcaagccaacaggaggctgccagcttgcagggagcttgcgtggcagaacagtttagagtcatgcgtggcaacagtgctacctccttgagttcagtgggcctgggactggacagtgccatttggaccaggaaaaatgagagaagaaaggggagctgtgtgcattatgagtaaaagaaaagccagccagtatgaggcaaacggcattgtctgcgtttgtcaaaggctctatataatgcttcccaggcacctcggggaaggctggccatgatctacagcaactgggcaagcacaaggggcaaacagatgggcaaacacctgactcagacaccctgggattctgtttccttctccaattgtgcttggacattatgccaaaggaagccaggattcaaatgaggcaaggttttgcctgcagtttcccgagagagacccagagagatcagctgaggttaaaaccgagaggagaggcagggtcaaggttgaggatgcggttgcaccattttccccgtgggcagatcatggacgagggttctctggttgtctgcttttaataaattttcatccctctagctctgcttccaagacccagcttctttgatgtcctataggtattgagttgagtactggcaagttcaagactacggctgaatgccaagattctgtggttttggaaggttccatggatctgccccacccagccaggcaggggacccacccaaagcctgagctgccaggtgaaaccagaatcatgcttcctgtgggcctctgctctccaatttaggagtgatcaattccatagaaagttttaaagaatacctctctcaaatcaccagtgtttgctgcacgtgctacctgtgaggcacattgctaagtaccctgaaagctaccaatgtgaatacatcttaagcctgcaggtgtaggaagactttggagtatttgaagaaatcagtgaccctatggggaccgcattccccatggatctctcgcctgctacccagagtccagtgtcgaccttccacttagttctcttttctatcttctgccttaggaggcagcatggcaaagagccaagggcagggctctggagtcagactggaagacctctgctccttaccgactctgcaaacccccatgtggctgcttactccatatatgaccatgggctcattcttgagtctatctggatctcccgcagctcaacaatgtcattaccgagcaggctttttctagatttccactctgccatcctcagtgggctgcagctgtagcccaagctggctgtctcatggtcataagatggccaccacaactccagccttcatgtccacattcaaggctagataaaaaggagaaagggaccatagcagacttttcttattcttgtttcttttgtcaggaaagcaaaagcatttctgtagtgcccattagactaaagctcatatctcactggccagaatggccatgcctagctgccaagtagtctctggcttgtttcagtgtccttagaagtaggtggcatggcagagggtgtggatgatggttggggttggccaatcagcagtaagggtggacctgctctccagatttccagtggtactctttcatctttccctcattgttctctcctctcctcttcctttctgggaaaaagatttggggtgtggtggggtgggttgtctgcttttagtaaattttcatccctctagctctgcttccaagacccagcttctttgatgtcctataggcattgagttgagtactggcaagttcaagactacggctgaatgccaagattctgtggttttggaaggttctatggatctgccccacccagccaggcagggggcccacccagagcctgaactgccaggtgaaaccagaatcatggctgagaaggagccatgtatttgtgtgcacacgtctgtctcaccccatggtgcctgaggctctcccagggctgcttgagaactgagtccttgtgtttttcaggtttggagtgatccactcggtgttcaccaacctgcttctgtgggccaatggcgtcctcaatgagtcaaagcaccaactcaatgagcacaaggaacggctcatcactctgggttttgggaacataacaacaggtgagtggtgagagaggtgagtggcccttctgccatgttggaatgtcttggaaacctgcagagtccacagagttcagagatggagtgcaggttccaaagaactgcagggccacccaactcagcatcagccagacagcccgctgttgttgaaaatcttccaaaacctgaatctctcataagtgatgtgtactgagcataattaaaggtttcttccatgactcagggacttgtaagacccacggtgattattctgatggccatttctcatggtccagtttgcggcaaaaataaatgtctttgttttcaactacagaagattgatggttgcctctgcttgtgtttttaattaaacctctattaccagttctttctagtaaaagtatggcttttaaaaattcataggagtctaatggtaggttgtggttaatgggctgtagttcatttaaagttttaatttaactgtattggcttataattctagctcatgtctgttccaccttgttcctatttgaaagcctgttgggttaatctttatattttcatctaaaatcctttagcatttacaatatgtcacttctatatgagaacattcaggctgaggggaatgtggggcagggaactgggtgtctcaggtttgttcccatcatgtacaagctgtgtgacctttagaagacatttaatctctctgagcctctcttttctcatttgtaaagtgagggtatccaaatcatgcacttgcaaagatcccttccggctttaacatgcagcaagtctgtggcagttttgtaaacccaggctgtcctggagagccactttgaacctgtttcatcatcagtggggtggagacaacgaagtcaccacccccaaccagcagccactcttggtgtttgggcctcatgtcctccttggtatcaatctctctggtaggctatatatgtgtgtgtgtatgtgtgtgtgtgtgtgtgtgtgtgtgtgtatatatatatatttatttatttattctattttatttattttttttgagacagagtctcactctgttgcctaagctggagtacagtggcgtgacctcggctcactgcaacctctgcctcccaggttcaagtgattctcctgcctcagcttcttgagtagctgggactacaggtgcgtgccaccacacctggctaatttttatatttttagtagagacggggtttcactatgttggccaagctggtctcgaactcttggccttgtgatccacctgccttggcctcccaaagtgttgggattacaggcatgagccactgcgcctggcctcaggtagacaatattaacctcattatatggatgaagccatcaagccacggagaagttagcccagggtaacacagtgaacacgtgatcgagccatgatttgaatcctaacaatctggcttcaaggccctctgtgaaagatgaggttggattaattttctaaaaaaggactctgtcagctctaacattctgttactctgaacttttcctcctgctttcttccctggtcttctgcataacaccgtattgaattgtaagtgctagggaagccctgcttgaattgaagattattatcgggggcagtgactcatgcctgtaatctgagcactttgtaatcccgaggctggagcattgcttcagcctaggaatttgagaccagcctgggcaacaaagggagaccccagctctgaaaaaaaaaaaaaaaaggcaggcatgctggcatgggcttgtggtcccagctatagctacatgggagactgacgcaggtggatcacttgagcccaagaagtcaaggctgcagtgagctgtgtttgtgccactgcactccagcctgggcaacagagggagaccctatataaaaaagaaaaaaaaaaaagaaaaagaaaatttcatagtgttctgtgacagtaaaattaatgctacgatatagtttttctcagatttttttttttttttagacggagtctcgctcgtcgcccaggctggagtgcagtggcatggtctcggatcactgcaagctctgcctcccgggagtcacactattctcctgcatcagcctcccgagtagctgggactacaggcacctgccaccacgcccggctaattttttgtatttttagtagagccaggatggtctcagtctcctgaccttgtgatccgcccgcctcggccttccaaagtgctgggattacaggcgtgagccaccacgcccagctgcttttctcagattttataagtaatatatacatatcataaactaaaacaatgacaaagtgtgaagcaaaaaaatccacaacacttacccagaaatgcagtaaatgctgtgaacgtttggttatttttttgtagtgtgccatttacttatagttgattttatactatatatttgatctttttttattgcaaccttcgacaagagacagattttacattgtaatccaaacacgcatgtacctatgtgtgtatgcttgatgaaataatacttagttttactatatcagagacgcttccaaattttattgtagttgactccactccattctgtcctattctagtccactgaaaattatttctgctacaaaaaagttggtcgctacctgattttacagcctggtactgggtcgtgacttgcattaaaaaatagatacacagtttgttcttacttttttccattttccttgaaacgagattactttcttaatattaaaacacatcctggccgggtgcggtggctcatgcttttaatcccagaactttgggaggcggaggcaggcggatctcatgagctcaggagttcaagaccagcctagccaacgtggcggaaccctgtctctacaaaaaatgtaaaaattagccgggcgtggtggcacgggcctgtggtcccagctactcagcaggctgaagtaggaggatgcttgagcacagaagtctgaggttgcagtgagccaagattttgccacagcactccaacctgggcaacagaaggaggctctgtctcaaaacaaacaaaacacaaaacaaaaaaacccccaaaataccccaaaccataaagcacatcttaattataatgtgcagtggctgtttagtatctcattgttgtgatacactaaaatttacttaacaatttctaaattgttggacattgagctgttcctctctctctctctctctctctctctctctctctctctctctcacacacacacacaattttacctgagttttttttaaattatattttgagactgagtctcgctctgtcgcctaggctggagtgcagtggcacgatctcagctcactgcaacctctgcctcctaggttcaagtgattctcctgcctcagcctcccaagcagctggtattacaggcttgccaccacacctggctaatttttgtagttttaatagagacgaggtttcgccatgttggccaggctggtctcgaactcctgacctcaagtgatccacctgctttggcctcccaaagtgctgggattacagggctgagtcaccgctcctggccttacctgactctttgattacatttttttatttgtccctttgagtagaagggtagaatggaaagaacagaattatgggtcagagactgcatcgcctttagggctttggtgacctgtttcatcatttacttacagcatctgccctcctgtgatgagaaggccctccataccgcagccagcttctcttccagaaggtggtacccgtttactttccccgcaccgatatcggacggcgcctgtctcctgcatgcctgcttgcactggagtcttaagaggcacatcttttgctaattaaaaggggcattttctccagaaagtattttttcaaaataatgttgaaaaatcacacatgtaaatcatcttcacagagaaaacttagaaaatacagggaagcaaaatctagaagagatcaaaaatcatctgtcattttttcacccagagataaccattgttgacattttagtttgtgtccttccagattttttccgtctgtctgtgtgtgtgtgtatccatctatctatctatcatctacatatctattttttacaacaatagagtcatcttctctatcctctttggcaactcaccaaatgaatgtgatttaggtaatgaatatgctttggggatactcagggctatcaacttagccatgatattaaacgtgataataagctatgacatgataaagctcataatccagtgggaagacccaagcctgaatccacggtggaaacagttttctgtgcttttctgttcccccttgcacctgctaatcgccctcctgtgtgatctacctgtctcccctagttttagatgaccacacaccgcagtgtaactgcacgcccccaactctgtgcactgccatctcccacgggatctactacctctaccccttcaacatagagtatcagatcctggcctccacaatgctctacgtcctgtggaagaacatcgggcgcaaagttgacagccatcagcaccagaagatgcagttcaagtctgatggggtcatggtgggcgcagtcctgggcctgaccgtgctggccgccaccattgctgtggtggtggtatacctgattcatattgggcgctccaagaccaagagcgagtcggcactcatcatgttctacctgtatgccatcaccctgctgatgcttatgggggctgcggggctggctggaatccggatttacaggatagacgagaagtcactggatgagtccaaaaatccggcccgcaaactggactcggacctcttggtgggcactgcctcgggctcctggcttatctcctggggctcaatcttggccatcctctgtgctgagggccacccccgctacacctggtacaacctgccctactccatcctggcgatcgtggagaagtacatccagaacctcttcatctttgaatccattcaccgagagcctgaaaaactctctgaggacatccaaacccttcgggtggtcacagtctgcaatggcaacaccatgccccttgcttcttcctgccccaagagtggaggtgtggccagagatgtggctccccagggcaaggacatgccaccagcagccaatggaaatgtgtgcatgagagaaagccatgacaaggaggaggagaagcaggaggagagcagctggggagggagcccaagcccagtccgccttccccgtttcttacagggcaacgccaagagaaaagtcctgaggaatattgcagccttcttgttcctctgcaatatttcggtaatctgcaccaagttattcttattcttttaattttactttaaactttcattttcggttcaaggggtacacatgcagatttgttaaatgggtaaattgcgtgttgctgaggtttggtgcacaaatgatcccatcacccaggtaatgagcatagtgcccgataggtagtttttcaccctgcaccccgcttccggcctctccccctagtagtccctggtagtgtctgttcatatatttgtgttcatgagtacccaatgttaagctcccacttataagagaggacatgtggtatttggttttctgttcgtgtgttaattcacttaggataaggcctccagttctatccaggttgctgcaaatagtgtgatttcattcttttttaaggctgcataatattccacggtgtagagctacacattttctatttatttattttttgagacagggtcgcgccctgttgcccaggctggagtgcagtggcatgatcacagctcactgcagcttcgacctcctgggctcaagcaatcctcccatctcagcctcctgagtacctgggaccacaggcatgtgccaccacacctggctaatttaaaaaactctctttttttgagacagagtttcactcttgttgcctaggctacagtgcaatggtgcgatcttggctcactgcaacctctgcctcccgagttgaagtgattctcctgcctcagcctccagagtagctgggattacaggcacctgccaccacacttggctaatttttgaaaatatttttagtagagatgggggtttcaccatgttggccaggctggtttcgaactcctgacctcaagtgatccacctaccttggcctcccaaaatgctaggattacaggtgtgagctcccacgcctggccaaaactttttttttgtagagataggttctcactgtgctgcccaggcttgtcttgaactcctgggctcaaacaatcctcctgcctcagcctcccaaagtgctgggattacagatgtgaaccactgtaccgtccataatacattttctttatccagtccattattgatggacatctaggtttctcttgcctttttaaaataaggaatggaggcagcttgtaataaaaatactgtaagtacaaaattacaatataaggctggaaaatagacctgtattctacaaatctacctactgaagacttgctgtgtgctaggggctgggcagggtactaaagattaaagtggaaagactcagtctctttcctctaaaaggtctcagtataatgggggagggagacaatgagaaaatctaatacagtgagcaggacaagtgctgagatgggtttgtgcaaggtgtactaggagcagggatccagaaggacttcagtgagtagtgggtgcttgacgtgaggcccactgtcaatcaggagtgcttttggttgcaagtgataggcaatttgattcgcagtgtcttcagtcttaacaatgtttaattatctcatgagaatcccagaggttggcttcttggggttggcctggcagctgaaccgtgtcaccaggcatccaggcactgttcatcttgtcacttgggtggtgtggtgcttgttgccgcatggtcatgagatggctgcagctgcaccaggcatcacatctgggttcaagacagaaagcagtggggaagggctggtgccaggcagtgtctctcacatgggcacccctcactgcaagggaggctggggaagtggatggtttgctttccagcctctctgatggaaggtggcaagggagaggaaggtgtacagtcactcacctatctgtccgcatcagcaaggaatgactggaagttcaccaggttatcaaggcagggagaagcatttcaggcagaggtacacaatatgtgaagacacagaggcaaaagacaccatggcatgttttgggagcaccaagtagtttggcataaattccacatgtgttaagcagagtagcagaatgggaaataggagagagggcccagctaggtggactctggcttgagcagggcttcctaggcctggctagagtctagtctttatgttgagggcaagggaggactctctcagatttgtgttttggaatgatcctcccagtagctgtatgtagcaaggatggagacagatagggccagaagcagaaagactgggagagaaagccctgcaacagagcaggcaggaaggggaggagcttgaaccagggcagtgatggagggatggagagaagaaaaaggaataagaagcattgtgtgcagttgggatttttttaaagacacataaaggaaggatggtgggggttggtgaggagggggaagcagcctttgccaccgcatgagtctctgcagtgatggtgactggtggctggaggggagtgccccagtccacagaggtgcctgcccatcactctgggtgaagtcagctctttgctaccagcctccgttatcaagcctgctctctgttgccctagcagctcagaggcttttgggcttcctcccctgaatttcagatggtgcatacagggcctgcagcttttgatatcaccctaagaacgcaaagttgggaaggtcccttctgaaatcagaatggctgtgtgtctgccaagcaaacctggtccactctaaccttggatcacccggcttccttcagtttgctaggcagtgaggaggggcgctgaaggcggaaggcccagaagagtttggctgcaggcagaccctcttctccatctaacagacatttgccaggaaactgctgtatgccaggggctatgtcaggggcacagcagtgaaccaagaattgaaagagttaacaagagagatagatactattcggctgcatttttttgaggtgcatgttccaaaacacaaattcttatagtcagagctagttctagaatcttcctcaagcatatgctttttgtacatatcctgtgattaatattaatatacatatattttgagatggagtcttgctctgttgcccaggctgtagtgcaatggcatgatcttggctcattgcaacctccgcctcccaggttcaagtgattctcctgcctcagcatcccgaggaggtgggactacaggcatgcaaccaccatgcccagctaatttttctatttttagtagagacagggtttcactaggttggtcagggtggtctcgaactcctaacctcaggtgagctgcctgcctaggcctcccaaagtgctgggattacgggtgtgagccaccgctcctggcctaatatattttttaaaactaagttctgaaaagttgtttttccctggttgcctttttggttgaccactgggtgaaatacttggcttgaatttttggacccacttgaagaaagatagcactgtccgaaataccagaatcaagtggcaactgatggtctgtcaggacccgaaagccagacccagggcccagtccaaggagaagggtgggcttcatctcttcctccctgtgcttggtctatgatgcccccaggcactggttgggttctgggggattgaagcagaggatggaaatcattgcagggtggagtcttaggatacccgtgctggctcatggggtggcactttgaaaccttgtggttgaccccaggtggtgccaaaggcatctggcagagagcaagagctgtcttctccagcatcgggagccagtccagaggccccagctgcaggtgctgatgtgcatgtccaggtggggtgggctccacttcagagacggacatggaaatgttagttgaatttccaggagctgtggcactggagacaacagacggtgggtgtggtgatggggaagggcagggtgctgtgggagatgggtcagggaagtcctcttctaaggaatggtgtagatggggctgggatgagagactattagggcagagctgcaggtgtggggaagggatggatgcaaggcaaggcagggctcactggatatgacctgggagcacagagcagagggcagaggggagaccacacagggcctgcgagccaagactctatcctaaacgcaagagaaaaccatggaagggtctacactgagagtgacgggatctgacacatgcttattttattatatttttaattgtggcaaaaaacacatcacataaactttcccattgcacccactttcaagtgtgtggtgaagtaaagtacgttcacattgtgcaaacatcacaccatccatttccaggttattctcgtctggcaaaactgaaaccctgccctcattaaatatgaactccccattctccccagcccctgacaaccaccgttctttcagtctctaggaatttgactcctagactcctcatataagtgaatttgtggagtattagtccttttgtgactgggttatttcactcatcataacaccctccagggtctccaggttgcaactcgcgaagggtgacaggtgccaagtgtgacccctgccttcacacttgagttcctggggagatggtgatactatgttggagatggaggaccctggaggaggggcaaccttgggagcagtgggtggaggtcagtgtggaaggaaggaccagagttaagtaatggacgtgttctgtttcaggtgcctctgtggcatccaaatggatgaacccagtaggcagatattttggttttctattgccatgcaatgaactaccccaaatgtatgacaaaagcaacatgcatgactgtttttgtctcatgggatttattgtgactcatggctttgtgggttagaaattctggcagggcttggataggcagttctgttcctcacagcatcaggtgaagttggtgaagccttgggcagaagttccgtggtctggtgccttgggtgggggtggctgggaggctgggctcagccgggactcttgactgaggcacccacaggtgggtctccagcatgacgtctcagggtggtcggactccgtacttggtggttcagggccccagagccaaccctccaaaagattgaactggaagctgcctgtctcctaaggcctgggcttggaaactgcatggtgtcatttctgccatattttattagtcatgtagtcacagagtccatctagattcaaggaaagagttcataggccacttctcaataggataagtaacaagaatttatagccaactgaacagcagacataaagatgtggatttcagaaaagaggtcccattttcctgccttcctttcttctcatttttcctccctgtctccctctcccttcctctctcccttcttttagaaggtgttccttgagtacctacagaggttcagggactgctatgcatgttgagggtacagcaatgaccaagatctctggtcttcctcttatggggcttacaaaccaggcaacagcaggcaaaaccatcagctgagcaagaaagacaccttatagtgtacctgtgttaagcagagaagtggaaaaggaggatgtgggaaatagctcttgggcagccattgtagatcagagggaccagcttagtgagaaggcctcgctgaagggtgaggtgagacaaggaggggctggccacgcatgttcagggcagagggaacaatggctggtataaaacccccggtgggagtgagcggttctggtttgagaaacaggaagaagggctgcgtgccatgtgggtggggtgagtggggagaagcgtgggtggttagaaatcagctaacagagcgctttatcaccccatgcgggagtgtagattttactttaaatattttgggaagactttgggggtttgatcaaggtagggacaggatctgatttccatgaaatgtaaatctggtggccgagtagagccctagtgcgagctgggagaccaggcagggggccaccgccatggtccaggtgagaaagtctggatggacaggtggagagagagagccacaggtgggctgaagatactgctttggaggcacagagtggagatgcgctgatggactggatgggagggggcatggttatgagagtaggagggagataaggatgacacctggagcctcgatggaccacctgggaggacgacgtagctgagcagatagagaaatggggaaggtgggttgagtttgaggtgtgttttagacactcaagttgccaccggaaactatgagcctggggttcttggatgtggtccaggctggagattgagactgggaagtcataggcctatagctggcatttacaaccagggactgggagagagccccagggctcatgtgtagagagaatagaaagggacccaggaaagatccctggacgctggccaacattaagaggcacagcaaaggatgaaatggcaaaggagactgggagggacccgccaaacaggtaggagagcccctaagggtcacagcagccagtaagcaaagtaaaagagaggggtcttggttccagggtccccgtggtggataccaaatgcacagatgctcaagtcctctatataaaatggggtaatatttgcatgtaacctacccatcctcccatacactttaagacatctctagattacttagaatacctaatacaatttaaatgctatgtaaatagttgttatactgtattgtttagagaataatgacaagaagaaagtttgtacatattcactacagacacaaccaaccattttattttttgaatttatttatttttattttttgagacagagcctcactgtttgcccaggctggagtgcagtggcatgatcttggcttactgcaagcttcgcctcccgggttcaagggattctcctgcctcagccccctgagtagctgggattacaggcacatgccgccatacctggctaattttttgtatttttagtagagatggggtttcaccatgttggccaggctggtcttgaactcctgacctcaggtgatccacctgccttggcctcccaaagttctgggattataggtgtgagccactgtgcccagcctactttttgaatacttttgatctgtgcttggttcaatccacagccgcaggtccctggatacagaggtcggctgtatataccagggagtgttctgtatgggatactaatgaaggctatgtgtctcagttacttattgctatggaagagaccaccccaatactcagcaacttaaaacaaagtacatttatgatttcatagtttctctgacttatgaatccaactacagttttagctgagagtctctgcacagggccattcccaggctgaaactgttggctggggctgcattcatttcaaggcttgactttgcgagaggtggcagaggatttgtttccaaatctactcatgtgactgttggcaggattcagctgtggcttgttggactgagggtctgagttccttgctggctgttgacgggagtactccctgggccccttgccgcatagggtgcttcacagcatggcagctctgccacctgtcttacaggagaagatgagcaagagggatagcaggtccttttgcaacctaatttcagaagtgacttcctgtgtcttttgccaaattttgtgagttggaagtgagtcgttaggtgcatcccacactcaaggggtggggactccacaagggggtgactgcaggagctggggatcagtgagggtcatcctagaggctgcctgccacagccagggagtggaggaagctgaagaaggctacagccggaagcgggagtgaggagcctgacaactcaagaggtggcacagggggagagaactgggacacaaaagagtctgagaagcagggaacagtgtgtaggttccgtgaacaacacaaacaaaagtcattgctttcagttttgcaaacttaattctcatctaagccctctcagacacgtgttagaattcccatctttcaaatgaggaaaccgaggctgggcgagggctgtagggatggaaagagttggatgggttcagaaagtgctcattcaggatggattgcagggaagggtggttgaggaagtgagcaggatcatggcagacatggatttggtggtttctgtggagatgggaaatgccatgaggtctccttattgttctgtcaggggtgactcagtccctgtgcattaggttcagctcccatgaggcctgggacttgagtggggcctccgtggtggcttggaagctgctccccaccacatgccattttctcttctcttgcagctttggatacctcccgcctttggctgtcgacctgagtatgacaatggattggaggagattgtctttggctttgaaccctggataattgtggtcaacctggccatgcctttttctattttctatcgaatgcacgcagctgcctccctctttgaggtctattgtaagatatagtctgggtccacaagagacctaggagtgagctaacaagagttcattggagccaactaggagtggccaggttgggcaaatattgcctgacaaatatgagaagggccaccttttgtctgcaaagattgtgcttcctgtgggctggaactgcccatcacccctgatgaatgtaaacaagttagatcaaaatccatgaggtggct

SEQ ID NO: 1644 - protein, 448 aa, Homo sapiens
MRGNSATSLSSVGLGLDSAIWTRKNERRKGSCVHYEFGVIHSVFTNLLLWANGVLNESKHQLNEHKERLITLGFGNITTVLDDHTPQCNCTPPTLCTAISHGIYYLYPFNIEYQILASTMLYVLWKNIGRKVDSHQHQKMQFKSDGVMVGAVLGLTVLAATIAVVVVYLIHIGRSKTKSESALIMFYLYAITLLMLMGAAGLAGIRIYRIDEKSLDESKNPARKLDSDLLVGTASGSWLISWGSILAILCAEGHPRYTWYNLPYSILAIVEKYIQNLFIFESIHREPEKLSEDIQTLRVVTVCNGNTMPLASSCPKSGGVARDVAPQGKDMPPAANGNVCMRESHDKEEEKQEESSWGGSPSPVRLPRFLQGNAKRKVLRNIAAFLFLCNISLWIPPAFGCRPEYDNGLEEIVFGFEPWIIVVNLAMPFSIFYRMHAAASLFEVYCKI

SEQ ID NO: 1645 - DNA, 1498 bp, Homo sapiens
  source
  (1)..(1498)
  CDS (201)..(1298)
  modified_base (278)..(377): a, t, c, g, unknown or other
aggcttctaaggagctgctatttttatttttcctttttaggaaatgggacccaagggtagttcctgaggtgtataagacaggatttcggggtgataagacagaaatccaaggtcacaggaatgcaaggagtccttactgtggtgagacaggggagttgagatgcatgtgtggtccataaacaagctccacaattcagtttatgagagtctcggaaagtgcgggctttgcagttaagaggagtaagataattaaaggtggtcgagtattgatctcttannnnnnnnnnnnnnnnnnnnnnnnnnnnnnnnnnnnnnnnnnnnnnnnnnnnnnnnnnnnnnnnnnnnnnnnnnnnnnnnnnnnnnnnnnnnnnnnnnnntactctctttctctctcttcgtcttgttccgcgcgtttgttgtctgcctttcgtctgtctcctctctctgccgtctcatcgtttgttggctctggtgtgttggggttcgtcgtctggctgtctcctgctcctcctcgtttagttctgtcttgtgtctcttggtgttgccttttgtttttgcgtgtgcttgttgtgtccgttctccgttccgtgttctgtttctgtgtctttttcctttgtgtgttgtgtttgtgtgtgtgtgtttgtgtctttttcttcttgtgcgctcttttgcttgtgtttgttgtccttgtgtttgcggtctctgtctttcgttgtctcgtgttctcttgttgcttgtgtcccggcggtggatcggtgtattgtgtggtctatttactgtttcgttgttcgttgtcttctggtggtggctttttgtctcgttgtgttgtctgctgttgttttgtgttgtctttgtcttgtggtggtggttgttgggctctggtctgtgcctgtgtctgtctgttctgggcttcggtttggtctgttgtgtcgtctggtctttttgtttgtgtctttgtgttctgggtgcgctctttgccttttgctctttgcttggttcttttttgtcgtgttacccacccacccccactcccctacccacccactccccccctttggtcctctggcgttcccctgtaccggggcacacaaagtctgcgtgtccaatgggcctctctttccagtgatggccgactaggccatcttttgatacatatgcagctagagtcaagagctcaggggtactggttagttcataatgttgttccacctatagggttgaagatccctttagctccttgggtactttctctagctccaagatggcttttaagcccaagatggaggaaggctggttgattatttcccccttgtcgtaagtgtccctgtcaaatctttgatgggagggagtgagtcaaaatttgtaatgcatcaaaagatgcatggccaatttgcaagctgtatctgtttggttagcacagcagaattaaagaagagccattgtacctggcatttactgtggagcgatggccacttagtcttgtagtaatcacttgtaa

SEQ ID NO: 1646 - protein, 365 aa, Homo sapiens
  MOD_RES (26)..(59): Variable amino acid
MRVSESAGFAVKRSKIIKGGRVLISXXXXXXXXXXXXXXXXXXXXXXXXXXXXXXXXXXYSLSLSSSCSARLLSAFRLSPLSAVSSFVGSGVLGFVVWLSPAPPRLVLSCVSWCCLLFLRVLVVSVLRSVFCFCVFFLCVLCLCVCVCVFFFLCALLLVFVVLVFAVSVFRCLVFSCCLCPGGGSVYCVVYLLFRCSLSSGGGFLSRCVVCCCFVLSLSCGGGCWALVCACVCLFWASVWSVVSSGLFVCVFVFWVRSLPFALCLVLFCRVTHPPPLPYPPTPPLWSSGVPLYRGTQSLRVQWASLSSDGRLGHLLIHMQLESRAQGYWLVHNVVPPIGLKIPLAPWVLSLAPRWLLSPRWRKAG

SEQ ID NO: 1647 - DNA, 1228 bp, Homo sapiens
  source
  (1)..(1228)
  CDS (201)..(1028)
tctccaaaaacataaactaataacttatttaatatattagtcttcaaattatgtagaaaagaaatgtggactacaaagcatggttataacaatactagcttttagattaataattttaatgtattagcctctttaatcatgtagaaaacaaaaattggagccacacagcattattacactaatagattttatatttacccatgtatttatctttaccgagatcttcatttcttaaaatggctttcagttactttctagtatcctttcagttcaacttacaggactcccttaaacatttcttgaatggtaggtctagcgggaacaaattgcttcagcttttgcttatctgggaatgtttcaatttctgtcttaatttctccctcattttaaaggacagtttgttagaaatagaattattgatggacagtttgtcttttttttctttgaatatattagccaactgcctactggcctccaaagtttctaatgacaaatgtacagataattttattgaagatcttttgtatgtgatgtgtcacttctctgttgttgttttcaaaaatctgtctttggctttcaacagttttagttcatcctgcttggaattggtttatcttttaaaatgtttaaatttatatatttcatcaaatttgggaagttcatcgacccaatcattacttatatcaatttttttgtccctttcaccttcttctgggactcccatattgtatatgttggttcacttgatatcctacatgtctctcttgttctttccattcttcttcaatcctttttctttctgtttgtctgacttgataatttccattgttttaccttcaaggttcactgattctttcttctgcctagtcaaatttgccttgaatcccctccctagtgaattaatcacttcgattattatactttttagcttcagattttcttttttgtttctctttagattttctgtctctgtattggttatttctatttgttcatatatcattttcttgactttcttcatgtgttaatttttgagcaacattaagacaattgctttaacgtgtttgtttagtaggtatgccatcagttgtttctcagggatagttttgattgttttacttttttgccttaaataggcccaatttacctcttgcatgccttgtaattttttgttgaaaactggatagttgaatataataatatgcaggttctggaaatcagattctca

SEQ ID NO: 1648 - protein, 275 aa, Homo sapiens [sequence omitted]

SEQ ID NO: 1649 - DNA, 23229 bp, Homo sapiens
  source
  (1)..(23229)
  CDS (201)..(652)
  CDS (755)..(1381)
  CDS (1571)..(1903)
  CDS (2393)..(3213)
  CDS (10896)..(11033)
  CDS (12051)..(12138)
  CDS (14686)..(14770)
  CDS (16609)..(16715)
  CDS (21240)..(21575)
  CDS (21894)..(22056)
  CDS (22883)..(23029)
tattgtttgatggataaaagttcaccttttattgtataaaattgactgagattaatttatacacattgacaatgggtaaatagaatttttcagattattaaaagctgaaggatgcccacgtaagcaaaaaaaaaaaagaaaaaaccaacaaaaataaacccaaacccctcaaacaatttcgaacacgaaacattcttctgatgccggcatccctgcttgcaggtgtgaagggggcaggaatcagcgaggtgtcctgggctgagtccccggagtgggaagaggtggcaggaaggggatctgaggaggagaacaggggtcctggtggtctgtgcttcttcccagacacgggagctgtacaggagacctctgcagcagatgctaggggggccagtaggcccaggcagtcttgggacttgggtctgtcctgctgtgcatccatagtgggtgctttagaaacgggaggcccacccgaagcccctgttgcaagtgaggacaaagtgtgggaaggccgtgagggtctgcagtccgagatggccttgtcctcaacgtgcagtgcagtgttgatgtggggcctagaggcctgggatctgggggagccacccctgggggcaagtgtctgccctggtgctgtacctgccttgttttcacagcggtgacccgaagagacagcctgaggtccgtcctcactcactgtgtttgaggaactgtgggccagctggcagtgggatgaggctggccccctcctccgctttagttcctggaggccttccgtagagctgtgggagctggagctggcatttcgtttgaggcaggatctggtccgggaggtctgggatctctggttatatctcacttctgacctctgggcacgtgctgcagctgtggctgaggccaagaaatgtgaggggcctccatccactgcattgagtagcgaccccgacgtggggttcaatgtggaggggggaagggctgctgcggcagctgcaggagccgaggtgccaggccttgttcttctcatgccggcatccctgcttgcagctgtgaaggtggcaggaatcagcgaggtgacctgggctgagtcccgggagtgggaagagttggcaggaaggggatctgaggaggagaacaggggtcctggtggtctgtgcttcttcccagacacgggagctgtagaggggacctctgcagcagatgctaggggggccactaggcccaggcagtcttgggacttgggtctgtcctgctgtgcgtccatagtgggtgctttagaaacgggaggcccacccgaagcccctgttgcaagtgaggacaaagtgtgggaaggccgtgagggtctgcagtccgagatggccttgtcctcaacgtacagtgcactgttgatgtggggcctagaggcctgggatctgggggagcctcccctgggggcgagtgtctgccctggtgctgtacctgccttgttttcacagcggtgacccgaagagacagcctgaggtccgtcctcactcactgtgtttgaggaactgtgggccagctggcagtgggatgaggctggccccctcctccgctttagttcctggaggccttccgtagagctgtgggagctggagctggagctggcatttcgtttgaggcaggatctggtccgggaggtctgggatctctggttatatctcacttctgacctctgggcacgtgctgcagctgtggctgaggccaagaaatgtgaggggcctccatccactgcattgagtagtgaccccgacgtgttgttcaatgtggaggggggaggggctgctgtggcagctgcaggagccgaccttgttcttctcatgccggcatccctgcttgcagctgtgaaggtggcaggaatcagcgaggtgacctgtgctgtgtcccgggagtggtaagaggtggcaggaaggggatctgaggaggagaacaggggtcctggtggtctgtgcttcttcccagacacgggagctgtacaggggacctctgcagcagatgctaggggggccagtaggcccagggagtcttgggacttgggtctgtcctgctgtgcatccatagtgggtgctttagaaacgggaggcccacccgaagcccctgttgcaagtgaggacaaagtgtgggaaggccgtgagggtctgcagtccgagatggccttgtcctcaacgtgcagtgcagtgttgatgtggggcctagaggcctgggatctgggggagccacccctgggggcaagtgtctgccctggtgctgtacctgccttgttttcacagcggtgacccgaagagacagcctgaggtccgtcctcactcactgtgtttgaggaactgagggccagctggcagtgggatgaggctggccccctcctccgctttacttcctggaggccttccgtagagctgtgggagctggagctggcatttcgtttgaggcaggatctggtccgggaggtctgggatctctggttatatctcacttctgacctctgggcacgtgctgcagctgtggctgaggccaagaaatgtgaggggcctccatccactgcattgagtagtgaccccgacgtggggttcaatgtggaggggggaggggctgctgcggcagctgcaggagccgaccttgttcttctcatgccggcatccctgcttgcagctgtgaagggggcaggaatcatcgaggtgacctgggctgagtcccgggagtgggaagagttggcaggaaggggatctgaggaggagaacaggggtcctggtggtctgtgcttcttcccagacacgggagctgtagcggggacctctgcagcagatgctaggggggccactaggcccaggcagtcttgggacttgggtctgtcctgctgtgcatccatagtgggtgctttagaaacgggaggcccacccgaagcccctgttgcaagtgaggacaaagtgtgggaaggccgtgagggtctgcagtccgggatggccttgtcctcaacgtgcagtgcactgttgatgcgctggaatgccgtctctttttccaggtgcaggtcttcagccgtgacccggtaccccagctctaagggaggtggcagcatcaaaggctcccctcgcctgcgtggcagcaggggaatcttgcgtctacggggcctagagtcctgggatctgggggagccacccgttggggcgattgtctgccctggtgctgtatctgcccccttttcacaccgtgtgtgacccgaagagacagcctgaggcctgtcctcactcactgtctttgagtaactgagggtcagctggcagcgggatgaggctggccccctcctctgctttagccccggcaagcctcccgtggagctgtaggagctggagatggcatttcgtttggtgctcgagctcgtccaggatgtctgggatgtgtggttatatctgatttctgagctctgggcgtggaggtctgtctgcagaggcccgggcctgggcacaaagggagaggggcctccattgtcccgcaggggccaaaatgcagaccgtgcatccccggtgacctcggggaccgttctctgatcatcaggattttcttggactctggggtccttgtcctgctcaggcatccctgccccgctctccttgagggccctcaacactatcttccctggacacaagtctggggacagccgggtgttgtggaccccaaaggggtgactacctgctcctgggccccacagagtccttgtgctcagtgtagtggctgagctgggggatgccctggaactcggagcacacagcactggcttactgtggtacctgtgcagtgaaattgaagacagaatcaccaggatggaacacaggtcttgcaggatcacggaaaaccttcttagagttgtcttgacaccactgatgtcgagtgtgcgggtgtttgtaggatggcctgccactcagtccaggggcaggagcaacggggagatcccacaagcaaagtgaactgggggatgggctgaaggggctccaggcaactgagccctactcgcaggtcctcggccttggcccaaacaggaatgaggggcacagagtgcccgggtaaccgctcctgggagcagtggggaactgtcggatacttgaactctcaagagctgggctctgagcgtcctcatccagctgccaacttggccaaaggctaagccagcagattgttctgttgccgggcaacgcgacttctaaacctgagggagtgggcatgtgagcacataatggcaccagtgacagagcgaccataatggatgaataagcacagccaggtacccgcgcaaggcacctgctggcaatggcaggaggcggacgtggggggtcgtgcagtaggtactggagggagagacgtgggcacaaaggtcgcgggaggaacaggtgcccacaatggctgcatatttgcccgtggatcactgaagattcctgctctcctgctgaggtggagactgcagtgagctgagatcgcaccattgcactccagcctgggcaacgagtgcaaaactcagtctccagataaaaaaaagaaaaagaaaaaaaagaggccgggtgtggtggcttatgcctatgatcctagcactttgggaggtcggggtggacggatcacgagatcaggagttggaggccagcctggccaacatagtgaaagcccgtctctagtaaaaatacaaaatttagtcagacatggtgggcaggagagagcatgtgcaggggaacatccatttataaaaccatcagacctcatgagacttattcactaccatgagaacagcatgggggaaactgcctccatgattcagttatctccacctggccccacccttgacacatgggaattgttacaattcaagatgagatttgggtgcggacagagccaaaccatataattcttccccggcccctcccaaatctcatgtcctcatatttcaaaagcaatcgtgccttcccctaagtcccccaaactcttatttcagcattaactcaaaattccatagtccaaagtctcatctgagacaaggcaagtcccttccacctatgagcctgtaaaatcaaaagcaagttagttattttctagatacacagggatacaggcattgggtaaatacactcgtttcaaatgggagaaattggccaaagcaaaagagctacaggccccatgcaagtccaaaacccagcaggcaaatcttaaagctccaaaatgacctcctttgactccatgtgtcacatctaggtgatgcaagaagtgggttcccagggtcttgggcagccccgcccctgtggctttgcagggtacagccccccttctggctgcattgagtgtctgcagcttttccaggcacacagtgcaagctgtcagtggatctaccattctggggtctggaggatggtggcccttttctcacagctctgcttggcagtaccccagtggggactctgtgtgggagctccaaccccatatttccctttgacactgccctagcagaggttatccatgagggcccccccctcccctcccccccacagcaaacttttgcctggatttccaggcattttcatacatcttctgaaatgtaggcggaggttcatgaacgttaattcttgactttggtgcatctgcaggcttaacaccacctagaacctgaaaggcttggaacttgcaccctctgaagccatggcctgaggtgtaccttggccccttttacctatggcaggagcagctgggatgcagggccccaagttcctaggctgcacacagcagggggttctggacccacaaaaccatttttccttctaagcctcctggcctgtgatgggagggtctgctgtgagggtctctaacatgccctggagacatttgccccattgtcttggtgattaacatttggctcctcattacttatgcaaatttctacaacccagtctcctgagaaaatagatttttcttttctgttgcatcatcaggctacaaattttctgaacttttatgctctgcttcttctcgaatgctttgctgcttagaaatttcttctgtcagataccttaaatcatctctctcaagttcaaagttccacagatctgtagggaactctagaaagaaattcttattttccctctttcccgcctatcttatgcccgtttctaatacaggtgcacaatgcctgcagtgtctttgcatagtaagagtgactttactccatttcccaacaaattcctcatctccctctgagaccacctccgcctggaccttgttgtccatatcactattaacattttggtcaaagccattcaacaagtctctaggaagttccaaactttcccacattttcctatcctcttctgagccttccaaactgttccagcctctccctgttacccatttccaaagttgcttccacattttcgggtatctttacagcagcaccccactctactggtatcaacttattgtattagtctgttctcacactgcaaataaagacatacctgagactgggtaatttataaaggaaagaggttgaattgactcacagttctgcatggctggggaggcctcacaatcatggtggaaggcaaggaggtgcaaaagcatgtctcacatagtggcaggcaggagagagcatgtgcaggggagctcccatttataaaaccatcagatctcatgagacttagtcactaccgcgagaacagtatggggggaaccatccccatgattcagttatctgcacccggccccacccttgacacgtgggaattattacaatgcaaggtgagatttgggtggggacccatccaaactatgtcagtatgttttgacttcttgcttgattgctaggttgcatagaggacaaacatggaaattaatgaagtaccttaatatctggcttcagatcttagacaggatcagagggccagctcaaatttgcaaggaggggaggtagatcccaccattttatgggtgaatggcaaaatcaaacagaaattatgtgggatgggagatactgatgcagccatcattggaaacattctacttagctaattttatgctaggctttaggtcaagaaggagagagagagctgacatgctgtggtacacacttatagtcccagcgacttggaaagctgaggcaggaggattgcttgatcccaggagtttgaggtagtgtgcgatgatcgttcttgtgaatagccactagccactgaactccagcttgggcaacattgagacaccctgtctcttaatttaaaaaaaaaaaaaaaaaaaaaaaggaggaaagaaagtggtctcagtttttaatgtaaatatttttaatgggatactgatattttaagattaatgtatattgtatatcagttaactgcaggtcaataattatataaaacttaaggtacgaaaaacatttatttttgctaacatatctgtgagttgactgttgttggcttggtgaggctgcaagctgcagatagagtctaggtatgttttctgtgtgtttgttcccccttggatcagtggactacctgagaatgtgtttctgtcacagtgatagaatcacaaggaaactccagttctggaagtacattttaagccattgcttctctcatgtccactaacattcagtcagccaaagcacataccttgtccatggctaacattgatagtatagataaatatacctgatctctagcaggaggaactgcattgtcttggggaaaggttttagatatagggaggggtgatgagttgggaacaataatgtagtctgccgcaaacatattaaagtgtaactggatatggttgctgcagaattttgaacctttgttttaattgtgatttttactctttcccccctatctagtgcccttttgtaatacagtaattatcatgatttttgtctgaactgaaatcttctgagattagattgtctacgaaaatacagtcgatcctccttgttttcagcttttgtatttgtgaactcacctactattttttgtaacccccaaatcagtactcacagcactttcatagtcatgtgtttgcgcagagtgtcaaagaatttgagtttgaacaggatgatattctgccttctttttcagctctcatacaatagtcaggtatcctttttgtggtctatttaatgccatgcttttcctgtttttgtactgtttgttggttgttttgccatttaaattaacccccaagcatagtgctgaagtgctgcttagcattcacaagtccaagaagtctgtgatgtgtcttacagagaaaatacatgcattaaataaactccattcaggcgtgagtgctgtagtgccgttggctgtgagttcaatgttaatgaatgaacaatgtatattatttatttattcttcatttaattaattattattattattttttttgagatagagtctcactctgttgctcaggctggagtgcagtggtgcagtcttggctcactgcaacctctgcctcctgggttcaagcgattcccctgccttcgcctcccaagtagctaagactacaggcatgcgccaccatgcctggctaattttttttttttttttttgtagttttagtagagacggggtttcaccacgttggccaggctggtctcgaactccagacctcaaatgatctgcccgccttggcttcccaaagtgctgggattacaggcgttagccactgtgcctggccaacaatatatattaaataagcacacatacaacaaaagtaggtgttggtaagcttacaaaagtgtgaccagtagcttgctgaaacctaactttttatttgttcatggaactttctagaccgtaactacactgaataatgagaatctgctgtaatctttttaggtgctgtagatgagccattggattaaattattacagtatgtttcagactgctgtatgttgaaccctagtgaaatgcctctcaaaccttcataaggatcacaatctcatgtcctttttttttgttattaaatgcccagtatgtgttagcgatttaaacaaaattcaaatatttttttttttttttttttgagacagagtctcgctctgtcacctaagctggagagtgcagtggtatgatctcggctcactacaacctctgcctcccgggttcaggcgattctcctgcctcagcatcctgagtagctgggattacaggcacccgccaccacgctgggctaatttttgtatttttagtagagacggggtttcgccaggttgtccaggctggtctggaactcctgacctcatgcgatctgcctgccttggcctcctgaagtgctgggattataggcgtgagccaccatgcccggcgttgacttcttaataataaccatactgactggtgtgagatggtatgccattgtggttttgatttgcatttctctaatgatcagtgatattgagctttttctcatatgcttgttggccgcatgtgtgtcttcttttgaagtgtctgtttatgtcctgtgcccactttctaatgagatttttttttttcttgtaaatttgtttaagttccttatcagtgttggacattagatctttgtcacatgcattgttgcaaaaattttctcccattctgtaggttgtctgttcactctgttgatagtttcttttgctgtgcagaagcttcaagaagaaaggaatccgattggttctgtgtctgtctcttttggtattctcagaattatgtagtcattcatatagaaagatgattaggaaaataggacaagaatagcagaaatctacataaaaatgtaggaaattaaaattagttaccagcatacaaaaaacttctgtatgttataattacatactataactcacccctccttggcaaatattctctctcttttgacttcaaaatcatggcttatatgtactttctctatttcccagatgcaaatataattaattgactttatttatctaggaaatgttactcatatcttaattgtagtcattggcttgagtgacgggttttggtaattcaactactattacttgaaagtagtagatttcataggatactgttataaaatctttttaacctcttttctgatttcaggagtaattagtaattgtggtttactggaaaattcaatgaatagggtgttaaaggaagcaattcattaataatatatgtaatctattgggagactgaggcgggtggatcacctgagttcaggagttcgagaccagcctggccaacatggcaaaactccgtctctactgaaaatagaaaaattcgccgggcatggtggtgcattcctgtattcccaggtactcggaaggctgaggcaggagaatcacctgaactccagaggtggaggttgcagcgagtcaggatcgcagcactacactccagcctgggtgacagtgagactccatctcaaaaaaaaaaaaaaaaaaaaaaaaaaaaaattaaaaaattaaattaaaagcgggctgggcgcattggttcagggccgggcacggtggctcaagcctgtaatcccagcactttgggaggccgaggcaggcggatcacgaggtcaggagatcaagaccatcctggctaatgtggtgaaaccccgtctctactaacaatacaaaaattagctggatgtggtggcaggtgcctgtaatcccagctattccagaggctgaggcaggagaatcacttgaacctgggaggcagaggtttcagtgagtccagatcatgccactgcactccagcctgggtgacagagcgagattctatctcaaaaaaaaaaaaaaaaaaagcaacagaagcaaatgagagtgcctgggagtggtcattgtggggccttcccgtttgtgtgacccaggtcatgtccctccctaagccctggtctctcttgcctcctgcagggctggtgaattaccagatctccgtcaagtgcagtaaccagttcaagttggaagtgtgtcttttgaatgcagaaaacaaagtcgtggacaaccaggctgggacccagggccagctgaaggtgctggtgccaacctctggtggccgtacctgatgcacgaacaccccgcctacctgtactcgtgggaggtaatggtggtttgggacttgcgtaagggaggtcttttgcccccatctggtagccctggcttcagcaggagcccaggacaggtgaacgggcaggtgtggtcctctgagctttctgatgtttcccacccttggtgggaggcccagattttttatttatttatttatttatttatttatttatttatttgtttgtttgtttttgtgatggtctcactctgtcacccaggctggaatgcaatggcctgatcacagctcactgcagctttgagctgcaatcctcctaccttggcctcctgagtagctgggactacaggcacatgccaccatgcctggctaattaaaaaaattttttttgtaggccgggcatggtggctcacacctgtaatcccagcacttcgggaggctgacgcgggcggatcactttaggccaggagttggagaccagcctggccaacatggtgaaaccccgtctctactaaaatatgaaaatttgcagggcatgatggtgcacgtctgtaatcccagctactcgggaggctgaggcaggggaattgcttgaacccaggaggcaggggctgcggtgaattgagatcatgccgcagcactctatcctgggtgacagagtgagactgtctcaaaaaaaaaaaactcctttttatagagttggggtcttactaggttgcccaggctggtcttgaactcctggactcaggtgatcctcctgccttagcctcccaaagtgtagggattccaggcatgagccacctcgtctggtcaaggagaaggcctgattttgaagggcaggtcccagggtcagccagtgaagggcagagcctctggttgctgcttctctgcaggcccagtggcgacttctggggtgcatgcacgaggggtcttcctgctgtagggcaggccagatggggctcaggctgtcggggcgctcacacctggcgctttggctgtcgtaggtgcggctgactgcacagaagtcactggggcctttgacttctacacactccctgtgggcgtccgcactgtgcccgtcaccgagagccagtgggtgagagccagtttcatttgcggtagaggcagcagaggttgtagaaatgctccttgaggcagatgccacaccccaatttcatggagtgatttgggctgagccgagtctgcagcaggcagaaggctctgagatgttgtcctagcctgggcaaaggacaattcagagctcgggggaataggggtgtgctcagcacgactgggtggacaggccgtttgttgtgaatcgtacaggcttccaggagcgggtgcctgaggcttccagacaggctttgggaggtggccagaggagatgcctgtttccggggcaggaaatggagggagggcccaggctggagaggttcagccaggctgtcacaaggctttgaagcttcccatctgagagcctggctattggagagtgtgggtttggaacttgaggctaggaggttctattctgtcctgtgccagccacagccttcggatgggcagagcaatgatggggggaagatgtaaaagaaaagaactgaggaaagaagaagaaaaccagcttcaacaacggtctaggccggatgcggtgggtcacgcctgtaatcccagcagtttgggaggctgaggtgggtggatcacccgaggtcaggagttcgagaccagcctggtcaacaggtagtgaatcctgtctctactaaaaatacaaaaattagctgggcatggtggtggacgtctgtaatcccagctaccaggtaggctgaggcaggagaatcgcctcaggtgaaccaggaggcagagattgcaatgagctgagataatgccactgcattccagcctgggctacagactgagactctgtatctcaacaaaacaaaacaacacaaaaacacaacagtctgttctgtggaggccttgggcagatgctcggcgctctgagcacggactggtccctctgttgggagcctcttcccttcatccctcctggttaacttgactcagcataaaggccatttcttctaagagcctgtccctgactctccaatcggggatgtgtctgttgtctcatagagtgcccaattcctgccaccacttgtcatttccattcgcaacatttctttcattgtttgtttttcagagtcagggtctcactctgttgcccaggctggagtgcagtggtgcaatcatagctcgttgccatctcgacctcctgggcttaagcgatcctccccactcagcctcccaaatagctgagaccacagacgtgcgctgccttgccaggctaaattttaatatttttttttccccacgagtcagagtcttgctctgtctcccaggctggagagcagtgttgcgatcttggctcactgcatcctctacctcctgggtacaaacagttctcctgcctcaccctcccgagtagctgggattacaggctcacgccaccatgcccagctagttttcttctttattttttgttgagatggggtttcaccatgttggccaggctggtctcgaactcttgagctcgtgatccacctgccttggcctcccaaagtgctcacaggcttgagccaccatgcccggccctaatttttaaatttgttgtagaaacaaggtcttgctatgttgtccaggctggtctcaagcgcctggtctcaagtaagcctcccaaagtgctggggttctaggcttgagccacctcgcctggcacttgcaccgtttttctgtgcatgcatctccactcccactgcccaggacctgtggacttagatttgagtcattactgagcacctagcacccagcctcatgcctccctcccacctcgcactacctgtttgcttgatgcattaataaatattccacctgaatccacagcccattcactcctgtgttcaagagctatttcaggaagtgaacctcatttctggcagtgttcagtccagtgacctcagctctgtgtacccggcagggtggctacgcctctgggggagttggattcaggggtgggggagaaagagtgttgttagagagctcggtctaggactagaggaacgtgcccttatgtaaaatacatctcaagttagggaagaaagcagcggctctgtgctttgttgtttttttttttttttcttttctttctttctttttttttgtttgtttgtttgtttgtttgtttgtttgtttgtttgttttggggcagggtcttgctctgtggcccaggctggagtgcagtagcgtgatttcggctcactgcaacctccacctcccgggttcaagcaattcttgtgcctcagcctcccgagtagctggagttacagatgcgtgccactaagcctggctaatttttgtatatttagtagaaatggggttttgccatgttggccaggctgttcttgaacccctgacctcagtgatctgcctgcctcagcctcctgaagtgctgggattacaggcgtgagccatcgtgcctggcccccagttgtgttctggcaggggaagatgggacagagaggatgggaggttgtctgagcctttcccggactgacggaacctgtgtcttctctcttttgtggacaggatggtgattgctcacaccaaagccttggacccctcccagcctgtgacctttgggaccaactccacctacgcagcagacaaggcggtgagcctgggggtccccaccccatttctccctgcctttgcctgggcttgtcctgaagcctgctcatgggaacagctggaaagaaccatgtgctgccagtctgagctttttattttgttttacttagaaagatagagacagggtcttgccatgttgcccaggctggtctcgaactcctgggctcaagtgatcctcctgcctcggccttccaaagggctggggttacaggcgtgtgccaccgcactcagccgcggccagtctgttttcaaagatggtctttgggttaatgacaattctctctctgcttactctccaggcagtgtggctttctgaatccaaggaggctgggcatagggagatgggatttgtttgcccggtttggactcagcattttttgtactcgatttaatagactcataaaatgtcaaaggtttaagtgagcttagagttcatctggcccaaacctggctgatcagaatctccaggggaagttttattgaaatgccagatctctgcgttctgagatcctgatttagtaactccagggttggaacctgagttttttgtttttttgtgtgtgtgtgtgaaggcaaggtcttactctgttgctctggctggagtgcagtggtgtgatcacagctcactgcagccttgaattcctgggcctaagcaaccctcttgcctcagccttccaagtagctgggactccgggggtacaccactgtgcccggctaattttaaatgtttttgtagagatgggatctcactatgttgcccaggccagtctcaaactcttgagctcaagtgatcctcctgccttagcctcctaaagtgctgggattacaggcatgagccaccgtgcctggctgatactagcattcttttttattttttattatttttttaagatagagtcttgctctgttgcccaggctggagtgcagtggcacagtctcagctcagtgcaacctccgcctcccaggttcaagcaattctcctgcctcagcctcccaagtagctgggataacaggcacatgccaccacgcctgcgcttgatcgtgggaggcagaggttgcattattgtgccactccattctagcctgggcaacagagcgagactctgtcttccaaacaaagcggaaaaagattatctgcgagaatgactgcattggccccttgggtgggagggcttctccagggcaaggtgaggggatgcccagtgctgggagtgctgcctggagaggagtcagttccagtggcgggggccctgggttttggctgaggactgcgtgttggcagctgctctgcctctcacagcccttcccagctgcacacgtcgtgagcgtcagtgtgcaatcacaggcctgcctcctttgggccactttgtgaccatgttttttgcttgtggggcagggtaatttcaggatctaaattggtgcagttggatgttctcagccccgagaggcagctcttcccgttgtaggctttttgttttgttttgtagaaatggagtcctacgacgttgcccaggctggtctcaaactcctgggctcaagtgatcctcccaccttggcctcccaatgtgctgggattacaggcatgagccactgtgccgtgctgattttcttgatactattttttgtagagctggggtcttgctgtgttgcccaggctggtctcgaactcctggccacaagccaccctcctgcctcagcctcccagagtgctgggattacatccccttcttaccttctctgtcagaggagcccccacagcatgtgagtactgagtcatgcggtcttgtggttgctgaacgggctctgctgctctggtcctaggctctgtatgtggatgtgatccgtgtgaacagctactactcttggtatcgcaactacgggcacctggagttgattcggctgcagctggccgcccagtttgagaattggtgtaagacatcacaatcccattattcagagcgcgtatggagtggaaacgcttgtagggtttcaccaggtaagcggtgttgaactttctgcttgtgtattctctctgggcagagatgccacttgcctcccccaccatgccatctctgaagaatattacagaccattttggagcatggtgaataagaaattttcaccttaggagttcagttgaatagtcatttttatatttgtgactgcaagtcactcttaggggctgtacttccttagtactggtagcattattatccaatggacttttatagctttcattaggttttcttttgtttttgttctttaaagaacattttacttatcttagtatttcatttttcatctatattatgaggcagtaagagtcttctgtttttccaaagttgagactgctttatatttatttcatattgtctacagctgtagtgttcaatacattagccactagccacatgtggttatttaaataagataaaataaaaattggccgggcatggtgggtcacgccggtaatcccagcactttgggaggccgaggcgggcagatcattaggtcaggagatcgagaccatccttactaagacggtgaacccccatctctattaaaaatacaaaaaattagccgggcgtggtggcgggcgcctgcagtcccagctactcaggaggctgaggcaggagaatggcgtgaacctgggaggcagagtttgcagtgagccgagatggcgccactgcactccagcctgggggacagagcgagactccatctcaaaaaaaaaaagaaaattaaaaattaagttctttagttgcactagccatatttcaaatacttgatggatacatgtggctagtggctaacataagggatagcacagatataaaacatttgctcgtcatataaagttctattggatagtgctggtctgtagcttataggatggtatcttagtctgcttcagctgctaaaacagaataccataaattaggtagcttaaacagtagatattttgaccaggcgtggtggcttatgcctgtattcctaacactttgggaggccgaggcaggtggataacttgagctcaggagtttgagactagcctgggcagcatggcaaaaccttgtctctacgaaaattagctgggcgtggtggtgcacgcctgtagtctgagctacttgggaggctgaggtgggagaattgcttgaacctgggaggcggaggttgcagtgagccatgatcgcaccactgtactccagcctggatgacagaatgagactctgtctcaaaaaaaacaaaaacaaacaaacaaaaaaaaacagatatttctcacagttctgcagactggaagtgcaagatcaaagtgttggcaaattatgtttcttaaagagggcctgcttcctagattggaaatggccatcttctctcggtatcctcacatggtagggagaaaagcagctctagtgtctcttcttataaaggaagtaatgccaccataggggctctattctcatgacctcatctaaacctaattctctcctaaaggccacgcctcccagtatcctcaccttgggggttagggctttatcatatgaattttttttttttttttttttttttttttgagacagagtctcgctctgtctgtcacccaggctggagtgcagtggcacaatctcggctctctacaagctccgcctcctgggttcacgccattctcctgcgtcagcctcctcagtagctgggactaaggcgcccgccactgcgcccggctaattttttgtagttttagtagagacggggttttaccatgttagccaggatgatctcgatctcctgacctcatgatccacccgcctcggcctcccaaagtgctgggattacaggcatgagccaccgcgccgggcctatcatatgaattttgagggaacacaaacatgcagtctgtagcagatggtaataggctgacatattacacttgttgatgtaaatctgataggtttctttctctccaaggacagctttttaaatatttaacagtatcaataatttttcaggttctgtgagaattttataatttataatttgcagacttaatgtataatctattttgtcctaacaattacaaatatattttttatttcagattgtatatattcctaccagatggagataattacagctttaaaaatttttattttttcattttatttcacacattgacattaaatttttatggacacataataactgtacatatatatggggtagaatgtgatgttttaatacatgtactcaatgtgtaatgatcaaatcagggtaatttgcataatgatttttctgtagggagaaaattcaaaatctactcttctggctattttcaaatatataatatgttattgttaactatactcatcctactatgcaataggacaccagaacttattcctgggttctacatccgttaaggcaaccaaggattggaaatattggaaaaaaaaattgcgtctgtactgaacatgtacagacttttttcttgtccttattccttacacaatatagtacaataactatttgcatgacatttacatcggatattatgagtgatctagagttgatatgaagtatatgggaggatgtgcaaaggtgatgtgcaaatactatgtcattttatatcagggacttgagtatcctttgttaccctcaggagatcctgaaaccagtcccccatggatactgagggctgactgtatagtcctatcctcacggaactttcattctaatgggggaagactgactataaacaaaatgtatgtaataggtggtggtaagtaccgtggagaagtaacaaacggggcaaagtgagttatacagctccattcttagaaaccttggagtacttttcttagtttatactcgtggtggtttccttttgtctcctttattacatgggactctgacatgtgcccatagctagggtgacagtaggatctacccgatagtagggtggcagtaggatctacccaaaaagcatcctgctgatacaggaccaaagcatcctgttgttctcgagcctataaaaagagctaatggtcttgcttctcttaactgtggcctcctacactatgttttggatgattggtgatgtcttggatattctgtttctttggaactttgaatatacaacacttttctagggaattagcaatggaagcagagcaaagatgtacagaggaaacaatgcgtaactctgatggaattgaagtcatgaggcagcagagagcttaaattacagctttaaaaatttttattttttagagggaatttacttgggagtaacagcagtaatagttaacggagccagaatgcttgagtcatataattgcaaagcagagttgggagcaacagatgctaaagagtagttgctgtagttcctctttgggtcgtaggagcagttgtcatattaccatatagctactgcatgaagaagagttcttagtgaggcctggatgaacagctcttcttagtattctgtgtgaccccatttgaccttttaacaaatccctaagtaaataaatagcccctcaggtaaactaagtttttctctgctgtttttttgcttgagagagctataactgtaatagacttatatttctgaacattttagtgcttgccaatatttggtaatatttatgtttcctatatttgtaatgaacattcttcttccggtacattttttgttaaatattgtttgatggataaaagttcaccttttattgtataaaattgactgagattaatttatacacattgacaatgggtaaatagaatttttcagattattaaaagctgaaggatgcccacgtaagcaaaaaaaaaaaaagaaaaaaccaacaaaaataaacccaaacccctcaaacaatttcgaacacgaaacattcttctgatgccggcatccctgcttgcaggtgtgaagggggcaggaatcagcgaggtgtcctgggctgagtccccggagtgggaagaggtggcaggaaggggatctgaggaggagaacaggggtcctggtggtctgtgcttcttcccagacacgggagctgtagaggagacctctgcagcagatgctaggggggccagtaggcccaggcagtcttgggacttgggtctgtcctgctgtgcatccatagtgggtgctttagaaacgggaggcccacccgaagcccctgttgcaagtgaggacaaagtgtgggaaggccgtgaggtctgcagtccgagatggccttgtcctcaacgtgcagtgcagtgttgatgcggggcctagaggcctgggatctgggggagccacccctgggggcaagtgtctgccctggtgctgtacctgccttcttctcacagcgggtgtgacccgaagagacagcctgaggtccgtcctcactcactgtgtttgaggaactgtgggccagctggcagtgggatgaggctggccccctcctccgctttagttgcgggaggccttccgtagagctgtgggagctggagctggcatttccttggaggcaggatctggtccgggaggtctgggatctctggttatatctcacttctgacctctggacacgtgctgcagctgtggctgaggccaagaaatgtgaggggcttccatccactgcattgagtagtgaccccgacgtggggttcaatgtggaggggggaggggctgctgctgcagctgcaggagccgaggtgccaggccttgttcttctcatgccggcatcgctgcttgcagctgtgaagggcgcgggaatcagcgaggtgacctgggctgagtcccgtgagtggtaagaggtggcaggaaggggatctgaggaggagaacaggggtcctggtggtctgtgcttcttcccagacacgggagctgtagaggggacctctgcagcagatgctaggggggccagtaggcccaggcagtcttgggacttgggtctgtgctgctgtgcatccatagtgtgtgctttagaaacgggaggcccacccgaagcccctgttgcaagtgaggacaaagtgtgggaaggctgtgagggtctgcagtccgggatggccttgtcctcaacgtgcagtgcactgttgatgcgctggaatgccgtctctttttccaggtgcaggtcttcagccgtgacccggtaccccagctctaagggaggtggcagcatcaaaggctcccctcgcctgcgtggcagcaggggaatcttgcgtctacggggcctagaatcctgggatctgggggagccacccgttggggcgattgtctgccctggtgatgtatctgcccccttttcacaccgtgtgtgacccgaagagacagcctgaggcctgtcctcactcactgtctttgagtaactgagggtcagctggcagcgggatgaggctggccccctcctctgctttagccccggcaagcctcccgtggagctgtaggagctggagatggcatttcgtttggtgttcgagctcgtccaggatgtctgggatgtgtggttatatctgatttctgagctctgggcgtggaggtctgtctgcagaggcccgggcctgggcacaaagggagaggggcctccattgtcccgcaggggccaaaatgcagaccgtgcatccccggtgacctcggggaccgttctctgatcatcaggattttcttggactctggggtccttgtcctgctcaggcatccctgccctgctctccttgagggccctcaacactatcttccctggacacaagtctggggacagccgggtgttgtggaccccaaaggggtgactacctgctcctgggccccacagagtccttgtgctcagtgtagtggctgggctgggggatgccctggaactcggagcacacagcactggcttactgtggtacctgtgcagtgaaattgaagacagaatcaccaggatggaacacaggtcttgcaggatcacggaaaaccttcttagagttgtcttgacaccactgatgtcgagtgtgcgggtgtttgtaggatggcctgccactcagtccaggggcaggagcaacggggagatcccacaagcaaagtgaactgggggatgggctgaaggggctccaggcaactgagccctactcgcaggtcctcggccttggcccaaacaggaatgaggggcacagagcggagatataccgctcctgggagcagtggggaactgtcggatacttgaactctcaagagctgggctctgagcgtcctcgtccagctgccaacttggccaaaggctaagccagcagattgttctgttgccgggcaacgcgacttctaaacctgagggagtgggcatgtgagcacataatggcaccagtgacagagcgaccataatggatgaataagcgcagccaggtacccgcgcaaggcacctgctggcaatggcaggaggcggacgtggggggccgtgcagtaggtactggagggagagacgtggg

SEQ ID NO: 1650 - protein, 1098 aa, Homo sapiens [sequence omitted]

SEQ ID NO: 1651 - DNA, 22873 bp, Homo sapiens
  source
  (1)..(22873)
  CDS (201)..(229)
  CDS (14384)..(14592)
  CDS (15902)..(16157)
  CDS (16514)..(17094)
  CDS (17221)..(17441)
  CDS (18724)..(18862)
  CDS (18985)..(19172)
  CDS (20161)..(20401)
  CDS (22342)..(22673)
agcaatcagcgagactccgtgggtgtaggaccctccgagccaggtgtgggatataatctcgtgatgcgccgttttttaagcccatcggaaaagcgcagtatttgggtgggagtgacccgattttccaggtgctgtccagcacccctttccttgactaggaaagggaactccctgactccttgcgcttcccgagtgaggcaatgcctcgccctgcttcggctcacgcacggtgagtgcacccactgacctgcgcccactgtctggcactccctagtgaaatgaacctggtacctcagatggaaatgcagaaatcacccgtcttctgcgtcgctcacgctgggagctgtagacctgagctgttcctattcggccatcttggttcctcccccaaaatgaaacttttttattgctctgtaagggcttacactatctctctctctctctctctctgtctctctctctctctctctcacacacacacacacacacacacacacacacacactctgttatatacattgcaaatatttttgccagtctgtctaaattcatatgtccatctgtccatccatgcatttatccacccacccatccatctccataaagctctgaatttccctttgtgatttctacttttggcatcatgcttaaaaaaaaattttttttctacccccttattttataaatatccactaaaattgttcctagtgtcttcatgggtttttttttagtcaatttaaatgttttaaacttctagaccaagtgtgatggctcacgccagtaatctcagcactttggcaggccgaggtgggtggatcacttgaggtcaggagttcaagatcagcctggccaacatggtgaaaccctgtctctactaaaaattcaaaaattggctgggtttggtggcatgtgcctgtaatgccagctacttgggaggctgaggcaggagaatcacttgaacccaagaggtggaggttgcagtaaaccgagatcacaccactgcactcaggtctgggcaacagagtgaggccctttctcaaaaaataaataagtaaataaataaataaataaataaataaataaataaatgttttaaacatgtagactttattttgcatggggctcagctctgactctattggcttctacatagatgacctgttagtctaccatttcctaaagactctgtccttctttaatgtacttaaatttgagctattttaaaacttttttttttgttttttacccagcactatgggatgccaaggtgggtggatcacgaggtcaggagatcaagaccatcctggctaacactgtgaaaccccatctctactaaaaaaaatacaaaaaattagccgggcgtggtggcgggcgcctgtagtgccagctactcgggagactgaggcaggagaatggcatgaacccaggaggtggagcttgcagcgagccgagatcatgccactgcaccccagcctgggcgacagagcgagactctgtctcaaaaaaaaaatgacttttttttaaaaaatagagatgatgtcttgtggttttgcccaggctggtcttgaattcctggcctcaaatgaccctactgcctcggcctcccaaagtgttgggattacaggtgtgagctgctgcacccggccaattgatcaatttttatatacaagtttttcttcttttggcagtccgcaaaaattcagaaagctactataagaaaatgacaatcaaccatctgtgtacaaaaagaattagccacttaacacaactggtcctttttccattgtaaaaatccataggaaattggatttgtaattatgtttcggctttccatggaaaccacagagcagccggtcatctatatattcagcaaatccttcaaattgcagaggtgttttttttttttttgagacagagtctcactctgttgcctatgctggaatgcagtggcatgatcttgctcaccacaacctctgcctaccagggtcaagtgattctcgtgcctcagcctcctagtagctgggactacaggcatgcaccaccatacccggctaatttttgtatttttagtagagatggggtttcactatattggccaggctggtcttgaactcctgacctcgagatccacccacctcagcctccccaagtgctgggattacaagtgtgagccaccatacccagcctgcagagatttttttttagggatgggaagatcacagaaatgcatcaaagcacatattgtccaaataagaagaagtgaaaaggtaaaaatataggctatcccataaaatttcaagaataagctgtgcttttgtgcttcaggctattttgatagcaagcattctcaacactacatattttttagtttttttgagacggagtcttgctctgtcgcccaggctggagtgcagtggcacgatctcagctcactgcaacctctgcctcctgggttcaagcgattctcccacctcagtgatagcgatagaaaaattggattacaaaatgcttggaacaaaggagaagaatgacacatttcttctgtgcagttgcattaaatataaagaaacatacatttatctccctagttaatttataaaagttggtaaaatggctgggcatggtggctcatgcctgtaatcccttagtagctgggattgcaagtgcctgccaccacacccagctaatttttgtgtttttagcagaggcggtgtttcaacatgttggccaggctggtctcaaactcctgacctcaagtgatctgcatctcttggcctccaaaattgctgggattatagctatgagccaccgcaccagaccccagtgttgactttttagagacatatctatgaaggcatttgcagctttgtaatggtttgaacttggacttttggccaccgtattagtggcacctcagtggtgactaatgcagattttaaaatttagggtccctgaggaagatgatgggaaacaaaacctttcacctggctctccctgctgtggcatgctaatatggatgagtaggtcttgcagtgcagataatgatttttacaaattcatcgtggaaagtgacagaattctttcgagtggggagagaccttaagcaaggggaggtaagcagacctttttcaaatgtgccaggtgatgccaggtgccttgcaggtcctgtgccaggcactggcatgacattctttgtttctgaaacagaatctccctctgttgcccaggctggagtgcagtggcgctatctgggctcactgcaacatccacctcccgggttcaagtgattctcctgcctcagcctcctgagtagctggaattacaggcacccgccaccacatttggcagatttttgtatttttaatagagacggggtttcaccatactggccaggctggtctcgaactcaagacctcaagtgatccacccacctcagcctcccaaaatgctgggattacgggcgaggtatggcattctttcatttcacttatgaaaatactaaggcccgagtatttaaacctcctgccctgctggaggttacataattcatggagtggggaatcaaacccaggtctttacaatgttgccacccagcttcttcccatcactactcatgctttgctgggtgccctggatgcagccgtgcctgaaggccactccacaaacaggccctgctgggagacagtatcagagatccaggactctgggaagtagaactgggcaagaaagtgcaaggggctgacaaatgggctggctctccatcctgcctggcatctggtctgatcctgttgtagtactagtgaggtgggtgctgtggccgagggaggggctttgtggggccacacctggggacagatgggaccagagtcagggtctctgaactgtgtgcatcatccactgtccctgacttttcactagagatgtctacaaacatcacagagcagcagtctaggaacaggggctccctgccagtgctgctgtgagcccttggagaattctgcacttccaaaatctcttatctgatggccttgggaagctatctcaagatgccacagctggccggatgtggtggctcatgcctgtaatcccagcacttctggaggctgaggcgggcggatcacctgaggtcaggagttcaagaccagcttggccaacatgacagtatttttactgtctctagtaaaaatacaaaaattagcctggtatggtggcatgcacctcccacccacctgggaggttgagatgggaggattgcttgagccgggcagtgcaggttgcagtgagtggagattgcgccactgccttccagcctgggtgacagagcaagaccctgtctcaaaattaaataagtaaaattagaaaaaaaaaataaacaactggtatacttggttgtagctgcagggattatcagttaccctctgtccataacccttaagtgaaagccttgtctaggggccactgatcttggtggacctggcaggggagcagtacactccaggtgtcttagtagggccattcctaaagtcctaaagatggcattgggcagtacaagggacttctgcacagcacacacacaccaggtctgcatcttctctgcaggacgtgcagcgttttatgctgtagccccagagatttcagtctctgcttttacgaaggcatcccctggagattatgtgagtacttcaacaagtgcaaccaatttccctccatatccaaagtgtgggttgtggagaattcacgtgtgcagcactccctggtttcctgggggaagttgccactgatggtgtatttattttccttgggaaagccaagaagaatgaaccccaaactcaccgactcaccagacacaatgtccgccacaggtgggacatcagtgctggggcttacctgggatgtcaatcaatcttttgtagacattcaagaaagctgcttcagcttccttgcttcttttaataacgtgtcaatctgaaagggaaggaaagaaaggaaagaaagaaaagaaaacaaagagctcaatatttgtcaagaggtaatttacaaagcattacacatctagtgaagtcccgcagcaaggggaagtctgattcctccgcgtagatgcttgacaactgggcttcaacctcttagaggaaatgcctgcaaaccacaaaaaggcccctttcatgaaggtaaaagaggcaggagcagagatttgggaatatggagccattcactatacagcagggaacactgggtgggtcttccatagagaatggtctggcgtgcgtgcccttcgtggtctttttctttctgcaagtactaagagctggccatgtgctagacactgctggggggccgggggtgggcggaagagacagttcctacccccaggagctcagggtctagtagggaaacaggtacgtaattaagaagtaattaaatccctggggacatggagaagggaacctcaggcaggaaaatcgtgaccttggagcagagtcttaaaaagtatttcaccccagtggatgggtaagacaccgcatgtaaatggaagaacatactcaaacgcccggagcaaagaatttcataaaattccttttttttttttttaagacagttttgcactgtctcccaggctgaggggcagtggcgcgatctcggctccaaactctgcctcccgagttcaagagattctcctgcctcagcctcatgagtagtggaattacaggtgcccaccaccatgcccggctaatttttgtatttttagtataaatgaggtttcattatgttggccaggctggtctcaaactgctgacctcaggtgatccacccgccgcagcctcccaaagtgctgggattacaggcctaaaccactgcgcctgacctatgtgttctcttttgagatactcattcacatgtcagcttgtgctccattcctggagtccagattaagagcccaccaatggggctacaacacaccatgggggataggggacccacgagagtctgccgggtgggaacgtggatacatatgcaggatctgtgggtgacgcagttgggcaagcaaatggggtcagatcgtgaggggcacaagagcaagtggtgcagggtgaccgtcatcacctgggcagcagtcggggagaaaagagcacagggggcggcaaggaggaagagatcactctggagtcattgctctcatccaagggagacatgctgggcagtggctgtgggtgttgaggaggacgagagggcggctggagagatcagtggcacacacagttgatgtgaggcccagaagaacaaggcgaatcgaggacgatgcccaggattccagattaggtaactggtgaggttttgcgatcgtggccaggattggtttgttttgtgaactgactagctgagccagtttcctccagcgtagacgtctattcttcagctgtgccggacgcacatgcaaagagcctgccgtggttggaccgacttattagaatatttagcttacctacacacttgctgagacaacagatcacgctttacagccaaaacacacaagactgcacgtgcaccaatttcatactggctcaggcaaaggacagtaaattatatattccttctgtcccttcctagaactatgctgtctctgatgttattaaagaggcaaaaagatgtggtttaattacagggcctttcagctgagccacctggcagtttgttaagggctgagagaggtcccctgattaaggatgtggggttctcaggactaggggatgagggctagtgggagctgggcctagaaaatcaaatgcatagcagactagtgtaatgcaagcatttccaacttctaacaagctgtgcactaagattccaatttgaaagtcagttgtttggaactcagacacattcgcccccccaccgccccctgccccccgccccccaacctgataagttaaggctgtgattctaggccagttgtggtggctcacacctgtaatcacagcactttgggagggtgagatgggaggatggcttgagctgaggagttcaagaccagcctgggaaaaataatgaggtatctacaaattaaaatttaacaataaaaattttacagaataaaaaataaaaaaattagctgggtggggtggcaatgcacctataataccagctacttgggaggctgaagtgggaggattgcctgagcctaggagttcgaggctgcagtgagctgtattcacacaactgcactccagcctggggaacacagtgagaccctgtctcaaattaaaaaaaaaaaaacaaaacacacacacacacacacacaaaatgttgtgaatttggtgttgagtagagtttcagaacactctacaaggactgttttttgagatagaggcttgctttgttgcctaggttggagtgcagtggcacagtctcagctcactgcagcctctgcctcctgggttcaagcaattctcctgcctcagcttcccaagtggctgagactataggagtgcgccaccatgcccagctaattatttgttttgtatttttagtggagatagggtttcatcatgttggccaggctagtctggtcttgaactcctgacctcaggtgatccacccgcctcagcctgccaaagtgctgggattacaggcatgagccaccatgccttgcctgcaaggactattaatatgacatgaccgccctttgtttttaaaataactccctccccctttattagcaattcatactcattgtgtgatcagaaaaatatcaaatatatagaaaaaaattaaaagtataattacagtgtgccactcacaggcaggaatcagactgtgaggtctgtatttctaagtttgttttcctaattatacaaaaaaatatcattgcggccaggtgcagtggtttatgcctgtaatcccagcactttgggaggccaacgtggacagatcacaaggtcaggagttcgagaccagcctggctaagatggtgaaacctcatctctactaaaaatacaaaaattagttgggtgtggtggcatgcacctgtaatcccagctactcaggaagctgaggcagaatcgcttgaacccgggaggcggaggttgcagtgagctgagataatgccactacactctagcctaggcaacagagtgagactccgtctcaaaaaaaaaaataaatcagtgacatgaaatgcagacacacaagagactgatgtattatacattagagtggtctcgggctgggggtgggcaggaaggaggggctggtagatgccaactgaagggtgtgggatttccttttgggtgatgaaaatgttttacaattgtctggggtgacagctgtacaactttgtgaatatcctaaaagtcaatgaactgcagattttaaatgggtgaattatatggtatgtgaattgtatctcaatcaagctgcttaaaacgggtgtgtgtatgtacatattcgaaatcaacctatacataagattgtgcagtgtgctttctttacctgtcgtatcatgtatctttctcaatatccattacaaattttgggaactgtctaaatggtactgtttcaactgtacctaagcccacatattatagatgtctgcagtaagcaacggatttggagttgcttctccagacgaattggaacactccctggggcccttctaagagaggcaggtgggtagcagagcctgtccagaaagctgggcagatgccctggctgctgtccgtactgattgacagccacacagaggcttctcttcctggcttaggatctgcctagggagggcccttcacttcccaggtattccgactgagggtactaggtggctgcatctcctggaggcaagggctgggatctggaaggatcctgaactctgtcctcctgtcaactatgttattcccagggatgtggggtttggtaatttacatggcacacttcggggctgtaacaggttgaattgtgtctcccgaaagatgatgaagtcctgaccctcaatacctgtgaagatgaccttatttggaactagggtctctgtaggtgatcaagataaggcaaggtcattagcctgggccctcgtccaataggatccgataagaaggagaaacgtggacacagagacagacacatagacaggatgtcacagggagacaaaggaaaggctgggctgatgatctacaagacaaagatgaccaggaaaccaccagaagctgggacagggacacagtagattctcccctacagccagcagaaggaaccagccccgtggacatcggtgttttaaaaccactctgctgagctgggcatggtagctcacacctgtaatcccagcactttgggaggccgaggtgggtggatcacctgaggtcaggagatctagaccagactggcctacatggtgaaatgctgtctccaccaaaaatacaaaaattagccaggcgtggtggtgggagcctgtaatactagctacttgggaggctgaggcaggagaattgcttgaacccaggaggcagaggttgcactgagctgagatcatgccgctgcattccagcctggcgacagagcaagactccatcccccacacacaaaaaaattaattaattaattaaaaaaaaccactccaagcatgtcgttttgtctaaactagcataaaaaccaaaaaccctagtgttcctccacccattggagctgtatcacagggaccacgactttcagacctctccccatgccctcttccactaacacagggaaattccagcccagtcctgaggaacatggtcaggtcgatgggtttaattaattcagtatgcaaatgggccatgaggtttcttaaaagagatgacttaaaagatccttttctaaatgatgaagtcccctcagccccacagacaagaatgggccccaaggctgggcgcagtggctcatgcttgtaatcccaacaatttaggaaacggaggcaggaattcaagaccagcctgggcagcagagtgagactctatctctaccaaaaataaaaattagttggccgggcgcggtggctcaagcctgtaatcccagcactttgggaagccgaggcgggtggatcacgaggtcaggagatcgagaccatcctggctaacacggtgaaaccccatctttactaaaaatacaaaaaaattagccaggcgtggtggcaagcgcctgtagtcctagctattcaggaggctgaggcaggagaatggcatgaacccgggaggcagagcttgcagtgagccgagatcgcgccactgcactccagcctgggcgacagagcgagactccgtctcaaaaaacaaaaacaaaaattagccaggcatggtggtgtgcacctgtaatcccagcactttgggaaactgaggtgggaggaggacttgagcccaggaattgaagaccagcttgggcagcatagcgagaccctatctctacaaaaaaatacaaattagccagccacagcggtgcacacctgtagtcccagctactcggaggctgaggtgggaggggctcaaggctgaagtgaactatgattgagccactgcactccagcctggaagaccaaacgagactgtggtttttttaaaaaaacaaaacaaaacaaaacaaaaaaaacagaatgaccctggaggtggagttcagtccatcctccctctgcagctcacccagtctgtggtgggctttcccttcctgtgacttcactgctgcagcctagttccgtgttccgtgctttgcttacttggaacacccttggctggcctctccactcaaaacctatctattctgcaagacccgatgcacacaccacttcccccagacctcgagctgggttcctgggctgttctgagtctgaagggagggagggagccaggcctttgaatgccagccccacctcatctgcatgaggaggagacagcagccacctcctggggctggacgagtcgctgacctacgctggcgagggccccagtaccagatacaacacagtgactctgccacacagaacagcttccctccaggtgtccacacggctactggccaggaagagcacccgtgggagggagggaggaagggacagtgttgtgctcatcttcatggcccgcacccacccacctccctgcagggagcccagcccgtccactgcatgccttggaggtgcaagccaaggcttggtaacacagctccctctgagaaggggagggatctgcgaatgagcaagtgtctagggcgaggtcttaatgcaaggattgctgaagagaggatcccaggctagggttccggctccctcatgcctgcgtgcacgttagcttgaggtaggtaccatgcccttaaaaccatttagggccgggcacagttgttcatgcctgtaatcccagcacttcgggaggccaaggtgggaggattgcttgagcccaggagttcaagaccaacctgggcagcatagcaaaaccccatttcacaccgctctcacacagacacaaaaccatttagaagaagctaaactgggacggatctagaaacgtcagacactggcctgtggccctgggtaaaacctgtcctgctctgagggatagcctatttttcaggctcacctcctgccacacccagtcactcccagttcccggaacacatgagcaatttcccctctgcctgtaaggcgcctcccaggaatgctaccctgatcccagggctcagagcagatccatctcccagtcgtggccactcccaacacaatgtgggactgtcctggagttctaggatgacagataaggctgcctgactcagggatcctgaattcctggaaaactaagctgtagcatcaaccgcctttcctcctgaccatgggcacacagtgggtgtttaatatgcttttaatattttcctcaatggccaactgcatggtttgcagatgtgacccaagggttcaggaatccaggtttaaatctttatgaaaatgctcaatatgtaaagagttcttgactgggtgtggtggctcacgcctgtaatcccagcactttgggaggccaaggtgggtggatcacttgaggtcaggagttcaagaccagtctggccaacatggtgaaccctcgtctctactaaaaatacaaaaattagccgggtggggtggcaggcacctgtaataccagcttctcagaaggctgaggcatgagaatcgcttgaacctgggaggtggaggttgcagtgaaccgagatcacaccactgcactccagcctgggcaacagagtgagactccgtctcaaaaaatatataaataaataaataaatagaaaatgcttaacatgtaaagagttctctgtgtagtaagcattgttttgtgtgctgtgagacaatgacagccatttggctggcagtagctcctgggaggtgtgtttctccactgtacacacacaatggtgctctccagccgttttcctgcagtgacccacacatccacactaatgactgctgctggattccatggttatcttttcagcaacatcaatttcataaggttgagtttttctttttaaatgtaataagtgttacatttaaagacaaatgtgtaggcacagtggctcacacctataatcccaacactttgggagaccaaggcaggatcacttgaggcaaggagttcgagaccagcctggccttcgtggcaaaaccctgtctctactaaaaatacaaaaattagccaggcgaggtggcccttgcctgtgatcccagctacttgggaggctgaggcaggagaatcacttgaacccaggaggcaaaggttgcagtaagccgagattgtgccactgcaccccagcctgagcgagagtaacatacagtaaaaataaagactaaacaaccaatatcttgagagctgagggatttttgtgtgtttgttttgaagcttgtttatttttgacaggagtgggaagaggggaagatcatataagtaaaaagggcactaagtttgaaatcagaagactggattaaggcatggctctatcatgcattttggctcaggctgggagtggtggctcacacccgcaatcccggcactttgggaaactgaggcaggaggactgcttgaggccaacagtttgagaccagcctgggcaacatagagagaacacttcattttttgtggatgaatatctttttttttttttttttttttttttggagacggagtctaattttgttgcccaggctggagtgtagtggcgtgatcccagctcacttcaacctccgcctcctgggttcacgtgatcctcctgcctcagcttcctgagtagctgggattacaggggctcatcaccatgaccagctaatttttgcatgttggccaggctggcctcaaactcctgacctcaggtgatcctcccacctcagcctcccaaagtgcagggagccacctcttccaaagagctgggagctcacatgcgtgagccattgtgcttggccaacctcttgtaagctttcaataggattgtgtgcaaatgcctataattaggtctagcactcaatgggcacagaacatgctatgactgttccaaggcatactgcacgcacagtgtcaagtccaaaacctcactagagcatggtctattcaccaccactgttgctcaccaagctcacggtaaaaaggataatagtaatttgtgcactgggctgcagcaggctttggggacctgcgtgggggtggggggtgcaccaggagactagctgtccagtgggtgcctccccatgtgctgcacaacagggtacctggcatgccaggtgggaggcacagagggagacaaggatgtggactgcacaagggccccagatcaccaaggtgtgaatcggaaagactggacttcagatcatctgtgggggtggtaaccgaggcttaagaagtgctgtgtattttttgtttctgagatggattttcactcttgtcatccaggctgaagtgcagtggcatgatctcagctcactgcagcctccgcctcccaggttcaagcaattctcatgcctcagcctcctgagtagctgagattacaggcacatgctagcacatccgcctaatttttggatttttagtagagacagggtttcgccatgttgctgaggctggtcttgaactcctgacctcaagtgatctgccggccttggcctaccgaagcgctgggattacaggcgtaagccactgcacctggccaagaagtgctgtgtattttgaaataagaaaggctcatctctccagtgtaccatgcccatgtggtaggcaagtccatgccacacacagccaagagcctgggtatgtttttggcagaccagggtttgatttccagctccagcataaaacaggtactctgcctgggccgttcaatcaacctctctgggcctcagttttttcatctgcaaagtggggcgatacatcttggttgctgtcaagatcaaagccgtggtgaccgttggaaaacagcgaaggagtcgctgcctcaccagctccacttctcagacgcagaaacccatcaagccacttggaacctggcccctggcccttcctagtgatatgataaaatccagcattgtgcactggggctgggggccacatggttgatggaaagaatatgtgctttgatggaaagacagacttatgtttgaatcttagttccagcacacactggctgggtgactgggaggcaggttatttaaatactgaagcatttggctgggcacagtggctaacacctgtaaataccagtactttgggaggccaaggcagacagatcacctgaggtcaggagttcgagaccagcctggtcaacatggtgaaattctgtctctactgaaaatacaaacattagccaggcatggtggcacatgcctgtaattccagctacttcagagggttaggcaggagaatggtgtgaacccaggaggcggaggttgcagtgagctgagatcacaccactgcactccagcctgggtgacagagcaagactctgtcacaaaaaaaaaaaaaaatatatatatatatatatatatatatatatatatatactgaagccttggtctcttcgtctattaagtgagggtagtaactccctccttgttaagctgttgtgattataaacatgagaacctcctacatcaagtatctgacacagtctggatagaaaccaaatcaacatcacaaaccttcactaataaatccaaagtcagcacctttctttccaccacaccataggttattctctgtcgtgatcaaaccaagcaggaagccaagatgtggaaagtcctggaggaccaggacacttaagcaacatttaagatgctgctggctcttctttacatgagagatctcccccagccccccattcttccttctgtgcctggacctgcccggggtcagtgctgcccaggcaggaagcggaagcccaggtcaagacccacgtgggcctggctcgtttctctcctggggggcgttctgcaaccctctgcctggtgctgaggtcgaccagatgccccggagcttccagactcccatctgggaggtcctggttcctgtcgctggccggtagattttgtggtgtggctgagcgaaagtgggtgcagaattgtgtcggcacactgatgtcgcgtggtttatagagccaagggccccgcagagaagacgtgctcagagccctgcccaccctcacggggtggcccaccatggccctgacccaccctgcctcacactgggcagtggctcatggccatacgaagaaaaatcccacagcctgcccaccccaaggccctccctcccagcctcgtgaccctaatcgcggcttccagcacctcaaacatgaccactagctcacagcaggccccgcccaggaacacccgtccccaggctgcactcccggccctgtcctgcagacctccgcgtcaaaggcccccaacgggacaggggtcctctaactgccccccacctctgcgcgccctctgttccattcctttttgccccctgcctgaatcacgcacaatcttgttgcatccatcctcttcccaccctgcgcccgtgtgtcattgtggccctactgcgtcctcagagcaggagggtgcagcgacacggcaggcactgggtaaatgccccatggtgggggtgtgtgagcggcgtcggggtgcggccgctgtgaggggcagctcctcttgtggctggggcggagctgaggacactcggagttggggtgggagagacgggactcaggacttagagggagcggaagggggcggggctgggaagggaggtagggcggggagctgggggagcgggtgggacggggctgtgtggggccaagctgagtcggggggtgggatgcagctgggcgtggctgagtgggggcggagctgagtggggggcgggatgcagctggaccactcattgtaggaattgctggaaggggctggtggagcaggtctggttgtgggagttgggtggtggcagtgggcagggccggcggtgatggaggagcctgtgggttggggcagggccggtggtggagggcggggccggcggggaggggtctgtgtgtgggcggggctggggcggggcggagcggggctggggcggggcggagcggggctggggcggggcagggcggtgcagggagctgggcggattaggcccccggcccactgtgcacgctccccaggcactgcgggcgtgatgatctctctgagccgcatcctcacggagctactgctgcccgacgagcgcgccagcatgctcatcttcttcctggtgtcggtggcgctggagctgctgtgcttcctgctgcacctgttagtgcggtgcagtggcttcgtgctcttctataccacacggccgcgcgacagccgccggggcaggccaggcctgggcaggggctctggctaccgcgtgcaccacgacgtcgtcgccggggacgtccacttcgtaagtgcgcaccgcccacctccgttccctcctctgtccccaccgcgacgtagggaagtacctggggcccagcccctgccctgcatcccaggctgcggcctcctgctgtggtggagaatccttcccgccagcaccctttattctgtcgactcaggtgtgggttcttagtggcaccccacgtctcgtggcctaaggccccactccacccgcatctgtggtccggagatctgcccagctgctgtgtcccacggtgtggggcgtgcatggtccctgtccgcagtgacaccccacatgatgtacactaaagtttccatccctgggacagcccacgttcgttctgagggtctcagccctcctggctgcgccaacccacgttggagagtcctcctgcaggctcagcctggcagcaaactctctaggaagctcacactcttcctccctagagacgggacgccaggagggaagtcagggctcagggataaccctgggttccctgagggggtgtggcggggcccccagaatttcccacagaagtcaccagccaggaaagggagtggtctcccaggtggggatagacaggcggagagggagggccaggggcttggttctgtggcccctggctctgctgggcttccctgtcacagcacagaggcactgcccctacggggtccccagcacagacagcccctgccaggaggtgccctatcccaccatccctgggcaggcagctgtccttggggggctggggtgccctctggtggcagcagcactgcacagacccccagggtcagggccggcagctgtacaggcctggggacacctgcagggtgaggtcaggagtgccaggccatgcagaggcgggtcgagggagccattggtcctcattcctgagggtccagaaccagaacggtcttgatgcaggtcttgatccagtgagtcacctgggcacttggctggggacactgaagtgagccagaaacacatccccaggggagcccccagacccagagaggggcccaggatggaaggggacaagccaggggaggggtgtgtccctctcatggtcagggaggttccctgaaggacttttgggctaagacctgacccacaggaagggtgttggggcacagggaaaagtgtgtgcagtggctcagaggttgggaggagctccgttgggtttagaggaggggagaagcaaaggggtcatgggggactagatgctcttgttggtttggtcagaagctggtagagggttcacgggagtgatgagatggaatttgctgcatcagaagtgtgagagacagccaggctcattggctcacagctgcaatactagctatacaggaggccaagttgggaggatcgcttgagccaaagagtttgagatcagcctgggcaacatagcaagaccctgtgtctacaaaaaagaaaacagcaaaaataattggcctgggtgatggcacatggctgtagtccccactacttgggaggctgaggtgggaggattgcctgagcccagaaagttgaggctgcagtgagctgtgactgcaccactgcactccagcctgggcaacagagcaagaccctctctctaaaacaaaaaagaaatgtgaagtgagagaccttgataaattgggggaggggtgtctgcacatagtaggcaccacctgaatgtcagcaccagccccagtgtggctcttcttctgattgggcctgaattcctggcccgtgtctcctgtcctcccctccactccaaccccatcccactccatcctccctccaggagcacccagccccggccctggcccccaacgggtccccaaaggacagcccagcccatgaggtgaccggcagcggcggggcctacatgtgctttgacgtactgtggccaagggtccagcgcagctggcccaccttcagaggtgagtgcgggaggtccctctgcagccctggggctggcacccaggcagggggtgagggggtgggggaggcaggcaggggtccccgtgggcgctgcctctgacccccacccgccaccgcccagccgtgttactgcaccgctacgtggtggcaggggtgatctgggccgacatgctctccatcgccgtgacctacttcatcacgctgtgcctgttccccgaccttgagtctgagatctgccactgcatcctgggcgagtggctgcccatcctcatcatggctgtgttcaacctgtcagacttcgtgggcaaggtgggctgcctgccctgcccggtgtcgggggacaccatggggtgggggtgacggggaggccctggcccatccgggaagggttctgagtgaaggatgcatgtggctcccaggtggaaagggcaagagccatgcagtggcaccatcctggacagtgtcctctggaggacagctccggcctgatctcactggggcgctccggagtgtcagctgtatctcagaggacaggcgtggccctcaccctctcgcctcatggtcacagatcccccggggatgagcacaggaggatgccccagaggggacccagagagggcagggacacttagaaatggctcaaagaaatggccaggttcagtggcttatgcctgtaatcccagcagtttgggaggccagagatgggtagatcacttgaggccaggagttcgagaccaaccttgccaacatggtgaaaccccgtgtctactgaaaatacaaaaattaatggaagtggtggagtgtgcctgtagtcccagctactcaggaagctgaggcaggagaatcgcttgaacccaggaggtggagggtgcagtgagccgagatcgtgccactgcactccagcctgggtgacagcacgagactctgtctcaaaaaacaagcaagcaaacaaaaaaaaatcactcagccgtggtggtgcgtgcctatggtcccagctactcgggaggctgaggtgggaggatggcttgagcccaggagtttgaggctgcagtgagccaccatcgtgtcactgcactcgagcttgggggttagaccgataccctgactctaagggaaaaaaatgtaagtggaatttggggggttttagaggggcgatccggagaagggcaggggtgcaggctgagctggacaggcccaggagtgtttaaggatggggatgtggctggaggctgtcgggggtatgaggggagtggggctgtggccaggacagggcggccacgtgcctggctctctgcagatcctggtagccctgcccgtgtactggcggggcacccacctgctggcctgctcctgcctgcgtgtggtcttcatccccctcttcaccctgtgcgtctaccccagcggcatgcccgccctccgccaccccgcctggccctgcattttctcactgctcatgggcatcagcaacggctccttcggcagcgtgcccatgatcctggcagcaggcaaagtgagccccaagcagcgggagccggcaggtgaggaccgcgggacatgggggtgggggcgtcctcccagcagcgcaatgcccaccttgcgaggaaacccaggccagaccacaagaaggtgcatttgggttccgggtgttcagaacagtcaatgtctgggaggccataggtgtggggacattctcagccactttattcactcatttattcgttcgttcatcccacaactacttggtgagcccctcctgtggaccaagtgcttttcaaggcactggggacatagtggcgacaaaacggcgctccatgtgctgtgggactgactgtccagatgtggaggcagcccaggccgggcacagtggctcgtacctgcaatcccagcactttggaagggcaaagtgggtggatcacttgagcccaggagttaaagaccatcctgggcaacacagtgagagcctctcctctctacaaaaatgtttaaaaaattagctggatatggtagcgtgtgcctatggtcccagctactcgggaggctgagatgggaggatcacttgagcccaggagtttgaggttgcagctgtgatcacgccactgcactccagcctgggtgacagagcaagatcctgtctgaaaaaaaaaaaaaaagatcccagatcggcgtgactggttgaatggcagtaagtcctatggggaaaaataaagcagagaaacaggagtgatgggatgggagagtcaggctcaggagccagcagtgtaaaaggagcaatctgggaagacctcactgaggaggtgacttttgagcaaagacctggaggaggtagcaagagagatagccatgtgaggatgcaagggaaaggcatccaggaagagggaacagcatgtgcaaagatcctgcggcactgaggccaggggacagagcagaagaggaacggggtttgatggttgataaagcatccccccagctgccgtgggcatggaggtgagtgaggagctacttcaccagtccaagcccttgagaatggggctcaaacctggaggaggttgacgtggcactgggaggtgccagattccaggtcttgtttggacagcagcccaaaggaccggctgatgggttgagaggtagggtgtgagagagggaagggggctccaggtttggggtccactgctcaaggcaagaaggctggcactggcacagactgagatgggaaggggcctcgcagggaggggttggggttgggtttgggacttggtacattcaaggtgcccatcggacatcccaaattgtccctgatagggaggaagctgtaggtcggagagtggagtttttttttctttttagatggagtcttgctctgttccccaggctggagtgcagtggcatgatctcagctcactgcaacctctgcctcgcaggttcaagcaattctcatgcctcagccttctgagtagctgggattatggatgcccaccaccatacctggctaatttttgtatttttagtagaggtgagatttcaccatcttggccaggctggtctcgaactcctaacctcaggtgatctgcctgcctcagcctgccaaagtgctgggattacaggtgtgagccaccacacctggctgagactggagattaaaacggggagggttggggccaggcgcactggctcaggacggtgttttgggaggccaaggtaggactattgcttgggaccagcctgggcagtatagcgagaccgagtctctacaaaaaatttttttacattagccaggcgtggtggtgcatgcctgtggtcccaggtactcgggaggctgaggtgggaggatcgcgtgagcccaggaggtcaaggctgcaggaagctatggttgtaccactgcactctggtctgggcaacagagcaagaccttgtctttaaattttaaaaatgggggcttgggggactcagagaagcaggcaaggcctggagtgcatagcagatggcctcgggaagaagcaacgaggaaggacaggatctggagagggtgctcccaggaggagcgatggggcagcgggtcctggaggggtggcacggttcatgcaggtgtcaccgcacctcacacccgagcagccgtggccaccaggtggccgccctggccctgctcccctcaggccagtgttgtccacagggaacaccatgactgtgtcctacatgtcagggctgacactggggtccgccgtggcctactgcagctacagcctcacccgcaacgcccacggcagctgcctgcacgcctccaccgccaatggctccatcctcacaggcctctgagccagccccgcccactgccagggacgccgagggcctgaccaggggccccgaggcctgagggcccctcccccatccccacctcagtgcctgcggggccctgagcctccccctgtgccagcagcaccactccctcagggtccagccatcccccaccctggactgaagttctgcaaagtcctttgaggaccagaacacgtttc

SEQ ID NO: 1652 - protein, 731 aa, Homo sapiens [sequence omitted]

SEQ ID NO: 1653 - DNA, 1270 bp, Homo sapiens
  source
  (1)..(1270)
  CDS (201)..(1070)
atgccctatctaaggcagtagctgctgtttgtttttattttattattacctcatgagaagatcccatgaggatcctgccagattttctgaatattcaaaagaaaatctttacatcatggattttatgtttggggaaggaagagataaagatagagagataaacagacaattatctttttttttttttttttttttttgagatggagtctcactctgtggcccaggttggagcgttggagtgcagtggcatgatcttggctcactggaaccttcgcctccgctggctgtctgtcgtgttgctcgtgtcctctggtccctctccctgttcgctggtcgtattatctggctcctcttactcactttcgctcctgtctctctttcgtcttcttgtcctatctacttgggttttgttttcttttttgtgctgtcttgttcttgtgcgcgtggctgtgcgccttgcttttgcgcgcgtctggatctcgccggctcgctcgtctgctctgccgctctgcctgtggtgctcctgcgtgcgtcgtgggtgctgttttgtctcgccggcgcgcgccgtatctcgtcggcgtctccgcgtggtgcttactttctgttccgcctcttgttctggtctgctgcttccgtgtcttgtcttactgtattgtggttgtgtctcttatgtcactttgcttcgtggcccgtcccgtctcttgcctgtcgtccgctgctctctgcttctgtctgcccctgtgggtattgtttctttttgtcagtctcgtcccctgtctgctgtgttcggcgcgctctggccgtcgctttcttgttcgctatctgtcctgtggtctgctgcgtgtgtgcctctctgctgttcgtctcgcggtgttctgtctttgggtctgtctgtttgcttcctgcgtctcgtcccttctgctgctggtgtgtgggctgtgtgctggtcgctcttgtcgtcgttcggccgctgccgtggtgcctcggtgctgtgttgcgccgcgcgcctgttctgggtgcgcttgttggcgcgcgtgatgtctgctgccgtgcggcttcctgggggctgagttccttcgctgcgctgtcgcgtggcggtgtcgtgcgcgtgtcctctgtgctgggtgtgggtgtctggtctggccgggtgacggctccttctcgtcctggctcgcctcacgttctctgttctctctctcggtcctggttcttctctgcttttgtgtgtgagttcctcttctctagtgtctctgtttcttgtctgcgttgc

SEQ ID NO: 1654 - protein, 289 aa, Homo sapiens
MESHSVAQVGALECSGMILAHWNLRLRWLSVVLLVSSGPSPCSLVVLSGSSYSLSLLSLFRLLVLSTWVLFSFLCCLVLVRVAVRLAFARVWISPARSSALPLCLWCSCVRRGCCFVSPARAVSRRRLRVVLTFCSASCSGLLLPCLVLLYCGCVSYVTLLRGPSRLLPVVRCSLLLSAPVGIVSFCQSRPLSAVFGALWPSLSCSLSVLWSAACVPLCCSSRGVLSLGLSVCFLRLVPSAAGVWAVCWSLLSSFGRCRGASVLCCAARLFWVRLLARVMSAAVRLPGG

SEQ ID NO: 1655 - DNA, 1543 bp, Homo sapiens
  source
  (1)..(1543)
  CDS (201)..(1343)
  modified_base (681)..(780): a, t, c, g, unknown or other
gtatgtgcacatgtcatggtgtgtgcatgtgtctctgtgtgtgtgcatgtgttttggtgtgtgtgcacgtgcctctttgtgcctatctctgtgcgtgtacacatgtttgtgtgtgcatgtgtctctgtgtgtgcatgtttcttggtgtgtgtacacgtgtctgtgtgtgtgcataactctgtacacgtgtctgtgtgtgcatgtgtctctgtgagtacatgcgtctgtgtatgtgtctctgtgtgtgtatacatgtctgtgtgtgtgcatgtgtctgtgtatacacgtatctgtgtgtgcatgtgtctatgtgtacacgtgtcttggtgtgtgttcatgtgtctctgtgtgcatgtatcttggtgtgtgtgaatgtgtctgtgtgtgcatgtgttttggtgtgtgtgcacgtgtctctgtgtgttcctatctctgtgtgtgtacactgtgtgtgtacacatgtctgtgtgtgcacgtgtctctgtgtgcatgtgtctgtgtacacatgtcttggtgtgtgtgcctgggtctctctgtgtgtgcatgtgttttggtgggggtgcacgttgtctttttgtatggggccggggtgtccacgtgtctgggggaggcatgtgtccggtggtggtgggcgggtcttcctcgcggggccttgtgccgtcgggattgtggtttggggcnnnnnnnnnnnnnnnnnnnnnnnnnnnnnnnnnnnnnnnnnnnnnnnnnnnnnnnnnnnnnnnnnnnnnnnnnnnnnnnnnnnnnnnnnnnnnnnnnnnngcctatctctgtgggtgtacacgtgtctgtgtgtgcatgtttcttggtgtgtgtacatgtatctctgtgtgtacatgtgtcttggtgtatgtgcacatgtcatggtgtgtgcacgtgtctctgtgtgtgtgcatgtgttttggtgtgtgtgcacgtgcctctttgtatgtgcctatctctgtgggtgtacacgtgtttgtgtgtgcatgtgtctctgtgtgtgcatgtttcttggtgtgtgtacacgtgtctgtgtgtgcatgtttcttggtgtgtgtacacgtatctctgtgtgtacatgtgtcttggtgtatgtgcacatgtcatggtgtgtgtgcatgtgttttggtgtgtgtgcatgtgcctctttgtatgtgcctatctctgtgggtgtacacgtgtctgtgtgtgcatgtgtctctgtgtgtgcatgtttcttggtgtgtgtacacgtgtctgtgtgtgcatccgtctctgtgtgtgtgcacgggtatctgtgtgtgcagcattggcctctcggatgggcaccagaggccctggtccagctcaggcacccaaagtaacagcagtcttgagcccagctgtgactttcgtgacaacccatttggagggacacccactgctgggtgcttgctctagcacccggagggctcgacgaagcgacagactgaagctctccgtctgtcggcagctgtatttttcgcactgccttgaaaggtgggcgttgcttaaataactcagcctggtactgtgaaatggattt

SEQ ID NO: 1656 - protein, 380 aa, Homo sapiens
  MOD_RES (161)..(194): Variable amino acid
MCLCEYMRLCMCLCVCIHVCVCACVCVYTYLCVHVSMCTRVLVCVHVSLCACILVCVNVSVCACVLVCVHVSLCVPISVCVHCVCTHVCVCTCLCVHVSVYTCLGVCAWVSLCVHVFWWGCTLSFCMGPGCPRVWGRHVSGGGGRVFLAGPCAVGIVVWGXXXXXXXXXXXXXXXXXXXXXXXXXXXXXXXXXXLSLWVYTCLCVHVSWCVYMYLCVYMCLGVCAHVMVCARVSVCVHVFWCVCTCLFVCAYLCGCTRVCVCMCLCVCMFLGVCTRVCVCMFLGVCTRISVCTCVLVYVHMSWCVCMCFGVCACASLYVPISVGVHVSVCACVSVCACFLVCVHVSVCASVSVCVHGYLCVQHWPLGWAPEALVQLRHPK

SEQ ID NO: 1657 - DNA, 1252 bp, Homo sapiens
  source
  (1)..(1252)
  CDS (201)..(1052)
ataaactggatgaaaatgtaagctctattagtcccgcccatccaccagagattccccacccataacctactggccacagggaaaaaagcatatgcaccatgatatttttatacacgttgtgttaactactgtaaacacattgtcttctttatatttctttgcaggaagttcagaaaaaagtgtcacgttttaatctgcagatggacataagtggattaattcctggtctagtgtctacattcatacttttgtctattagtgatcactacggacgaaaattccctatgattttgtcttccgttggtgctcttgcaaccagcgtttggctctgtttgctttgctattttgcctttccattccagcttttgattgcatctaccttcattggtgcattttgtggcaattataccacattttggggagcttgctttgcctatatagttgatcagtgtaaagaacacaaacaaaaaacaattcgaatagctatcattgactttctacttggacttgttactggactaacaggactgtcatctggctattttattagagagctaggttttgagtggtcgtttctaattattgctgtgtctcttgctgttaatttgatctatattttattttttctcggagatccagtgaaagagtgttcatctcagaatgttactatgtcatgtagtgaaggcttcaaaaacctattttaccgaacttacatgctttttaagaatgcttctggtaagagacgatttttgctctgtttgttactttttacagtaatcacttatttttttgtggtaattggcattgccccaatttttatcctttatgaattggattcaccactctgctggaatgaagtttttataggttatggatcagctttgggtagtgcctcttttttgactagtttcctaggaatatggcttttttcttattgtatggaagatattcatatggccttcattgggatttttaccacgatgacaggaatggctatgaccgcgtttgccagtacaacactgatgatgtttttaggtgagttccaagtgtagctttagaactaactatgtatttgatattcatataaaatgaatttagtctactgggggagaaactttaatctaaagccctctatttaagccattctagttcaattaaagggtaataactagtttgccaggagtcaataagccaaaagccgaattcactttaaaaatttaatccactgaataaccacaatttcccaaatgtg

SEQ ID NO: 1658 - protein, 283 aa, Homo sapiens [sequence omitted]

SEQ ID NO: 1659 - DNA, 1252 bp, Homo sapiens; identical to SEQ ID NO: 1657
  source
  (1)..(1252)
  CDS (201)..(1052)

SEQ ID NO: 1660 - protein, 283 aa, Homo sapiens [sequence omitted]

SEQ ID NO: 1661 - DNA, 1129 bp, Homo sapiens
  source
  (1)..(1129)
  CDS (201)..(929)
tccatccatccttccatttgtttttcaggccatatctcagtctgtctctgtcttcagacagtctttccaattctatctgtctctgactgttctctgcctctcaggctgtgttcctccacacgtgcatacctgtgagtctcttcttctctgtctcatatatgtgtcttaatttatttttcaatgtatgtatcttctgatctatgtctttctcctctgtctgcatatatacatgtctgtctctcattctctctactctctctccttactttaggtgtgtctgtttctctggtggatttttctttttcactctggcatttctctctctgtgtgaggagagagagagatatatatatagatatagatatagatatctgtatcttgtctctttcgctatatgtctgaaagagccatatcttgtctctttcactatatgtgtctcttgtctgtatgtacatctctttctctgtatctgtccgcatgcctgtgtctctatcactctcaatgtgtctcttttttttctctgtccctcactatacatctgtctctttcttaccaagtctcttactgcggtatctctctttctctatgagtctctgtgtatgcttctctttctgtgtgcctccaggtgtgtgtcagtgcctctatgtgtttccctcttcaagtatcttccttcctgtgtctctttctctgaggatctccttctctatgtgttttctttctctgaatgtggctctgtacatctctgtcacagtcattctgtctcctctgtctctttgtatgtaggcgtgtttctatttcctggtgtgtctttttttttctccctctctcaatgtcttttctgtgtctcctctgtgtgcatgtgtgtgtccctttctctctgtgtgtatgtctcttttctctgtgtgtctttctttgtatctctttcataatccctgggtctctgtgtgcatgttttgtgtgtgtgtgtgcgcacttgtctacctctgtctaatatattggttagaacaaacacacttcactcagtgccttgaactagaacaacacctggggcttggtattaataccttaaaagtccttaccttttgaccagttctccatttgtatttctgttcttgtttgctctggcaat

SEQ ID NO: 1662 - protein, 242 aa, Homo sapiens [sequence omitted]

SEQ ID NO: 1663 - DNA, 1288 bp, Homo sapiens
  source
  (1)..(1288)
  CDS (201)..(1088)
tgggggcgtcctcgcctcgctgggcttcgtcttctcggctttcgccagcgatctgctgcatctctacctcggcctgggcctcctcgctggtgagggaagtgggatgcccgggtcattcagggtgaaggaggtgacaggagcttgttgggatctggggtagcgaacgaggcgggggcctggtgcggagagccgggctgggaatgctggggcgggcgtccccagtgccggcccccatcccctcctattcattcgcaggctttggttgggccctggtgttcgcccccgccctaggcaccctctcgcgttacttctcccgccgtcgagtcttggcggtggggctggcgctcaccggcaacggggcctcctcgctgctcctggcgcccgccttgcagcttcttctcgatactttcggctggcggggcgctctgctcctcctcggcgcgatcaccctccacctcaccccctgtggcgccctgctgctacccctggtccttcctggagaccccccagccccaccgcgtagtcccctagctgccctcggcctgagtctgttcacacgccgggccttctcaatctttgctctaggcacagccctggttgggggcgggtacttcgttccttacgtgcacttggctccccacgctttagaccggggcctggggggatacggagcagcgctggtggtggccgtggctgcgatgggggatgcgggcgcccggctggtctgcgggtggctggcagaccaaggctgggtgcccctcccgcggctgctggccgtattcggggctctgactgggctggggctgtgggtggtggggctggtgcccgtggtgggcggcgaagagagctgggggggtcccctgctggccgcggctgtggcctatgggctgagcgcggggagttacgccccgctggttttcggtgtactccccgggctggtgggcgtcggaggtgtggtgcaggccacagggctggtgatgatgctgatgagcctcggggggctcctgggccctcccctgtcaggtaaggacctgagctcacagatctgcctacaactatcctctgcccctggggttcgaggcttctaaatgcccttacccatctcctcaggcttcctaagggatgagacaggagacttcaccgcctctttcctcctgtctggttctttgatcctctccggcagcttcatctacatagggttgcccagggcgctgccctcctgtggtccagcctcccctccagccacgcctcccccagagacgggggagctgcttcccgctccccaggc

SEQ ID NO: 1664 - protein, 295 aa, Homo sapiens [sequence omitted]

SEQ ID NO: 1665 - DNA, 1366 bp, Homo sapiens
  source
  (1)..(1366)
  CDS (201)..(1166)
  modified_base (891)..(891): a, t, c, g, unknown or other
tccttccccctctccactggcagattttgaaagctgtgctaagattctctgaggtttagggctccaaaggaagtcctcatccctgtagctcccgggatggcgaggatttggggattgtggaacccagagtgaggaaccgcaccctggtcattgtgcccctacaggaagtggagacccttacctcccactggaccctctacatgaacgtgggcggcttcctggtggggctcttctcgtccaccctgctgggagcttggagcgacagtgtgggccgccgcccgctgctagtgctggcctcgctgggcctgctgctccaggccctagtgtccgtttttgtggtgcagctgcagctccacgtcggctacttcgtgctgggtcgcatcctttgtgccctcctcggcgacttcggtggccttctggctgctagctttgcgtccgtggcagatgtcagctccagtcgcagccgcaccttccggatggccctgctggaagccagcatcggggtggctgggatgctggcaagcctcctcgggggccactggctccgggcccagggttatgccaaccccttctggctggccttggccttgctgatagccatgactctctatgcagctttctgctttggtgagaccttaaaggagccaaagtccacccggctcttcacgttccgtcaccaccgatccattgtccagctctatgtggctcccgccccagagaagtccaggaaacatttagccctctactcactggccatcttcgtggtgatcactgtgcactttggggcccaggacatcttaaccctttatgaactaagcacacccctctgctgggactccaaactaatcggctatggttctgcagctcagcatctcccctacctcaccagcntgctggccctgaagctcctgcagtactgcctggccgatgcctgggtagctgagatcggcctggccttcaacatcctggggatggtggtctttgcctttgccactatcacgcctctcatgttcacaggtaaagtgtgtgggctcagggacagcttgtcccagaggcactgggtaagaactgggggccggccactcactgcccccagatgtggttcattcctgtgtctttggaaacatagttatgcccccagcctgcactggagaacagacaactaagaaatccctcaaaaatgccatctttgatacatggaaaatatagaccttcagtagctaaagtaattaacccactgttatcaaccattaatattgttagtaatatagagcaaaagacaaaagtgtggctcatacactaattgctttaccccttggcctcccaccgcctattcatatgttcttaaacaaagtccatgccatta

SEQ ID NO: 1666 - protein, 321 aa, Homo sapiens
  MOD_RES (231)..(231): Variable amino acid
MNVGGFLVGLFSSTLLGAWSDSVGRRPLLVLASLGLLLQALVSVFVVQLQLHVGYFVLGRILCALLGDFGGLLAASFASVADVSSSRSRTFRMALLEASIGVAGMLASLLGGHWLRAQGYANPFWLALALLIAMTLYAAFCFGETLKEPKSTRLFTFRHHRSIVQLYVAPAPEKSRKHLALYSLAIFVVITVHFGAQDILTLYELSTPLCWDSKLIGYGSAAQHLPYLTSXLALKLLQYCLADAWVAEIGLAFNILGMVVFAFATITPLMFTGKVCGLRDSLSQRHWVRTGGRPLTAPRCGSFLCLWKHSYAPSLHWRTDN

SEQ ID NO: 1667 - DNA, 1243 bp, Homo sapiens
  source
  (1)..(1243)
  CDS (201)..(1043)
tcctgctgtgcccaaatgcatcttgggtcccactgtgcgaggacgagagtagggcacgggcagcccgtgagtggggcaggtgagagatagaccctgaagtcccactgcccagcaagcccctgctgtcatgaggccgcagctctgctggggctggccggctgggctgtgggcgtgaacatgtgagtaaatgtccttagggaatgggttgcgtgtcttcactgttccacacagagcatttcgtctttttgtgcatttctacgtgtgcattcctggtgtgtatttgcacatctgccatctgtgtgtgttctggagtgtgtctgtacacgtatgttcctggtgtattgttcatgcatattcctggagtgtgtctgtgtatgtgtgttcccggtgtgtatttgcacatgcatgcatattcctggagtgtgtctgtgcacgtgttactggtgtgtatttgcacaagtatgcatattcctggagtgtgtctgtgcacgtgtgttcccggtgtgtatttgcacaagtatgcatattcctggagtgtgtctgtgcacgtgtgttcccgctgtgtatttgcacatgcatgcatattcctggagtgtgtctgtgcacgtgtgttcccgctgtgtatttgcacaagtatgcatattcctggagtgtgtctgtgcacgtgtgtttctggtgtgtatttgcacatgcgtgcatattcctggagtgtgtctgtgcacgtgtgttcctggtgtgtatttgcacaagtatgcatattcctggagtgtgtctgtgcacgtgtgttcctggtgtgtatttgcacatgcgttcatgttcctggagcatgtctgtgcacgtgtgtccctgatgtgtatttgcacgtgcacgcatgtgtgtgcttgtgcaccccggctccgtcttcctctcgtcctctctgcccgccgccctcctgggccagactctcctgttctgagtggaaggcaacgaaggcctgggttgcacaggcccgtctggggtcacaggcatgtcagggccgcctgctcctaaacctcctgcactgagatgggaatgggaggggaggctggcgagggctccttcggttcagacgcctcctcccaaatgaacggcaaatgtcaaatgcagccctaaggaaaatagttcccacacctaatcatgtccgggagaggtcggtgggggggcgccgggagcacatgctgggtgggaacaagggccctttgtgtgccatgggcagctgtggccg

SEQ ID NO: 1668 - protein, 280 aa, Homo sapiens
MGCVSSLFHTEHFVFLCISTCAFLVCICTSAICVCSGVCLYTYVPGVLFMHIPGVCLCMCVPGVYLHMHAYSWSVSVHVLLVCICTSMHIPGVCLCTCVPGVYLHKYAYSWSVSVHVCSRCVFAHACIFLECVCARVFPLCICTSMHIPGVCLCTCVSGVYLHMRAYSWSVSVHVCSWCVFAQVCIFLECVCARVFLVCICTCVHVPGACLCTCVPDVYLHVHACVCLCTPAPSSSRPLCPPPSWARLSCSEWKATKAWVAQARLGSQACQGRLLLNLLH

SEQ ID NO: 1669 - DNA, 2029 bp, Homo sapiens
  source
  (1)..(2029)
  CDS (201)..(1829)
cataaaaacatgggtctatctccgcataggagaaatcattggcatttacatacccgtcaccactagggttgattacgtttcctttgacccagtagtccctcataatcaagttgatttccctcttaagagattagttctttaaacttctgctctggtctttttctgccctcttaggtcatggattatatgggacttttgaaatgttatcctcctggaggaaaactagagaagaccaacatgttaaagagagaactgcagcagtctatgcagactccatgctctccttttctctcaccactgccatgtacctggtcacctttggcataggggccagccctttcacgaacattgaggcagccaggattttctgctgcaattcctgtattgcaatcttcttcaactacctctatgtactctcgttttatggttccagcctagtgttcactggctacatagaaaacaattaccagcatagtatcttctgtagaaaagtcccaaagcctgaggcattgcaggagaagccggcatggtacaggtttctcctgacggccagattcagtgaggacacagctgaaggcgaggaagcgaacacttacgagagtcacctattggtatgtttcctcaaacgctattactgtgactggataaccaacacctatgtcaagccttttgtagttctcttttaccttatttatatttcctttgccttaatgggctatctgcaggtcagtgaagggtcagaccttagtaacattgtagcaaccgcgacacaaaccattgagtacactactgcccagcaaaagtacttcagcaactacagtcctgtgattgggttttacatatatgagtctatagaatactggaacactagtgtccaagaagatgttctagaatacaccaaggggtttgtgcggatatcctggtttgagagctatttaaattaccttcggaaactcaatgtatccactggcttgcctaagaaaaatttcacagacatgttgaggaattcctttctgaaagcccctcaattttcacattttcaagaggacatcatcttctctaaaaaatacaatgatgaggtcgatgtagtggcctccagaatgtttttggtggccaagaccatggaaacaaacagagaagaactctatgatctcttggaaaccctgaggagactttctgtcacctccaaggtgaagttcatcgtcttcaatccgtcctttgtatacatggatcgatatgcctcctctctgggagcccccctgcacaactcctgcatcagtgctttgttcctgctcttcttctcggcattcctggtggcagattcactgattaacgtctggatcactctcacagttgtgtccgtggagtttggagtgataggtttcatgacattatggaaagtagaactggactgcatttctgtgctatgcttaatttatggaattaattacacaattgacaattgtgctccaatgttatccacatttgttctgggcaaggatttcacaagaactaaatgggtaaaaaatgccctggaagtgcatggggtagctattttacagagttacctctgctatattgttggtctgattcctcttgcagctgtgccttcaaatctgacctgtacactgttcaggtgcttgtttttaatagcatttgtcaccttctttcactgctttgccattttacctgtgatactgactttcctgccaccctctaagaaaaaaaggaaagagaagaaaaatcctgagaaccgggaggaaattgagtgtgtagaaatggtagatatcgatagtacccgtgtggttgaccaaattacaacagtgtgataatgtctgcttggcatattttcaccttaggtcttatcaagaccaaagagattatgttaatgaaacaattaaattcaaagttcttcccttttttaaagataggaaacaggcattgccaaaaaaaaaaaaaaaaaaaaaaggaaaggacagtggggagaaatgggcctggcatattttcagtctttaaaacaaaggagttg

SEQ ID NO: 1670 - protein, 542 aa, Homo sapiens
MLSSWRKTREDQHVKERTAAVYADSMLSFSLTTAMYLVTFGIGASPFTNIEAARIFCCNSCIAIFFNYLYVLSFYGSSLVFTGYIENNYQHSIFCRKVPKPEALQEKPAWYRFLLTARFSEDTAEGEEANTYESHLLVCFLKRYYCDWITNTYVKPFVVLFYLIYISFALMGYLQVSEGSDLSNIVATATQTIEYTTAQQKYFSNYSPVIGFYIYESIEYWNTSVQEDVLEYTKGFVRISWFESYLNYLRKLNVSTGLPKKNFTDMLRNSFLKAPQFSHFQEDIIFSKKYNDEVDVVASRMFLVAKTMETNREELYDLLETLRRLSVTSKVKFIVFNPSFVYMDRYASSLGAPLHNSCISALFLLFFSAFLVADSLINVWITLTVVSVEFGVIGFMTLWKVELDCISVLCLIYGINYTIDNCAPMLSTFVLGKDFTRTKWVKNALEVHGVAILQSYLCYIVGLIPLAAVPSNLTCTLFRCLFLIAFVTFFHCFAILPVILTFLPPSKKKRKEKKNPENREEIECVEMVDIDSTRVVDQITTV

SEQ ID NO: 1671 - DNA, 1201 bp, Homo sapiens
  source
  (1)..(1201)
  CDS (201)..(1001)
ctttaatcagtcgcaaaatttctgggcagtctccagcctctgcatgtcttatttgaaagtaatccatgcttgtttgcctcatgcccatttggctcacacttggttggctcctgcctggttgactcaggcctggttggctcagcactaattggttcaggtcttgttggctcaggcctggctgactcggccccggttcccatatgcctggttggcccctgcctggatggctcatgcctgtttggttcttacttgattggctagtgcctggttgtctcatgcctagttggctggggacttgctggctcatgcctggttgccacatgcctcgttgccacatgcctggtggactcttgtttggttgcctcgggactggttggctcaggcctgtttgccatgtgcctggttggctcatgcctatttggcttgtgcctgattggctggtgcctacttgtctcatgcttggttggctcccacctgactgtctcatgtctagttgccacatcactggttggcttatacctgattggtttgtgcctgcttggctcgtgcttgattgtctggggcctgattggcttggggctcgttgcggtggacctggttggcttatgcttgcttcactcaggactagttcgctcaggctttgtggccacatgcctggttggctcctacctaattgccatgtgcctggttgtttcatgccaggttggtttatgtctggtaggtttgtacctgattgcctcatgccagcttggctcatgcttggttgtttcatgtccacttggttcatttcatataggcttgcactccattggttcatgtccatttggttcataccaagtaagcttgggcttggctggattatacctgtttggttggaatctgataaacttgattggtttgcgtctggttggctcatgtctgtttggttcttacatgattggctagtgtctggttgccttatgcctggttggctggggacttgctggctcatgcctggttgactcatgtctgggtggcttgggacttgctggctgatgcctggttgttgcacgcctggttgccacatgcctggtggactcatgtttggttgcctcaggactggttggctcagtcctgtttgccatgtgcctggttggctcatgcctatttggcttgtgcctaattggctggtgcctacttgtctcatgcttggttggctccc

SEQ ID NO: 1672 - protein, 266 aa, Homo sapiens
MPGWPLPGWLMPVWFLLDWLVPGCLMPSWLGTCWLMPGCHMPRCHMPGGLLFGCLGTGWLRPVCHVPGWLMPIWLVPDWLVPTCLMLGWLPPDCLMSSCHITGWLIPDWFVPAWLVLDCLGPDWLGARCGGPGWLMLASLRTSSLRLCGHMPGWLLPNCHVPGCFMPGWFMSGRFVPDCLMPAWLMLGCFMSTWFISYRLALHWFMSIWFIPSKLGLGWIIPVWLESDKLDWFASGWLMSVWFLHDWLVSGCLMPGWLGTCWLMPG

SEQ ID NO: 1673 - DNA, 1234 bp, Homo sapiens
  source
  (1)..(1234)
  CDS (201)..(1034)
  modified_base (210)..(210): a, t, c, g, unknown or other
  modified_base (215)..(215): a, t, c, g, unknown or other
  modified_base (219)..(228): a, t, c, g, unknown or other
  modified_base (266)..(266): a, t, c, g, unknown or other
  modified_base (904)..(1003): a, t, c, g, unknown or other
tagcagtcaactataaattccggaagccagacgtgtgtcatctatcctcattccttgaaacttgggggtatcctagatgaggtcaggagatgtcactgaccctgcccaactggtagtcatcagactttggaggaagcacaaacaggttggaacttttgttctgtgagtacgctaaactgttaaagccttgattgtttttgatgatgttgngtgantttnnnnnnnnnnttttttttggtggtggtttgtttttctttgggtggtgncgtcggtttgggggtgttggggtttccccccccctgggcgcgctgctctttttctccgccctccgggtcgcccctcgtcctcttggcgtttctcctccgctgcttctcgtttctgttgctggtgcgtgtgtgtgttcttcgtttttgttttttttttttgttcgccttgtttgctgttgttcgtgtttctctcttttcgtcgctccggggcggcggtcgtgctggtgttttttttggtttttgccttccttccgtttgccccctttccctttgttctttttgttttttgctcgcgctcctcttccgcttttttctcttttccccttctctgcggcgttttgttttctgctttgctcttgcttccctcgtccgccttggtctgcctgccctggcgctttgctcccggcctgttcggtgtctggctccggttttttgtttcgttgcgtgccgtttgctcagcccctcctctctctttcccgtctctctctattttttcttgctctgctcgtttctgtttgtgtttctcgttccttgtctcctctctttctgggtgctgtttgtcgtacctcctccgtcttgtcttcgccttgttgtctcctcgtggtgcgctggtctcgtgcgggtccccgtcttgtagnnnnnnnnnnnnnnnnnnnnnnnnnnnnnnnnnnnnnnnnnnnnnnnnnnnnnnnnnnnnnnnnnnnnnnnnnnnnnnnnnnnnnnnnnnnnnnnnnnnngttatccgtttctactaaacaacaaaaatagccgggcatggtggcttgcacctgtaatcccagctactcaggaagctgaggcaggagaatcacttgaaccctggaggcggaggctgcagtgagctgagactgtgccagcttaggtgacacagtgagactccatctcaaaaaaaaaaaaaaaaaaaaagaaatataaatcttgcagataaaatgataaatggtagaactgtt

SEQ ID NO: 1674 - protein, 277 aa, Homo sapiens
  MOD_RES (4)..(5): Variable amino acid
  MOD_RES (7)..(10): Variable amino acid
  MOD_RES (22)..(22): Variable amino acid
  MOD_RES (235)..(268): Variable amino acid
MMLXXFXXXXFFGGGLFFFGWXRRFGGVGVSPPLGALLFFSALRVAPRPLGVSPPLLLVSVAGACVCSSFLFFFFVRLVCCCSCFSLFVAPGRRSCWCFFWFLPSFRLPPFPLFFLFFARAPLPLFSLFPFSAAFCFLLCSCFPRPPWSACPGALLPACSVSGSGFLFRCVPFAQPLLSLSRLSLFFLALLVSVCVSRSLSPLFLGAVCRTSSVLSSPCCLLVVRWSRAGPRLVXXXXXXXXXXXXXXXXXXXXXXXXXXXXXXXXXXLSVSTKQQK

SEQ ID NO: 1675 - DNA, 1270 bp, Homo sapiens
  source
  (1)..(1270)
  CDS (201)..(1070)
tatatatactgtgtatgtatatactgtgtgtatatatatactgtgtgtatatacactgtgtatatatactgtgtgtatacactgtgtgtatatatatactgtgtatacatatatactgagtatacatatatactgtgaatatatatactgtgtatacatatataccgtatatataccgtgtatatatatactgtgtatatatgtaccgtgtatatatatactgtgtatatatgtaccgtgtatatacatactgtgtatttatatgtaccgtgtatatacatactgtgtatatatatgtaccctgtatatatatactgtgtgtatatataccgtgtatatatatacactgtgtgtatatataccgtgtatatatatacactgtgtgtatatataccttgtatatatatatactgtgcgtatatatatgctgtgtatgcatgtactgtgcgtgtatacagatgctgtgtatgcatgtactgtgcgtgtatacagatgctgtgtatgcatgtactgtgcgtgtatacagatgctgtgtatgcatgtactgtgcgtgtatacagatgctgtgtatgcatgtactgtgcgtgtatacagatgctgtgtatgcatgtactgtgcgtgtatacagatgctgtgtatgcatgtactgtgcgtgtatacagatgctgtgtatgcatgtactgtgcgtgtatacagatgctgtgtatgcatgtactgtgcgtgtatacagatgctgtgtatgcatgtactgtgcgtgtatacagatgctgtgtatgcatgtactgtgcgtgtatacagatgctgtgtatgcatgtactgtgcgtgtatacagatgctgtgtatgcatgtactgtgcgtgtatacagatgctgtgtatgcatgtactgtgcgtgtatacagatgctgtgtatgcatgtactgtgcgtgtatacagatgctgtgtatgcatgtactgtgcgtgtatacagatgctgtgtatgcatgtactgtgcgtgtatacagatgctgtgtatgcatgtactgtgcgtgtatacagatgctgtgtatgcatgtactgtgcgtgtatatagatgctgtgtatatatgtactgcgtgtatacagatgctgtgtgtatatacactgtctgtatatatgtactatgtgtatatacactgtctgtatatatgtactgtgtgtatatacactgtatatactgtgtgtatatacactgtctgtatatactgtgtgtatatacactgtctctatatactgtgtgtacatacactgtct

SEQ ID NO: 1676 - protein, 289 aa, Homo sapiens
MYRVYIYCVYMYRVYTYCVFICTVYIHTVYIYVPCIYILCVYIPCIYIHCVYIYRVYIYTVCIYTLYIYILCVYICCVCMYCACIQMLCMHVLCVYTDAVYACTVRVYRCCVCMYCACIQMLCMHVLCVYTDAVYACTVRVYRCCVCMYCACIQMLCMHVLCVYTDAVYACTVRVYRCCVCMYCACIQMLCMHVLCVYTDAVYACTVRVYRCCVCMYCACIQMLCMHVLCVYTDAVYACTVRVYRCCVCMYCACIQMLCMHVLCVYTDAVYACTVRVYRCCVCMYCACI

SEQ ID NO: 1677 - DNA, 1288 bp, Homo sapiens
  source
  (1)..(1288)
  CDS (201)..(1088)
  modified_base (526)..(625): a, t, c, g, unknown or other
ctttttaaaatatttttaaatttatttttttattttcaataggtttttggggaacaggtggtgtttggttatgtgaatgagttctttagtggtgatttgtcagattttggtgcacccatcaccaagcagtgtaccctgtacccaatgtgtagtcttttatccctcgccaccccaccctttccccgagtccccaaagtccaatgtatcattcttatgccttttgttgttctcatagcttagctcccatatatgagtgggaacagacaatgtttggttttccattcctgagttacttcacttatccaggttgctgcaagtgccattatttcattcccttttatggactgagttgtattccatggtgtgtgtgtgtgtggctgtttgagtgtgtgtgtatatatatatatacacacacacaccatattttctttgtccatttcttgtttgttgatgggcatttgggctggttccatatttttgcaattgcaaattgtgctgctataaaatgtgtgtgcgagtatctttnnnnnnnnnnnnnnnnnnnnnnnnnnnnnnnnnnnnnnnnnnnnnnnnnnnnnnnnnnnnnnnnnnnnnnnnnnnnnnnnnnnnnnnnnnnnnnnnnnnnctctttcttgtttgtcttaagaaagcaagagggaggcgggggagggcttttcctcttttttctttgttttgtgtgttgtcttttcttttgtttccttttgttgttcttctctgtcgcttcttcttgttgctttcttctcgttgcttgtctgctcattcttgtgtttgtctctgctttttttgtgttttcttctttctgtgttccttcatctgtttgctttcttgctcttgttttcttgtctttttcattccgttgttttctgcttctttctgctgtcggtcgtcggtcgttctgtctgtcgtcttgtctttgtttcttcttcctcttctgtggctcttttttcccttctgggcgcgtcttgcctggcttgtttgttttccttgcttggtgtttctctttttgtgacgcggtatgcttcgtcttttctctccgtttccttttttctactgttcttgtgcgctgatgcttttctctttttctgttgttttttgctctctctctcttgtctcttctgcctgttcttttctctctcttgttctggtggctgtcttcttttgtgtttctttcttgttgtgttctcccctgtcttctcttcttcttttggttgtttctctttgccgtttggttctccctctctttccgttcgttcgatgaccctgcctg

SEQ ID NO: 1678 - protein, 295 aa, Homo sapiens
  MOD_RES (109)..(142): Variable amino acid
MYHSYAFCCSHSLAPIYEWEQTMFGFPFLSYFTYPGCCKCHYFIPFYGLSCIPWCVCVWLFECVCIYIYTHTHHIFFVHFLFVDGHLGWFHIFAIANCAAIKCVCEYLXXXXXXXXXXXXXXXXXXXXXXXXXXXXXXXXXXSFLFVLRKQEGGGGGLFLFFLCFVCCLFFCFLLLFFSVASSCCFLLVACLLILVFVSAFFVFSSFCVPSSVCFLALVFLSFSFRCFLLLSAVGRRSFCLSSCLCFFFLFCGSFFPSGRVLPGLFVFLAWCFSFCDAVCFVFSLRFLFSTVLVR

SEQ ID NO: 1679 - DNA, 1363 bp, Homo sapiens
  source
  (1)..(1363)
  CDS (201)..(1163)
  modified_base (9)..(9): a, t, c, g, unknown or other
  modified_base (17)..(17): a, t, c, g, unknown or other
  modified_base (32)..(33): a, t, c, g, unknown or other
  modified_base (43)..(43): a, t, c, g, unknown or other
  modified_base (55)..(55): a, t, c, g, unknown or other
  modified_base (62)..(62): a, t, c, g, unknown or other
  modified_base (69)..(69): a, t, c, g, unknown or other
  modified_base (78)..(78): a, t, c, g, unknown or other
  modified_base (87)..(87): a, t, c, g, unknown or other
  modified_base (99)..(99): a, t, c, g, unknown or other
  modified_base (113)..(113): a, t, c, g, unknown or other
atccaggancagagagnaggaaaaactagttnnggggactttnctgtggacaagnttcttantccaacngtgtgtatnactgaattncagatgactgtngaggagacagtgtncaattcccaattgagaaagatgagagaaaggctggaggcccaggccataaagaggctgcttttcctcggtttttttgttgcggtgagatgtttgttttttttgtgcctgtgttgtttagtgtgccggtggtggttttggtttttgggtttgccccttctttttctcttgggttttgttcttccttttctctgttcctttctgtcgcgtgcgctctgcgtcgctgttgttctttttgggtgtgggttttcttttcccttggtcgcgtggctctttccgcctgtgtggtgggccccccgcctcccctctcccccccccgccgttctcctcttcgttctttgttgctctttttctcggttgtctgtgctgcgcctttccccccccttgccgccccttggtctcgcgcgtgcctcccggttgcttcgttttgtgcttgtgcttgtttgttgtcccgctccgcccgccccctcctcctcttcgtcctccccccttgtcttccctcctcctccgcgctccgcgcgccccgtgcgcctccttctctgtttggctcgtgtcccgctctctccgcggtcctggcgggccggtgcgttcgccgggtggttggtggcgtgtttctccgttgttcgcgttgccgcgctggtgtgtctccgcgtcgccgctgctggtctgttctcttcgtcgcttttgtctgctgttcgcacatcctaacatataacaataaacaactaagcacagttttttttattttccttcaaggaaggaaaaaaaaaagggctaccggtttaaaaagcttttttaaggtggggcccttccctaaacctttaaggggaaagccctctcgttcttctccagaagtccggggggacaaacccttttttttttgcttctattggggaggaatttttagccttgggggattttgttttgttgcccttggttgtcttcggtctgtgcgagtgccagggggtatttgtaacctaggtgacgttgttttgttctccccgacccttaaaggttgtgcgctggttttttttcacctgggtaatcactagaaattgcctgtggttgggtgggttggtgtgtttgttaaagcagggtgtttggtccctccccttgagtttctggttctttctgttttgagtggtggtttggaatttccctttcttagaagttcccaggtgatccttgagcgggtggtgccaaggctgcactttgtgaacctctgttccgcttcataccacctcgcaaatag

SEQ ID NO: 1680 - protein, 320 aa, Homo sapiens
MFVFFVPVLFSVPVVVLVFGFAPSFSLGFCSSFSLFLSVACALRRCCSFWVWVFFSLGRVALSACVVGPPPPLSPPRRSPLRSLLLFFSVVCAAPFPPLAAPWSRACLPVASFCACACLLSRSARPLLLFVLPPCLPSSSALRAPRAPPSLFGSCPALSAVLAGRCVRRVVGGVFLRCSRCRAGVSPRRRCWSVLFVAFVCCSHILTYNNKQLSTVFFIFLQGRKKKRATGLKSFFKVGPFPKPLRGKPSRSSPEVRGDKPFFFCFYWGGIFSLGGFCFVALGCLRSVRVPGGICNLGDVVLFSPTLKGCALVFFHLGNH

SEQ ID NO: 1681 - DNA, 1912 bp, Homo sapiens
  source
  (1)..(1912)
  CDS (201)..(343)
  CDS (455)..(843)
  CDS (940)..(1314)
  CDS (1648)..(1712)
gcaggaaggacaagccacagtccaagacagcaagaccagataatatcagagataaccagatagtgagagacaagggcaagaacataagcaacagaaaccaaggctacttggcatcatcagaaaccagttctcccaccacagtgggccctggataccccaacacaccagaaaaacaaaactctgatttaaaatcacatcttatgatgatgatagaggactttaagaaggacataaataactcccttaaagaaatacaagagagctttggcttccgtagacgaggtcgggcggaccttcgtccggggtttcggcacccccccttccccttccccggggtccgggggtgacattgcaccgcgcccctcctggggttgcgtcctcgccccacgcggactccccctcggcgcgcagctccctttcgccttccttggccggggttccctcccttccccagctgcccagtcatgggggctgctgtgtttttcggatgcaccttcgtcgcgttcggcccagccttctcccttttcctgatcactgtagctggagacccacttcgggttatcatcctggtggcgggagcctttttctggctggtctccctgctcttggcttctgtggtctggttcatcttggtccatgtgacagaccgatcagatgcacggctccagtatggcctcctgatttttggtgctgctgtctctgtccttctacaggaagtgttccgttttgcttactacaagctccttaagaaggcagatgagggcttagcatcactgagtgaggacggaagatcacccatctccatccgacagatggcctatggagaggcggtctggagggagagtaggtatggtagacttttccctgggcttggggagtaggtactgctaatgaagctgtggtggtcctggtcgttgacaagaccctccctccccccagtttctggtctgtccttcggtatcatcagtggtgtcttctctgttatcaatattttggctgatgcacttgggccaggtgtggttgggatccatggagactcaccctattacttcctgacttcagcctttctgacagcagccattatcctgctccacaccttttggggagttgtgttctttgatgcctgtgagaggagacggtactgggctttgggcctggtagttgggagtcaccttctgacatcgggactgacattcctgaacccctggtatgaggctagcctgctgcccatctatgcagtcaccgtttccatggggctctgggcgttcatcacagccggaggctccctccgaagtatccagcgcagcctttcgtgtaaggactgactacctggactgatcgcccgacagatcccatctgcctatccactgcccatgactgaacccagccccagcccgggtccactgccctcatcctccgtctcctcgctgatgtgccccgcttccttccgggtttggcgttgtccatttgtgacctgtagtctctaagctttctcaggagcagcctgggtgcagccagtcagggactggtgggtttgaatctgcatctctccccaccacctggggacccccttgttgtccaggtctccccatgtgtcagtgctccaccctcaccctgcccatgactcaccccgcttcccctctgcaggccgccggcaggaggacagtcgggtgatggtgtactctgccctgcgcatcccacccgaggactgagggaacatgggggggcccctgggcctggggtgccctcccgatctcctcgtcccgtatttctccatctccagttctggacagtgcaggttgccaagaaaagggacctagcttagccatggccctggagatgaagttactgaggctgagggtagatgggttcagttcagtgtctcctgcccagactggacatcttggtcttt

SEQ ID NO: 1682 - protein, 323 aa, Homo sapiens
MMMIEDFKKDINNSLKEIQESFGFRRRGRADLRPGFRHPPFPFPGVRGCPVMGAAVFFGCTFVAFGPAFSLFLITVAGDPLRVIILVAGAFFWLVSLLLASVVWFILVHVTDRSDARLQYGLLIFGAAVSVLLQEVFRFAYYKLLKKADEGLASLSEDGRSPISIRQMAYGEAVWREISGLSFGIISGVFSVINILADALGPGVVGIHGDSPYYFLTSAFLTAAIILLHTFWGVVFFDACERRRYWALGLVVGSHLLTSGLTFLNPWYEASLLPIYAVTVSMGLWAFITAGGSLRSIQRSLSCRRQEDSRVMVYSALRIPPED

SEQ ID NO: 1683 - DNA, 11728 bp, Homo sapiens
  source
  (1)..(11728)
  CDS (201)..(295)
  CDS (4172)..(4367)
  CDS (4561)..(4658)
  CDS (4920)..(5134)
  CDS (6752)..(6905)
  CDS (7518)..(7718)
  CDS (11459)..(11528)
agcagaagaagctttgcctgatctcaactgtccagagcaggtggggacacccagcaaggctggatgcaagggcagccctggggaccctgacgtaaccatggttttgtcctcttggcctctgcacagccactgagtggttagtgggtgagcaccgggcccacgccattatcctgggacactgctttttcgctgtgtgggccatgttgctgacagggatcgcctacggtcttccccactggcagctgctgtttctggtgggtgggatacttgtgatccccttcatctcctatatctggtgagcaagcgagtacagggcatgtacagggctgggtctgatgggctggatgtcgatgagtatggagggtccttgaagctgtgggaatgggtgggatttcccctgggagaaagtgcatgtggatgggatgagataggaaggcaccaagggcagagcgtctgaacctcagcattaacctcctccccgacccagagaagaccctcaaagagatgttagagaggtggtcagaaaaccaggaggaagagtgttgaaggccaaggggttaaggccaagggaagggtcagtgttgaaggtaagaggggtgatgctgggaaagggtctgccagccttggtgaccttcttgaggtggcttcactgcagtggcagagggttgaggagtgactaggagcagaagaaattcagccaggagatgactttcttagaaagagggagaaagggatgatttatatgggcaactaagacagagtcagggaagagtatcagatgttttgagtgtaggggagtcacagacaggaacctaagagattaaagctgggagaggacaactgatggggcaaaactcggaggaataagggttgagaacaaaagtgagatgccaaaagaaagaaggttaaccttgggcaggtgggaaaagagagggacaaaacagaaggcagagagggaggtgagaagaagctgaaagaacccacgtgtgaagggttaggcagttctgcatgaagcaatgatcatatttaatcttgaaattattacatttaatcttgacccctctagaagaagtatgctactcccatgtcatgggaggtggggaggagggagaactgaggcttcagagggtggaaataacttgtctaacagcacacagctagaaagtggggcacctgggatttgaactcaggggctgtctccaaagcctctgcattttaactgtaccatatgtagtaagaatgataaaagatagggttaacagcatgggggctgggcgcagtggctcatgcctgtaatcccaacactttgggaggctggggtgggaggagcgcttgaggctaggagtttgggaccagcctgggcaacatagcaagaccctgcctctacacaaaattttaaagttagccaggcatggtggcacacacttgtagtcccagctacttgggaggctgaggtgggaggatcacttgagcccaggagatcatggctgcagtgagttatgattgtattactgcactccagcctgggcaaaagagtgagatcctgtttaaaaaaaatttcagtccagttcaattaaaaactttaatcttacatcagatccacagctttttcctggccccttgctcaggatagtggccaagggggatgaggtctgttctgacctattgttcttcctcctgtctccttgttctgattttccaggttctaggcatgggatagggacatcagataaaatagaccaaagactgacatggcaggggctattatagtctctcagggtcctctgtagggtagatattcaaataccatcactctcgggtccattcgtgggtcttctgagcattggaatttcctaatgctcccagtgctctgtttgtgacctccctcagctcctgtccctggcagttcaccccataacctctttctgtaggggtctcctcatcctagcacatggggtgcctttaagacagcagggtccacttggccaaaaaaccccactgttccccagcctccaccctgttgtggtgggctgctccaatcaacctcctgccttcattatacccagatgagagatgggcatcattctccgggtttatgtaggccctcaaactccaggtggcacatattaaccctcctataatctctctcactgtctggaataccaggacaagcccccatgtttctgaattagcaagttccagccagagtgggatggcagatgtcctttttcaaaggcagtccccgcatctatctaaggagttctcttgaactcccctttgcctagctcgagtagatgagagttgtatggggagtgaggaggagagattcaagaccctgtcacttccatgaactggattcccagcctctattggtaggctgttagcagtgagcaccaatgtactatgggtgctgaaggtccctcttttgacctagttgtgtcccctaggctttggcagtctgggcctgtgatggaaggggcagtaccaatgatctctaatgtatctttggggttattcttttagtgtcctcaaggatagtgcctggcttccgctgatttgtactggcctccttatcaaacagtagcttggccacatccttggtgttctctcccaaacacactttgttattcatggaaaatgaataaacagcatggccaacatgagcatttgacaaatctttaagttctgcttcccttttaattataaattctaatttgtttctctcttctcacattttactataagtagtcaagagaagccataccacaccctcaacactttgcttagggacttcttctgccaaatgtcctatttcatcacttacaagttccttctttcacaaacactaaggcatgaatacagttcagccaagctctttgccattttgtagcaaggattgccatttctccagtttctaatagttcctcatttgcatctgagacctcatcagaatgtctttattgtccatatttacgtcaacattctgttcatgacctcttcaatgcatttgttacatttctcccattgtgtcctccctcccattctctttgtccctgagagttggtatccttttcttatacctgttttttcagtggacatgaggccaatcccccatctttttgaagaagtctcagtttaatggctttctttaggagagttccacagccttagagtggaaaatgatgactgattgctgaaccctggtgggagagaggaggagcagggcaggtataaggaatgaagttgtctctagtgtcttgagtgtgtgtttatggcaaccagccagagtcctggtcggggagggagtgctggtataagaaatcagcaggcacagttttattaaaaagttataccaccttaggggactgaggctgtaccagtccccaagtacatagctctgcctctgtgtcctcgggcaagccttttactccttgagcctgggagtaaaatggggataatcatactaggtccaggtttggatgaggattaaacaagactatatatacaagggcaccaagcaccatttttcacacatacctgctttttatgccaatctgtgtggattctgacagcctgagaggatgggaaaaaacagagaggagttattctgaagtcaaaggcaatagagatgtggcgggggagagatgggacagagtagagaccttcactcacccctccattcacccaggcagagtgctgggcactggggtcagacccagggtcctgccccctcacactcctcaggctgttggggagacagatagggaacaggagaaatcccaactaagggcatgggggctctacaggaggctgtgggcatggaggtcggagccctcagcatgcctgagcagataggggtggccccctagatagaaaaggagagagctctcagtgattactgagggcaaatcaaggagactggagacagaggcagccggtggtcagggtgttacctagcagcagtggaggccatgtgaggcttagacaggggaagggctgaccaccagggaggagcagagggcagctcgaggtcagtggtggccttcaaggccctgacatctgaatcacctcatgctggcacaggatggccacagctgaggccacgagagggccagcagggggtctctgggcatcatagaacggtgagataagagaggggctggccacgcaggattctcccggagtccccgcggtggctgatgatgaaagggaaggtgaaggaggccaagcaggtgctgtgctacgccgcaagtgtgaacaagaagaccattccttcaaatctgctggacgaggtaaagggcttctggccaggagtggggccggagcagtgggctgtggaagggccccttccctcctcatcctttcaggtgggacattggtccagagggtgcccccagtccactgcttaaggacaatggtgacagcaaaattgaaccctgccagggaaggccagaagccagctggcactttcagggacaggcaggccttgtgggtgctgtggggctggggagcaagctggggtcttggccctgcctctgactggtcctgcttgttctgtagctgcagctgcccagaaagaaggtgactcgggcctctgtcctggacttctgtaagaataggcagctctgcaaggtgaccttggtgatgagctgtgtgtggtgagtatccagggctcgctggcagggactgcgaacaggtgcgcaggctggaaactctagggagaggatgggaatggtcaggctgcaggggaggcagcccaaggacacagatcacaggtctctgtgcttatttctctcctccgttcctaccctgacccttgctgctctgcctctgtctttattcctggctccgtgtgtgtgtgtgtgtgtgtgcgcgcgcgcgcgcgtgtgcacgcgcacttgcctcctggcttcatccaggtttaccgtcagttacacctattttacgttgagcctgagaatgagagagctgggcgtgagcgtccacttcagacacgtggtccccagcatcatggaggtgcctgcccggctgtgctgcatctttctcctccagcagattgggaggaagtggagcctggctgtgactctcctccaagccatcatctggtgcttgcttctccttttcctccctgaaggtacagctcatccttcccctgtggcctgcccacagccttcctgcttcccaaaacccctccccagtgccgcctgccatggccggccacctagacaccctgggaatcagccttctgcacctatagcccacccaccccacagaggccccagcacctccaatccctggagcactgctcttcctgggcggggtcccccagacagggcacccacactctctcatgaggcctgaaagaggagggtgtactttccagaggacagcaggcagccttcttccaccagattccaatccaccttagaagtaggtctaatggttacatgtgaataaatgatggcaaaaatattccttcaactgctgcccaggcccacctgtcatctgtagcccctttgactgggaaatgcctgttgttccctgtagcttcaccaggaataacctgaccactgaaaaattgagtgtaatatggggctcagcactcaggaacagctcttgtatggaggcccctcctttccagaggggctcagtgccccattcctgctggcttagcactagaaaaggaaacaggaagggctggtgttatcttcagaatctcaaagagccctaaacagtggatacaccacaggtcctagagctggagcgatctgtgcagcacatgcacttagaatgactgcctgcggagccctttcacagtcgcagcaagggcaggggaggctagatccggccctgcctggaggggctccctccctttctccagggctggaattgtgtgtgtctggattaggacccttccactcccagatgctggcagtgtagattggctaacacaaaatgtggaaacaaattcattattgaatattaattgcctggtggtttttaaaaaagcaggtctacactgagtcaagcagcaatatgtaaactcagaagtgtgagagaaactaggaatggactccccggtagataaaactggatctctgatttcatcccagagacaagaaaagccaggactggaatgggagtaaggccggggcagggtcctgcagaggctgacaggcaggcaggcaggggctgaagcccccagcttcaccaggtctgaggaatgggctttccccagtttccccttcattgtgcctgtctagctggccggagaacatcctggaatgtttgggagccatcccagccattcaggccccaggaaccaaacacccccttgctctgaccaccttgcagagccccggtggtacagccctgagcaggggtcccaacccacaggacacaggcctggccctgagtggatccccagtggggtgaggaagctgcaattgggtgaggaggtggaacgaagacacagccttggaggcagagaagggggtgttgggtgtagcatgggagacagtggcctgagaggccatgggtgtcccaggggacctccccacccctgctgactaactctgcactgcaaatgtcctgccttccagcctggctgggcctctgacaacctgccactcctctgacagaatgcctgagcctgctggccagctgggcaggtggtggggaaggctgttcagatgccttctgggaggggtcaagggagggctgatgagtggaactccttcacccaccccaggggaggatggcctcagactcaagtggccacgttgtccggccacagagctgaaatccatgacgatcttggtgctcatgctcagagagttcagcctggccgccactgtcactgtgttcttcctctacaccgctgagctcctccccactgtgctcaggtatggggtctggtgggcgagggggccatggggacatgcgcagggagagacaatgacaagattaatgcagcaactaagacaagcattcacctggtgacaagcactgtgctaaacagtttacataagtgatctcatttaaacaccaccagaaaatcccccaaatgccatcactaaccctatttcagatgcaagaccagacagataaaggcattcgattaagggcagacagagcaagcagcagagctgggatttggccccaggcagcctgactccagcccctgccttgcactcactgcctggaaagtgtttgggccacttggaggctcagatccttccctgaggttggcgatgggagcactatcttcctgcctggctggcatcactgcctgtgtcctctccccgcacatccacataatgctgcatggtttctgcctctccccctcctcatcccccttgaaggaggcccagaagaaattattgcctacttggaatcacacaatgaggatgggacagggtggagactggagagtgtgggttttcatgtagctgctggccctgcccagcctctgaacccggcagacccctcacaggagctctcacctccactttcagggcgacaggtctggggctggtgtctctggcctcggtggctggagccatcttgtccctgacaatcatcagccagaccccctccctcctgcccatctttctctgctgcgtcttagccatcgtggccttttccctctcctccctgctgccggaaacgcgagatcagcccctctccgagagcctgaaccactcctcacagataaggtaggtgtgggagcctcctgggctgtgccagcacggggcctggctctgaagccttggcacagagagcgtgcgggacattgtccatccccgcccctctgccggagagcctgtgactcgaaggctgccatgtccgcagcagtctctccgctcctctggctgctgctgtctacctgctcccacccagcctctgccagttcccatcctgctgcccctcctgacccggactgggccatgtcgtctcctttccttgcccctgcctgcctgtctggatgggtgcattgcctttgggcataccctccaggggcactcctcccagaggctccctctcctcccagggacaggggactggcttggaactgactctgagtacatctcttttcctgtctgaactcctagttcagtcctggttttcataaaaaacccagtcttgatgaaggactctggcctcttggccccagcagcccaggaccccatttgggaactgggttccacccaacacctccatgggcacttccggcctctgatctcccaggtgtcccctggagaagacttgtcatgattggcaggaccattccttctgggttttcggccaatgaacacgctctccctggacctgaggggacctgagcgccagtgaggagcagaggttgcccgaggccctagagtgtcctctgctctgtgccacagcagtcactgcctctggcctttctctgccctcctccctaccatcttccccctgccctccctccctgctctcactggaaccacacatgctaggcactgtgccagggcttgactgtcaaaggtcagaggtcagcactccccatccttgagaaaaccatagcttatgcggagacagatgatgcaaacagttcctgctagaggactctgacagtgggatatacaggatctgtaggaacctaacaagggaagaacgttaatttggggagttggagaaaatgtcacagtgacaactgagtagggctttgaaggatggatagaaacttgccccactgtagagagaggaagttcagcgccgcacgggaagagaggataatggttatgggcacaggttccatgtgccgcaacttcctagtgtgtgcacggagaagttacctcatacctctgagactcagtttcttcatttgcaaagtggaatgagaacagagtaataacaatagttaagatgaattgagcatttgttatgtgttagaccctgttctacacatgccttatctcgttctatcctcaaaacaatcaaatgcaaggtaggttctgtcactatccccattttacaggtgagaacattggggcacagagaggtaaggccatgtagcccagccatcctctcccatgggtttttttgagaggattaaacctacataaagcagctggcacagggtctggcatgtggcaagtgctcagtaaatgctagcagtgaagatggtggaccaacttcaaagacagaaaagagaagggtctcgcaagggttgggagatggagcaggcctgattctggaggctcctggcaaagctcggctgggacctgccggagtgagaaagcctcacctcttgggaacgcagggttgggcgctgctgaaggcacaagccgctgcttttctcagcttccagaaagatgtggccctggactcatcctctgatggctctttcaggaataaggtcaaggacatgaagactaaggaaacatcatctgatgatgtctgaggaagcggccaagaatgtcattctcaatgcccagatcctgagattggacccataccctgtctccaaccctgccttgaagcaattcaataaagaggaagcaaacagccaggctccctgagggccaggcccccagaccatcttgggttggaattgagtggccaagtatggggtcatggattccaggccacaaattccaggcctagttcagtttgggggcagggtcagtcctgctcccaggccagcccttgacattaaaaaaaaatgccccctccttctgcaggagctctgctgtgattcattccaataaaggtacaatgttggtcttgagatggctgggtcaaagttgcccatgtgtggagaatgcagaggccctggcctggaggaagatgggttagacagactccttagtgtctttgtctaatcgttcagggacagtgaggagctctctggatgggggcaggggagtggggagggcaatgtctatgagggccagaggtgaagtgagggcaagactgtgcctgcacaccaaccatacccactagcccatgcatccgccagcatggcgagtttccacctgaagcacaggctgaggacagatttcaaagctccattttatgcactagtcagggcagggatggaatgtaaaggaacattgagaacttctctcatttgtcccattgcatagggctttctcaccatctttctgctgatgctgcaaataaacatggtcttgggaattacccaaatcggtccacatccctggggatgctttcctgatgactccaccctagctgacctctggcctccaccactctgaggataagcccccataccccagctcacaccctaactgccctgaaggtgattctgcccttcccagctggcatgggggttctgccaggcagggcccaggactcctcaaccagactgtgaagtccttgggtcaggccttcggcactacctcctctctccctgtcttacctcctccacgcttgcctagtttattggaagatcatgggcttgcagagaatagctctggttcgactcctcatagcctctgagggaggaagacagataagcaagtcagttctcatggagccagggcagcaaggccatggatctcccaggcaggttggagtccagtgaagcagggagtggcctccagcattcccagcactctggcccagcacactgctttgcgcatgtgctcccaagctttgggacaccaagaagctggtgtccatgcctttccctttcagtgtcattttctgtgcctactgttcttgactgagtttcctacgagggtctccaaagtggggtttgaagggccagaaagtgatctcacaaagtgtctgttcataggaccacaggatgctcgaaaagtctctgttgctctttctggcagaggcctgtgtgtgagctgtgatgccaacatattagccttatttaaacacctctcctcaagttactttgccaggaatcacctagtgccatagggaacaggaggaaaagaggggtcaggacagaaaactgatggggcagtgtgggtgtgaaggagcgggttgcacaggctgtggctgtcagcgagaccaactgcactcctacacgctttcaatttttctcaggtggccaaggcttgtcagtcagttccagataggacctacctagttgtttactgaatcaatggctaataatatttagagtttgacgttatgtattttactagactagacccatgctgtcccatacagcagccactaaccagacgtgggtatcgagggcttaaaatatgcctagtctgggaggctgaggtgggcggatcacctgaggttgggagttccagaccagcctggccaacatggtgaaaccccctctctactaaaaatacaagaatttttagtgggcatggtggtgggcgcctgtagttccagctactccggaggctgaggcagcagaattactcgaacccgggaggcagagcttgcagtgagccgagatcgcgccattgcactccagcctgggcaacagagcgaggctccgtttcaaaacaaacaacaacaacaacaacaacaacaaatgttgctagtctgatttgagatgtgctataactgaaaaacacactggatttcaaaggcttagtacaacataaaacaaaatatctcaatatttttaatatagatcacatgtaaaaatggcagcattttggatatattgagcagataaaacattaaaattaattgcacctattcttattaatttattttaattttacttcaagctctggga

SEQ ID NO: 1684 - protein, 342 aa, Homo sapiens
MLLTGIAYGLPHWQLLFLVGGILVIPFISYIWILPESPRWLMMKGKVKEAKQVLCYAASVNKKTIPSNLLDEVKGFWPGVGPEQWAVEGPLPSSSFQLQLPRKKVTRASVLDFCKNRQLCKVTLVMSCVWFTVSYTYFTLSLRMRELGVSVHFRHVVPSIMEVPARLCCIFLLQQIGRKWSLAVTLLQAIIWCLLLLFLPEGEDGLRLKWPRCPATELKSMTILVLMLREFSLAATVTVFFLYTAELLPTVLRATGLGLVSLASVAGAILSLTIISQTPSLLPIFLCCVLAIVAFSLSSLLPETRDQPLSESLNHSSQISLGNRARLRFKTNNNNNNNNKCC

SEQ ID NO: 1685 - DNA, 1351 bp, Homo sapiens
  source
  (1)..(1351)
  CDS (201)..(1151)
  modified_base (1003)..(1102): a, t, c, g, unknown or other
  modified_base (1108)..(1108): a, t, c, g, unknown or other
  modified_base (1137)..(1137): a, t, c, g, unknown or other
ctacaggagcacaccaccatgcctggctaattttgggacaggatcttgctctcacccaggctggagtgcagtggcacaattacagctcactgcaacctctgcctcccaggctcaagccatccacctcagcctcttgagaagctgggactacaggtgtgcaccaccacatgtagctaattttttttttttttttttttgagatggagtttcattcttgttgcctaggctggagtgcgccgccggtttgttttcccgctttgtggtggtgttttgtcgtcctgcggtgttgctttgtgtgtgggattggggtgttgtgggtgttgtgtggggtggtttttgggcttagctgtgccctcccgcttcctgtgcgccgcgccctgtttccccggcggtttttgcctttgtccggggtgtctttgtttcccgttctttcgccttttcctccctgtttcttttctccttctttgtttcgtgtcgccgtctcgccctttgtttctgtttttcttccgcctctggctatcttctcttttttcttctccctcccttcgcctcttgctgtgtctccgtttccccttccccgttccccgcttccgttctcttcgtctcccgtttgtcttttcccccctctctctctctctcgttctctccctgtttctcgccttgcctttttcccccgccctctttctttgcccctcctgcctcttgtctttcccccctgtttgtactctctctctgcgtcttcgcgcccttccacttctccgcatttgcggactcgcttcttttttctcccgccccctccagctttctccctcgtccgtgtgctctcgcctatcttctccctcgtccgctccgacgcccgcttctctgcgtgttcctccctcttatctctttcgtctctctcttttccgccctttccttgcccctgtcccgcgcacgtctgcttttgtgatgcacctctcttcttttctagcctctcttctctctccctctcttcttttcttannnnnnnnnnnnnnnnnnnnnnnnnnnnnnnnnnnnnnnnnnnnnnnnnnnnnnnnnnnnnnnnnnnnnnnnnnnnnnnnnnnnnnnnnnnnnnnnnnnngggtgngttgcagaacccgcagttgactctagggnatccccctctgcttgggctcagcccgtatggatcagctccgagaactccattctgccagtgagagacccggggcccagcagaaggccagactctgagagcgtcaggaggggcaggctggagctccgaaagggataggaactgcctgggcagctggcgacgccgtctggacagctgttaaggaggcccctcagaggaaaggatcacagtttcaca

SEQ ID NO: 1686 - protein, 317 aa, Homo sapiens
  MOD_RES (268)..(301): Variable amino acid
  MOD_RES (303)..(303): Variable amino acid
  MOD_RES (313)..(313): Variable amino acid
MEFHSCCLGWSAPPVCFPALWWCFVVLRCCFVCGIGVLWVLCGVVFGLSCALPLPVRRALFPRRFLPLSGVSLFPVLSPFPPCFFSPSLFRVAVSPFVSVFLPPLAIFSFFFSLPSPLAVSPFPLPRSPLPFSSSPVCLFPPLSLSRSLPVSRLAFFPRPLSLPLLPLVFPPCLYSLSASSRPSTSPHLRTRFFFLPPPPAFSLVRVLSPIFSLVRSDARFSACSSLLSLSSLSFPPFPCPCPAHVCFCDAPLFFSSLSSLSLSSFLXXXXXXXXXXXXXXXXXXXXXXXXXXXXXXXXXXGXLQNPQLTLGXPPLL

SEQ ID NO: 1687 - DNA, 21581 bp, Homo sapiens
  source
  (1)..(21581)
  CDS (201)..(304)
  CDS (11453)..(12511)
  CDS (15724)..(16034)
  CDS (21347)..(21381)
cacctgggctaagtgagaggacgcccgcccggggaagcagccagcggagggcgcaggaaggaggagctcgctggatgggggcgtcttgggaagggtgggaggagcagaaggagcacggctgaggaggatgcggatgggggcctgagagcctgtttgtccagtgagcaggggaggggagggctgcttggagaaaatgaaggatggagggcagggagtgggtaggggcgtctggcccgggcaaggccgctgccttcctggagcaggacagtcagggagctcactgctttctggaggaggaatgtaggtgagaccgggacaggaaggggtatgggtgcccagaaccggctgatgtgaaggagtcccacttagggatccaggaacagtgggaatagcactgctgggggccaagaggggcacttgctccatgggcccaagcagtctagacaccttgggggatgagggagcctcccctggtgtcaggagagcctgggggtcccccacacacagtgagggaaggggaaaacccacagcacttgcctcaaggctgcaggttttgaagaccttcagaaatttccctgtagcagcccctggaggaggcctgtggggctaggtcaagccaaggcctcggagtctgaacagttcgatggattcggagtctggctgctcctgggtggacagcccaggaccccaagtctgagctcctatcggagagagggacccagcctctagtcatgaggcctgtgctacctctgggtccttttgttgagaggctgcccctctccagccttagtttctctgtccagagggttccttgctggtcagcagtgcagctcaggtcctttttctgtgccccatgctgggtgactatagctcgttcacccaacctctctgggcctaagagattccccctcctcagagcagctgtaagtctcagctccacagaatactttctttaagaattgctttttcaggccatctgtgggagctcacacttataatcccagcgctttgggaggctgaggtgagaggatggcttaagccgtgagttcaaggttgcagtgagctgagatggtgccactgtactccagcctgggggacagagcatagaccctgtttaaaaaaaaaaaaaaaagtctgggcatggtggctcacacctgtaatcccagtactttgggaggccgaggcaggcggatcacctgaggttgggagtttgagaccagcctgaccaacatggagaaaccccatctctactaaaaatacaaaattagccgggtgtggtggtgcatgcctgtaatcccagttactcaggagactgaggcaggagaatcgcttgaagccgggaggcggaggttgcagtgagccgagatcttgccattgtacttcagcctgggcaacaagagtgaaactttgtctcaaaaaataaaaaaagaaaagaaaagaattaggctgggcacagtggctcatgattgtaaccccagcactttgagaggccaacgcaggaggattgctcaagcccaggaattcaagaccagcctgggcaacatagtgagaccttgtctctacacataataaaaaaattagccaggcgtggtgttgtgtgcctgtggtcagggctactcaggaggctgaggtgggaggatggcttgagcctgggcagttgaggctgcagtgatggctgcactgcacttcaacctggggacagagtgataccctatctcaagaaaagaaatagttacttatttcattctgatcacattttccagtacaaatacatggaggtcccaagtgccaaagttacaaaaaaaaaaaacagtttctgttcagttttggaagacatgtagggactttttctttaaacactttggaccaagttggggagttagcctgcattgagggaggtgacccagttgctaagagactgggaggccagccagggatgaaaactttgcctgtataatctgtggtcaccactgggtgcctgggagttacccacggtggacaaagggcaagagcgctggttttggagtcagatagatgtgctctgccctcccgcctccagggctgggctcccaggttggctgtggatccagagagttgtgagggagaggtaaaatgtgtgtgaaagttcttggtaaacacccagccactatatattatgagtggtagcacctaatctccttaatgatatttcaggtgccatattgggtcatcctcactaaagacccttcaagagggttttcctccaatagccccagtattaacattggtctggccttattatttgtatctaatggggttagactttcccttccatgctgagaaaaagttgtctttaagagaatgtgctgaacaatcagggcccagaaaggcaacaacgaatattttgcatgccaagaaggaggcaaaagaggaagtggaattgtacccaaataatgcttataataggtgttatttagctgagctgtaagctccaggagggcagggtattaatatattgaggtgttggctgagcactgtggctcactcctataatctcaacactttgggaggccaaggtgggaggatgacttgagaccaggagttcgagaccagcctgggcaacatagcaagacctcgtctctacacataatttaaaaaaataggcatggtagcgtgcgcctgtgattcccaactactcaagaggctgaagaaggatcaccggagactgggaggtcaaggctgcagtgagctgtgtttgcaccactgcactccagcctgggggacagagcatgaccctgtctcaaaaaaaaaaaaaaaaaaaaaaaatcctgtggtgttaccattggtatgaattccctgggctgttagttctgcgagggcagtggtttaaatggctctgtcactgaggaagctgcagcgcctggcacataggaggcctaaagtaaatattcttggactgtcccagggcctaagggcccttggaagtcactggtgaatttactctctcctttgacatttggagaaacagggccaagaggggaggggacttgtccaaggtcacacagggattgagtggctgagtcaggacgagaatcccacagaaacggcagagccagcactgtgccagagccaacacctggcatccatggctttgttttgcttccacaagagcccaagaggcagctattttaatcctctgattccaaaaggaaacaagctcagagaggttgagggactgttgcagagtcacacagcaggtgaattccagacccgaaatttcatcctcacataaaaatgaggcctgtggcgtctcttgaaacagcctgccggagagcctgcagagattagtggaggatgtccaccaccagggcagcagtcttctccagttctccaggctcactacctggctggcttccctccaggctggatcttcctaggccctgtgggcatttgtgtgggtgagcccgttggggcagggagcctgtctgcttcattttctgtgtgccccagcacacagaatgcctgggtagcgttgaggctggcatatagtataagcactgagtgaaatctgtgagatgggggtaacccagggctctccctctccataagcccattttccaccacctccctgcagcctggtctgttttgccccacgggtgttatgggaacctttgacagtgtgtatccttggagagcaggctggggcttgcaagccttcgttaaggagagaggtgaggagggctgaccttgagttgaggaatatgaattgggaggggtgaggaagtggaggggaggggaagggaggaaggagcggctcaggctgacagaggcactcccactggagccctggagatcgcacttcagaggttcagccaacccagaagactcccaaaccttctgcaagacatgtccaggccagaccatatgccatttggatcacctgctaatttggttcaccctcttgtgccctcgtgctctccagggcttctgagctgctggagttgaggccccttcccctgggactgtcactgcttagccacatctcttgggcctgtgggtaagcaccaatttacagggctctgtgaattcaaaacagttactctgaatggtctttgctaagaacaatttaatgattaagtaaggtcagtgtccttggaagtccaaactctagccagatttccctggtctacacccctagggataaggtaaatgtttaagcacacagtgaacttcctgaggcccccaaatctaatggaactagctattgagggctaaaagaggatggtttttttagaaaactcgaagcaaatctctcaggctggggatatttcaaagactactactattattattaataacaattgcaatatttgttgagtccctaaatgaagctaaaactttgttctaataaatttaatctttacagcaacctatgaggtagataatattgtcattcccatgagggagctaaggatcagagaaggtaagtcacttgtctaaggtcacatagctagcatgttatgcaatcaggagtcaaacctggtttgtctgaatctgaagtccatctgctctgtgcacttttataccgtctgctttttcctttattcctaaccttcttccattctgattcccactgagtagtggacaggaaccactgaagtttgcctgacaccatcaaccaggccctagtcacctggctttgcctttgccctgctgtgtgatcttaggtaagtcaaacttttcagctggccctcggtttccccgtaagtctcatgcagaggtgaatggtgagctgcttgctgcagcagaggcctggctaggaaggcacacagtttagcatggatttcaccactatgggagtggtgaagttggggaggagaggtgtgggaggttgtctttagccccaccctctggtgacatcacacaagacacccccagtccctggaagccccgcccctagtgcccctcatctgtggaagtgctcagcatctggtgaatttgcccagtcccatagtagaggtcaccagcccccaggcttgagagaaacccccaggtacccagtgcaatttgccagacttggaggggcccatggaggtgggctgggctgagctgcctgaatagacagggcccagcagcctggtgggcacacgactcagaggctgaccactcagaggatgccctgatggtgccctccggatatccatcctcatcctgctggctcaggcttgacccctgcccctgctttttcctttcccctggatcagagtccctttccatggagtcaggaggtggaaactaattctgaaaacagacctacttaggtggagtgaggcctctagctgaggtctaaagaaaatagggcagcggggtctctgtcatcctagcatggtgcctcaggttttgtccatagggcccattatatctgggggagggaggtataagcgagcgctgtcactcacctaaggaggtggcttgagccagggcctccctggagaagatcaggtgcaagcaggtagccagcaactgagggagactgaattgctagaagcctaagaaagtaatttataagaaagagcctggttgcctgctttagaccaggattttgcaaagttgttctgtaggatgcagacaagtgtgcctggagcagggcagcagtagtgtctgcaagcatctacagcccagtcctggctccacctccctcccccatcctccaaccttgggtaaggagcttttttttttcctttcttttttctttttttttttttttagagagtctcactttgtcacccagactggagtacagtggcacgatctcggctcactgcaatctcagctccccgagctcaagcgattctcctgcctcagcctcctgagtagctgggattacaagcatgcaccaccatgcccggctaatttttgtatttttagtagacatggggtttcccaatattggccaggctggtctcgaactcctgacctcaggtgatccgcccacctcggcctcccagtgagctgggattacaggtgtgagccactgcgcccagctgggagcttttgacttctctgaatttcattatccgcaacaacaaaatgggcagaatagtacttacctcccaggcaagttatgagagttaattgcaacaggactgtaaagagtgggcatatagtaaacactttctacatttaaactggcttttttttttcttcttgagatggagtctcactctgttgcccaggcttgagtgcagtagtgcgatcttggctcactgcaacctccgcctcccgggttcaaggccttctcctgccttagcttcccgagtagctgggactacaggcacgtgccaccacgcccagctaatttttgtatttttagtagagacggggtttcaccatgttggccagaatggtctcgatctcttgacctcgtgatccacccacctcggcctcccaaagtgctgggattacaggcgtgagccactgcgcccggcctcaagtggctttataatataattattactacggaaggaatccgtggtcacataagcttggcaaatgttgattcaacaaagctaagccaacttctttgctgcaggacttcttagagctttttttttttttttttttttgagaaagggtctcactctgtcacccaggctggagtgcagtggcacaatcttggctcccggcaacctctgcctctgaggctcaagggatcttcctgcctcagcttcccaagtagctgggactacaggtgcacaccaccacacctggcgaatttttgtattttttcatagagacagggttttaccatgttgcccaagctggtttcgaactcctgattgcaagtgatccacctgcctcggcctcccaaagtgctgggattacaggcatgagccatcgtgtccagcccttctgagagtctttaatgtgctgttatatcttgggaagttccaagagtgggatatggagcacaggactggacttatcagatcacaggcacccaggagctaggtgtccacagggcacagccatcgccatcattcgctggtctttgccgcagtagtggaatagaaaccttgctgggtgggaggactctggggaaggccttccagtttctgggctctgctttcctaagtgtaaaacaagagagttgcccaagatgctttcagaggtcttttctggtccccccaaggttctcagttgggaagacaaagttgtggacaagagtgggggccagattgttgaggttgaaaccatctcttggggagatggagaaatccagaactggctccccaaccagcaaggctggccaagggaggtcttgtgctctggatggaagtggccccgtcaattagtgcagcagcaatgtctgcttcctaaatctgccctgtgccaggctcgctggggaatagaagagtcctgcacatgcctgttgtcctaagtagcagcccctgtgcagcagtgtaacgactcctgcttccccactggactaggaaagactggggagcagggctgatgccagaatcctaatgcaggaggagcttaggaatgcaaatcaggctctggagatgtgggcttgtgggggtggggtcgtcttgatgctgcccttgcatagcaagcactctgcatttacttggactgtgtgtgacttatttgattggttttgggggtgatcacagtgccactgggggcagagaacatgaatgctttatcctgcctgaatctcttttccttgtctggtgactggtgcagaggtagtcacaataaatatctgatgaacctgaacactgagtccaataagtaagcttggagggaatttatttggcaggcagggagggattgtctggcaggtttttcaataactatttgagttaatgaataacacaatgaatgacggtaagcctgaattatgtaattgaagccaggtaaaacagtataaaattaggaaacgataaatagcccttgccaccttgtgttgcaaagtgcattttagggtagtggttaagagcacagtggctcacatttgtaatcccagcactttgggaggccgagtgggagggtcgcttgaggccaggagttcgagaccagcctgggcaacaaagtgagaccctgactctataataaagtaaaaataaatttaaaaaatcagctgagcatggtaacatgtacctgtagccccagccacttgggaggctgataggaggattgcttgagtccatgaggtcaaggctgcagtgagctgtgattataccactgtgctccaacctgggggacagagcaagacgctatcttaaaaacaaaacaaggctgggtgccgtggctcacgcctgtaatcccaacactttgggaggccaaggtaggtggatcacctgaggtcaggagttcgagaccagcctggccaatgtggtgaaaccctgtctactaaaaatacaaaaattagctgggcgtggtggcgggcacctgtaatcctaggtactcgggaggctgaggcaggagaattgcttgaacccaggaggcggaggttgcagtgagccgagattgagccattgcactccagcctgggtgacagagcaagactctgtctcaaacaaacaaacaaacaaaacacacaaaaaaacagacttgagttcagagcatgcctctgccatctgctacttcctggctaggtgggtgggcaaggcacttaacttctctgtacttcagtttccttacctggaaaatgggaataatgatagtgtctgcctctcagggttgctgggaagcgtctagcaggtgctgtgtgagcatttgctatgatttgtttttgtttctatatcttttgccagatcatgacattcctgagggcagggatcaaatctttcactctgttctttgtcccatccagcacagggtctgaggcaaagaagggctcagtaagtgtttgttaaatgaatgaatcaaggttaaactgtgtaacccattataggtcaggggaaagtgggattgggggagcagtaaggaggccccagaggtggcagcttgtagtggtcttaaaggatttcagtgcagggaaaggaaggtggcacagggtgtgacattggggttaggtggggaataagggtagtaggagcaggtcatgtgggccttgaatgccagggtaaggggttatattggatttatttggaactagcaaccatgggcagttgggggagggcctggagaggggattttgagagtgggggtgtggttcatcagttgttaaatggggactttcaggaaaaaagtggtcttttgagttgggcctggaaagatatgaagtgttatcagaatggtgtcatgttgttctttctttttctttttttttttttttgagacggagtttccctcttgttgcccaggctggagtgcaatggtgcgatctcggctcaccgcaacctacgcctccttggttcaagtaattctcctgcctcagcctctggagtagctgggcttataggcaggtgccaccacaactggctagttttgtatttttatttatttatttatttttgagatggagtctcactctgtcgcccaggctggagtgcagtggcgtgatcttggctcactgcaagctccacctctcgggttcatgccattctcctgcctcagctcccgagtagctgggactgcaggtgtctgccaccacgcctggctaattttttgtattttagtagagatgaggtttcaccgtgttagccaggatggtctcgatctcctgacctcatgatccgcccgcctcggcctcccaaagtgctgggattacaggcgtgagccaccatgcccggcctagttttgtatttttagtagagacaggatttctccatgttggtcaggctggtctcgacctcccgacctcaggtgatccgcctgcctcagcctcccaaagtgctgggatcacaggcgtgagccactgcgcccggcatggtgttctttcattcagcaaacattgagtgccagctatttgctaagcaccagggattcacaaaataatgagacaaactgcctccccttgatgagctcacatgaacaatcatgagaaatgtgaaaatcgtcaaaggatggtctgatgataagcactcaagtggaggggtcatcgtaggaggttcaggaggccagggaaagcatcccagaagaaatgtttttttgtttgtggttttttttttttttttgagacggagtctcgctgtcacccaggctggagtgcagtggcgcgcactgcaggctccgccccctgggttcacgccattctcctgcctcagcctcccgagcagctgggactacaggtgccccccacctcacctggctaaatttttgtatttttagtagagacggggtttcaccgtgttagccaggatggtctccatctcctgaccttgtgatccgcccgtctcagcctcccaaagtgctgggattacagatgtgagccaccgcacctggccgctgtttgtttttttaagagacaggatctcgcttgagatcaagcttgatcaagcttgagagtagtagtgtgatcagagctcactgtacatcaaattcctgggctcaagggatcctcctgccccagcctctccagtagctgggactacaggcacatgccaccacacctggctaacttttttgtagagataggatctcactacattgcccaggctggtcttgaactcctggccccaagcaatcctcctgctctgacctctcaaagtgctgggattacaggagtgaggccgcatgcctagccaagaaatgggtttttgaggaatgaataggggtttgcctagtaggcaagatgaggaaaatgtctcaggcagagggaacggctcgtgtaaagctacagacatgtgaaagagcagtccaggggttggtggggctgtgtctggatttgaagtgcactgtggttgtgcaacaagactggagagggtagcagggaccaggtcatgcagggtaatggagggtcagtaggggaccctggccactcttgaggagctagataggtagaggcagtgggtctattagcaaggtcattattgccaccagttgaacactaatggtggcatgaacacgggctgagagcgcctcacccctctcatgtgtttcacatggccagatctgttctttaggagagaaaacagctggtgctgctgtgtggagcctgggaccggaaaggaaattaacaagacagggagccttattagttaatacattcctcaaacatttattgagcacctactatgtgtcaggcactgttctaggtacctggaatacatcagggatccttgctctcatgaggtcagagatgaggaattccataggatgagtcttctgttcttaaaccgagtgtaaggataaggctgtcggagaggagggagtaggatttgggcatcagagccccccagctgctgctcgtgggggtgaggacaccaggcccctgactttgctctggtctctctcccagctccctgcccaggcccacagccatggccatggcccagaaactcagccacctcctgccgagtctgcggcaggtcatccaggagcctcagctatctctgcagccagagcctgtcttcacggtggatcgagctgaggtgccgccgctcttctggaagccgtacatctatgcgggctaccggccgctgcatcagacctggcgcttctatttccgcacgctgttccagcagcacaacgaggccgtgaatgtctggacccacctgctggcggccctggtactgctgctgcggctggccctctttgtggagaccgtggacttctggggagacccacacgccctgcccctcttcatcattgtccttgcctctttcacctacctctccttcagtgccttggctcacctcctgcaggccaagtctgagttctggcattacagcttcttcttcctggactatgtgggggtggccgtgtaccagtttggcagtgccttggcacacttctactatgctatcgagcccgcctggcatgcccaggtgcaggctgtttttctgcccatggctgcctttctcgcctggctttcctgcattggctcctgctataacaagtacatccagaaaccaggcctgctgggccgcacatgccaggaggtgccctccgtcctggcctacgcactggacattagtcctgtggtgcatcgtatcttcgtgtcctccgaccccaccacggatgatccagctcttctctaccacaagtgccaggtggtcttctttctgctggctgctgccttcttctctaccttcatgcccgagcgctggttccctggcagctgccatgtcttcgggcagggccaccaacttttccacatcttcttggtgctgtgcacgctggctcagctggaggctgtggcactggactatgaggcccgacggcccatctatgagcctctgcacacgcactggcctcacaacttttctggcctcttcctgctcacggtgggcagcagcatcctcactgcattcctcctgagccagctggtacagcgcaaacttgatcagaagaccaagtgaagggggatggcatctggtagggagggaggtatagttgggggacaggggtctgggtttggctccaggtgggaacaaggcctggtaaagttgtttgtgtctggcccacagtgactctctgtgcacgactcaactgccaagggcatcactggccaattcttggatttagggattggctaggagttgctggggtccactcctgggcctgccccagctccttgcccagggagagggaaagagttaacggtgtgggccactccagcttgcccttccactgccactcactggggtgaggctgggggtcagcttggtgaggattggggcttctagattgtctaggcaggaggtgaaacttaggccagagtcagatttgagctgagccaggggaggccttggcaacctacttctactcagatttcattgctggatgcggaaggggtaggcccaaaatatatacaggatcttactgtcccttgaagcccagccacaagtgttggagctgcagagagaccccaaaggtagtagattgtgccagatacaaatgggtcccatccagtgcttcatactccttcagtcactatcccagacagtgagccccagatctcctagctctggcttctgtgtcccacacggcctgttcccagcttctctcctggttcccttgttacggattcatttatccattcagtgtttcctgggcctctgctcagaggcaggtcaccactgggccctgtggatcaatgcaagatgacaaaggctttttttttttttttttttttttttttttttgaggagtttcgctcttgttggctaggctggagtaaaatggtgcgatctcggctcactgcacctccgcctcccaggttcaagcgattttcctgcctcagcctcccgagtagctggggttacaggcatgcaccaccatgcctggctaattttctgtatttttagtagagacggggtttctccatgttggtcaggctggtcttgaactcctgacctcaggtgatctgcccgtctcggcctcccaaagtgctgggattaccggcatgagccactgcgcctggccgacaaaggctttgatatcagaatgaactgtcaagggaggtgctggagagggattaacctgtgctgcctgggaccctcagggtcttaggttggggagtgtgaataggagtttgcagatggagaataggaagggcattccaggcagagggaaacctgtgcagagaccaagaggtgtggaaggaaaagtggggttggggctgggtggtctggattatggcctggatgcaataaagtactgtgacagtagccacctctttgttttttgtctcctgtttccgggaggggcccctgctcacattactggaggttttccggaggaagctggggcccctgggagtggacacagggtgcagggagcagttcttgttttatctttgctgggggatggggttggggccttatataccatatctatatatacaaaatttgtttggcaagggagtgggcggcagttttattactaaagttttataagtagttaaaataatgtgtttaaaatatgataatcccactttatgatctgacaaagactttttttgtttggtttttccttcaattaaggagggtttttttgttttgtttttagtggagggggcaggggcgtgcacactccaccacacatattgagcctcgtcgcatgcgcaccgaagaagtatgttaacttttataatattgctttttccatagtacacagcaatatatatacaatgaaggaaaattgggaagataagaaaacccaaattaattagaaatatcacttcactgctgaaatatcatgggggaccttatgaaatacacacacacacacacacacacacacacacacacacacacataaaatatgtgtatataaataaatattttgatataggccaggcatggtgactcacgcttgtaatcccagcactttgggaggctgaggcaggcatatcacctgagggcaggaagttgagaccagtctggccaacatggcgaaaacccatctctactaaaaatacaaaaattagccaggcgtggtggcacacacctgtagtcccagctacttgggaggctgaggtggcaggatcgcttgagcccaagaggttgaggctgcagtgagctgagactgtgccactgtacccgagcctgggtgacaaagcgagatggctctgtccaccatgaagacaggctctggctgcagagatggttgaggttcctggctgacctgctgcagactgggcaagaggtggctgagcttctatcctccctccaccaaaaaaaaaaaattacaaaatttttggccgggcgcggtggctcatgcctgtaatcccagcactttgggaggctgaggcaggcgtatcacgaggtcaggagttcgagaccagcctggccaatggtgaaaccccgtctctactaaaaatacaaaaattagctgggtgtggtggcgtgcgcctgtacttccagctactagggaggctgagacagaagaaccgcttgaacccaggaggcggggctgcagtgagccgagatagcgccactgcactccagcctgggcgacagtgagactccgtctcaaaaaaaaattttttttacatatacaatatgtaaacattacgtataatgtacatatattccatctatggagattgtggttagggacggaaggatgggtgggggtgccaacatttttgcatttccaaggggttttctgaattcacaaagtactttcacaacctcatttgatcctctttaaaatccaaggcacagtaaacggtgaaagcaggactgaaatctagttcctgaccccaaattttaacctcttcaaaatcctctcccatgtggcttcgtagttacgcttacattaaaaaaaaaaaattaccaaagttgttcgcacactcgagtgtctggtaaccacttaggtcgaggacccctggtctggagtcgacgggcctgatctcggctcagccacttccttctgggggtgatcgcgaagattcagcgatgacacgaacaaattcctaagcccgggaaatactgtaagaaattttcaatacagcaaaaagaaaatgtacatttctgaggctgtcgagaaccgttcacacagcagcttccgaatccgctcttgaaagagcggatcagaaagaacacgcactcctccgcgcagggaaatatgccgcacgcactcaagggaccggccgcgaaagttagtgcgtgggcggggcacagcgaagggggccagggccttgccggggcggggctggcgcccggggcggtcgcgacgtagccccgcccccagcgttggcgcgagatccgaacgtcggcggccgcggttctggcgttccctgaggcgccgggagcctgcgccggcgtcctgccggcttcgtctcctcagcggccatgaggcggacaggccccgaggaggaggcctgcggcgtgtggctggacgcggcggcgctgaagaggcggaaagtgcaggtgggacgctgggggatgagagggcgttgggaaccaggtagggcctggaggcgtaagacgggaggagtttgggggacacctggagatgatgaaagcgaagtcggggacagagaagggaacagcgttggggattcacaggcgagagggattgtggtctgaagaaggttgaaaaacggggcttggggaggatgggagggacggaaggaaagagcgtgctgttggggggtctggaggagcggtgcgcagggaggggcggcgaaggttcaggtgtgggagaggcggagggaaagttcgctcggagcagttgaactgaccaggctccctaggaggccacagtccctgcgagacgtcctagtagaggctggagcattgggagatggatgcgaatgcaaattggggaaattctcaccccggggtctgtttccacccaatttgccaagttgcaggccaactacctgcccagaaccggtaactttgaggggaaaagtagaagctatgggaaggggagctggcctcctatgtactgagcagtcactgggtgccggatactgcattagatactgaatatgcgttatatgtgtcgtcattcttgctgggaatgaggaaactgaggttcagtaactaacctaggcccgcctaactagaaggagctggaaatcacattcaggtctgtcacctaggcaagatgctcttcagtcactgtaaagaaacaaaagtgcgacataataatcattcatgtttattgagcattttatgctggtgctaagtgttttaggtatgttaccttgtttggtacaattctatatggtagatagtgtaatgatacccattttacatacggaaaacaggctcaaaacagacactaggggcaagattcttgctctcaggttgctcacagtcttatagggaagaaaagaggtgtataaataataacaacaatacctaacctttattgagtgctttctatgtgtcaggcattttgccgagactttatacactttatcaatggcaggtactcaccaaaattcagtaaagtagattttgtcattatcctggttttatagataagaaatttgatcattttattattattatttattattattattttttgagatggagtcttgctctgtcgcccaggctggagtgcagtgacacaatctcagttccctgcaagccccacctccggggttcacgccattctcctgcctcagcctcctgagtagctgggactacaggcggccaccaccacgcccggctaattttttgtatttttagtagagacaggttttcaccgtgttagccaggatggtctcgctctcctgacctcgtgatctgcccgcctcagcctcccagagtgctgggattacaggcgtgagccactgcgcccggcatattattattattgttatttttgagatggagtttcactcttgttgctcgtgctggagtgcagtggcgcgatctaagctcactgcaacctctgcctcccgggttcaagcgattcttccgcctcagcctcccgagtagctgggactacaggcgcccgcactacgctcggctgatttttgtatttttagtagagacagggtttcactatgttggccaggctggtcttgaactcctgacctcaagtgatccgcccgtctcggcctcccaaagtgctgagattacaggcttgagctaccgtgcctggccgattgttttattttttcaaaaattatcaaaatggccgggtgcggctgcacgcctgtaatcctagtactttgggaggccgaggcgggcggatcacctgaggtcaggagttcgagaccggcctggccaacatggtgaaaccccgtctctcctataaaaaatacaaaaatttgctgggcgtggtggcaggtacctgtaatcccagctactcgggaggctgagacaggagaattgcttgaacccaggaggtggaggttgcagtgagccgagatcgtgccactgcactccagcctgggtgacagaagactcagtctcaaaaaaaaaaaaaaaaaaatcaaaatgtgcaatagctatttattactccttgaattaggaataagccatttgtaccctttgaatacattcttgaatgacatgggatgcgtgggaaacttgtataccactttgatttgttagttaattttggagacaggcctcagtccgtcacccaggctagagtgcggtggcgtaatcacgactacctacagcctcaacgcccccgggctccaggtgatcctcttgcctcatcctcccgagtagctgggactacaggcatagtgccacaaagcccagctcattttttgtattttttttttttgtagagacggggtttcgctgtgttacctaggctggtcttgaactcctgagctcaagtgatctgcccaccgtggcttctcaaagtgctgggattacaggtgtgagccactgcacccagccaccagtttaatttagaaagagaacagaaatagaattaggaagagttcaggagagcgagaaagggaatattccacagggaagaggagagccaatatttgtctctctgtctataattctgttttgttgttgttgttggtgttgttgttttccgaaatggagtcttgctcttgttgcccgggctggagtgcagtggtgcgatctcagctcactgcaacctccacctcctgggttcaagcagttcccctgcctcagtctccagagtagctgggattacaggcatgcaccaccttgcccaggtgaatttgtatttttagtagagacggggtttctccatgttggttaggctggtcttgaactcccaacctgaggtgatccacctgcctcggcctcctgggattacaggcgtgagccactacgcccagcctaatcttgttttattgtttgttttgtttttttttttttgagatggagtcttgctctgtcacccaggctggagtgtagtggcatgatctcgggtcactgcagcctctgcctcccagattcaagcgattctctgcctcagcctcatgagtagctgggattacaggcgtgtgccaccatacctggctaatttttgtatttttagtagagacagggtttcaccatgttgaccaggctggtctcgaactcctggcctcaagtgatccacctgcctcagcctcccaaagtgctgggattacaggcatgagccaccgtgcctggtctgtctataattcttatacccccaaatcctgcctttttccctggcaatgttatggtgaaaacatttgtcttgttgatgtagtacatgacagttatagaatcctccaggatctctaggcccttaacttattctgatttctagaggcctggaccttatgaccatactcactaacaccatttctccttcttgttacttgattcccaaagatacttgttaaaatctttggttcctgactattaactattactctgacttccaacccagagaagagtactaaagattccctttcacaaggtgcctcttcctagagtggctatcaaataggcatacagtcctttgagttttaatgtcagggatggatgggcagtacctagtgtctgtgtttttgaaaacatgcctcttcccccttgatctctaaacagaatggtttgctatttttgagagaatgagtagtttgtagtctggccagtagacaatagtagtctatgtttggagtgagtttgcttctctcctaatttgaactacccatttggcctcgttacttaggccttgtatgtatactagatttgctttcattttgtttttatattatgaaaataatatatgtttgtttaaaaaaaattaaacaggactgtggctcgtgcctgtaatctcagcactttgggaagctcagcactttgggaagccaggaatttgggaccagcctgggcaatataatgagaccccaactccacaaaaaataaaaaaagtttatcatgggcggaggagtgtggcagttttaatgtacgtccacaaattcttcagtacttttccttctaaaagaacttaattcccctttccttgagcacagacagtatttagtgactccaatgaatagaatgtggtaggttatagtgttagaattctgagtctaagcctggccaacatggtgaaaccccatctctactgaaaatactaaaattagccaggcttggtgacgggtgcctataatcccagctactcaggaggctgaggcaggagaattgcttgaagccagaaggtggaggttgcagtgagccaaggttgcgccactgcactccagactgggtgatagagtgagaccccatctcaaaaaaaaaaaaaaaaaaaaagaaagaattctgaatctaggtcataaatgacattgcagctttagcttcattgtctctttgggagaagccagctgtcatgttgtgaggacactcaagcagctctgtggagaggttcatgcagtgaggagctgaggccttttgccaacagttgtgtgagtgagggagtcatcttgaaattggataccgcacctctagttgatattttgaatgcaacctcactagactgtgagacagacccacccatctaggcttaacccaaattcttcatgcacagaagttgtgagataataaatgcctggctggatttcagactggtgacccacttatacctcttatctccccctttttgaacataatgtctgtaacagttatgcccgttccaaattgtatgttagatgtatgagggaagataatttgtctttagttcacaggcctgcagatctaaaggaactgtatttaaactacatttttggacttcacatgtacctgttttagatgctagtatccttgatattaagctaatgctataaagagatgagatttttgtagagttttgggagggagggagtatattttgcatatgggaagaatgtaagtaatttgggccagaaggtggactgtgatggtttcaaaatatgtccacactcttcccttcaagaggtggagcttcattctcctgcctttatgtttggattggacttggtaacttgctatttatttatttatttgtttgtttatttttttgagatggagtcttactctgttgcctagactggagtgcagtggcatgatcttggctcactgcaacctccacctgctgggttgaagcagttctcctgcctcaccttatgagtaactgggattacaggcgtgcaccactatgcccggctaatttttgtatttttagtacagacggggttttaccatgttggctagactggtctcaaactcctgacctcaggtgatctacctgccttggcctcccaaagggattacaggcgtgagccactgcgccgggccgtaacttgcttctaatgaatagaatattgcgggaactgatggtgtgtgactttttcagattgggtcataaatggctttgtgacctcttttgattgctcactctgggaaaagctagcttccatgttgctacatgaagcctgttaacagccatgttagtgagctatcttggaagtggatcctttcagccccagttaaggcttcaga

SEQ ID NO: 1688 - protein, 502 aa, Homo sapiens
MEGREWVGASGPGKAAAFLEQDSQGAHCFLEEECSSLPRPTAMAMAQKLSHLLPSLRQVIQEPQLSLQPEPVFTVDRAEVPPLFWKPYIYAGYRPLHQTWRFYFRTLFQQHNEAVNVWTHLLAALVLLLRLALFVETVDFWGDPHALPLFIIVLASFTYLSFSALAHLLQAKSEFWHYSFFFLDYVGVAVYQFGSALAHFYYAIEPAWHAQVQAVFLPMAAFLAWLSCIGSCYNKYIQKPGLLGRTCQEVPSVLAYALDISPVVHRIFVSSDPTTDDPALLYHKCQVVFFLLAAAFFSTFMPERWFPGSCHVFGQGHQLFHIFLVLCTLAQLEAVALDYEARRPIYEPLHTHWPHNFSGLFLLTVGSSILTAFLLSQLVQRKLDQKTKEICRTHSRDRPRKLVRGRGTAKGARALPGRGWRPGRSRRSPAPSVGARSERRRPRFWRSLRRREPAPASCRLRLLSGHEADRPRGGGLRRVAGRGGAEEAESAGITGVSHCAGP
